United States Patent Application Publication US 2008/0114160 A1 - sequence listing, part 46

SEQ ID NO: 11780 - DNA, 17180 bp, Oryza sativa
aattggtcctgagtcaacagtactgccggaacgtaggtctccaatggctccagcttcttcctaagcattacaaatttaagaagcaacaaggctttcagtggaaatcaaaagctgcaacctgcggaaatgcaatgtactagtaggagtactaaatttatgaagggagagcaaggtacggataagtacttcttgacgtatttgtcaaacgggctcgcgtctgcccctgcaacatcaaaagttgggaagcagatcagaaacaaatttactcgcacacccgaaacactgagctccgatcccgacacgaacacgcgcgcgcgagagagagagacgaacagcatgctgcatgcagctggacttacggccggcagcagtggcggtgagccaggaggcgacgccggcgagggagacggcgcggcggccgattccacccgccgcggcggcgacctggcagaatcgtcggcggcgagacggaggcggtgaggggcagaggtgcccgccgccggaggtggtggggaggagcgaggtgggcattctggctgcctgctgcgacgcgacggcgggcgaggcggcctccggctacggttagttgagtgtagagggctgggccccttttgcacgacagccactcgtgtccaagttgtttttttctttcctcgcaacacggcgaaagctatgcgcgcgctcggtgcagatgcacgctacgtgggctcggggttgccaggagaaacactctacggagtacgtgggagaggatagcaaacgtagcatctcagtttcaggtgcaaccgtgcaacggtgcaagcctgcaaggcatgtgtaaagtttgtcacatgggcttgtttaggttgcgtttggttcgtggtgtccatccatccatgtgtttgagggtgcgctcttttcagcttataggattagattctcctcgctttttcgttagcacgcttttcaaactgctaaacggtatatttcgtgcgaaaacttcctataaagaagttgttaaaaaaatccaacaaatttattcataaaaaaatatatattaatatttaattaatcatatgctaatcgtatttctcgtttgcgtgcggctaaacagtccaccgccactgctaaacgatcacaccctgagtttgtcatatggtgattctgttttcttttagcaaggtggatatggtcatccaattcttatttgattggatgaatgagaagggatgggatgaaaccaataagatattaatatgttaattatcgttaatatagcataatctatactaattaacaataaatagactaattatgtctaattaacattaattctgacaagataattgctaattaacaacaaaaatatattaattattgctaatcaatcactaatgatcaacgaagttggatatcctcatctggccaatttggctggatacggtcatccagcatctttgtggaatattctctttctggttgtcctatccaccctcacctaccaaccaaacatactaacaaactggataggcatatccctcaaactaaacacacccttggttgcttgccaaatttttacagtaggattgttcgactcaattgaatgaattggctttccagagagctattagcgtgtattacaatttaaaaagatgggggtttttttttggaaagaaactatgtaaagaatttattttaaaaattgaaaatttagcattttggaaaatatgtttacagaaaacaagtaataatcaactcaagaagctgattcaaactcagacaagtttaaatttttagtgtgagggtttgagtgaagctaaagatatggcatatgatacactttcctactcttatggtccatatgttatgcactcgttagtataaaagcttgtcacaagtatgggcgtatggctcttttttggttgccaagaaactatggtgtaccacatgcaaataagtatggcaaagtgggtaagctatccaaacagccccatacttacgccacgtggggcctgtgtagtgtgttaccactatccagtttatggttcgtgagagttgtttttctcttcttcgctataaatcttcgaaacgccgtgggaatcagcaaccgtcgtcattcttggttgcactggcacagtttgcacgaggctgaaaagatgaaagaaaacaaaatacccaaataatcagtaatgttttcattgcaaataaagtagagttttcttttttctaatacctgcctatggctctaaggacaacattgattttgctcctgatggcttcagcatgtgctgacggataactggttgactcttgtaatacctgattcaggtcttccgaagctctaagagatagaaagacattgccactcacaagctgagctaaagttctttcaagaaaaaagacaaaaagatgtgcatttggaatatttttcatgtatataccgtaagcaaatattcacagctttggaggccgctttctcaatatcattagaagcataatatccagcaacctgcgtcacgaattttgtagggtcagctaagttcaggtgtggataattcggaatcaagaaatccaattatggaatgaaagtatgctagcaattgccagtttgacaaggcaaataagatcttgaagcttgtggaaacaaatacacttgcatggtttgaagaaacatataggaacacaaagcttgaaagcagattagcaaaacaagggtgtgtttagttcatgccaagattggaagtttggttgaaattgaaacgatgtgacggaaaagttggaagtttgtgtgtgtaggaaagttttgatgtgatggaaaagttggaagtttgaagaaaaagtttggatctaaactcggcccaataagacatataatcagaacagaacttacattctgaatattggaatgcagagatgatactggactggactgaacgagtgacctgtactcctcgaagtttgacctctcaaattctgagcaatcgtctgcatcgaaccatatatatagaaacctcaggtaggctatatcacacaaaatgtatatgcaaaatatagccacaagttcaagatgtttagtacagatgtttgcggaggcaaacaaatacttgggaaaaggggtgaacttaaacttaaaatgaacgcttccatcaaaaggtaagacaacacacaaatgaaaaatggggagactgcaattttccgaacatactcctcgtcacaaaataatgtcttttttttaagaatccgttactagaaaagctttcatagtattacacttgtctaactattttacaatttatgcaaaagaattaggtgatcagagttatgtcttatattggctttgacgagtccaaaacgacattattttgtgactagagggagtactatattttacttgaatgtgcatttagtactgtagagcaatttatgtattctttttgtatatggcaaggaaattagaggtagacatgtgacaaccattggtatatgttggatgcacatcaacacatatggggttgcagtgctatacaataataaaatcaaattcaaaggaaaaacggtgttttagttaaaggacttctcattaccaagttcattcaacgagtcttgagtccgtagcgcttccagaacacggtcctgaagatgatttctgaccatgcattcagtagcagcagagggagaaatcaatcggacatcatgcaaaatgaaaaactaaagctggcagcaagtatggtgtcaactgcaaatgttctatacttgtcacaacatattggattacctcttggtgtactcgcccacaggattgggaatgacaacccctacaaaaaattggatacaacataacagttacacaccatatatgggaaaagaacatcatataacttctcacttatcagcaaaacaatcttcggcttcaatccgaggtcccatctcacaagctcaggattgtaatccaagtcacaaagtgttttgggctagtatcatatagtcactgcaaggttatacaagttgtcttcgtcgaatttctttatcataccataaacagtatgtacaaacgcacaattaacatttacagcagtgagccacagggtcctgctggagatgaaggttgcacaagatgccaacggccaagccaatccatggtgataatatggttgctggggattgacagtgccaccagacctcatcaaggaaagtggaggtgtcaaaaagtggggaaaggccacaacctctagctggctactgtgacacaaggcctagacctctagctatgtggattttgatcgcacgttgttttgagcatgaggtacagcttcacgcatgtttgtaagacatcaaaatgtatggatcaatgcatgagtaacctagttgagtgcaaggaaacagccgaaaacaactaaaactactgaaatgaacagtctcaacgacaattctgccagtgcagagacattctgagacaaacccattacgcaaccaagatttaagttcctggggaacataagcttctgaaaacaaaaaatttggcggtcacctgaggtaatcttgaggtacttggagaatgcacagggacgacaatctgaacagagaacggagaacctttcagcagaaattggggccacagcttgcagagtgttctgtttcatgtcaacagagatgatccaggcatttttgtcttcttcagtcatcgtggacatcatgtaaacaaaatcgtcgtcatacatgctcagagtggggatagtacaaatcagtttcttcaattgcatcattttggtattatcgtcccatagatcgggcaaaacagtggagtaactgggatcaaccaagatgtcaaatttgtcaactgagaaacgcttgcgccaatctttccaagaaagcatcctattccatatcgtggctttccaaccattaccattgacgtcgtcactgtagcagtattctatgtccacaaacttgatcaaaccatcgcagcaggcgacatcccgagcacactctggggctatttcaccgcatacagttgcaccgtacgcatctatggtgtacaccactggcttagggaatgtcatatatctcataaccgggtagtcgtcgaacagcttttcgagcagaataataccacgccagagatcgaccaaacccaacgaatcgtgtccaatggtgatcagcttgtcggtctcatgctcgatcgctaccttgtgaatctcagacggggacaagtccagcaagactggtttgctgctccaccttccggtcttggatgagaaggtgcatagctcgaactggcaagcctcatcagaggccacccattcagaattgaggaaggccacatcatagtgctcactgacgccgctgcggcaagggaagaggccaaattgctgggagttgaagggcatggcattggggtcaggaagcaggtcgagccatggacgcccggggccagcggtgtagacgaagtagttgcacgggctcatgtaggtgccagacctcctgggacgcggggacaaattgacgcggaagagaacgagggatccttccgcggcgagaacggagggctcgtcggagaagccgtcccccccttcagtcccgggcaatggacggtgaagtaggaataacccggcggatcgacgagtcagaaggacacctggacgatctggccctcgctcgtctgggattcagccgtggacgcgttccggcggtcggagatgtacgctgttttatccagcatgacccagtcgggagagccagagcgtcgggaggcggcgccggggccagcggcgtatggattcaccagcgtgggtgtacggtacgaaacggggcaaatcgtcatgagatgatgaaggcgggttgggggatgggcggtgccggaggcaaaggcggaggcggaagaggcgcaccgggttagatgaggagcggcgcccggtcgtgcagggcagaggaggcagccgctcgggtcaggtggaggaagcaccgggatggagattggactttggaggagggcgtcgggtcgggtggcggcccagatctgaagaatgtcacggtggaccgagcaggattgccatcaacgtacgtccggcctatcgatggagtccggaagggaggggagagggggcctgcgggcctgttacggtaactgggctctgcctttctgctgcgtaagtgcgagcccgccacgatgacccgctatggagctcggcccggctgttgggtcctttcggttttgcacaaccacttacgtaggggcattgctaggctacattagcgttgctaaattacgttgaccaacctgttgtgctacattaaatcatgacacgtagctaaatatgtaatttacaagataatggatggttcaagtttaagggcatgctcggtatttcacacatcttgaaacttaggggcgcgtagatattgctctatcggtagaagggtggtccgacatgtagttcactcaacatcttgaccactacttcatccatttcacaatataagtcattctagcattttccacattcgtattgatgttgacgaatctacatagatatatgtctagattcattaacatcaatatgaatgtgaaaaatgctaaaatgacttacattatgaaacggatggagtactttgtttaagtgcttgtggaaaattagcggagaaaacgtccataatatggcaatagacacgaataaaggttcgctaaaaaaatgtaaacaagtctatattgtatggttgttacttcgtactccctccgtccaacagatataagattggacgtgacacattattgtatggttgttttcttatgaaacaaagggagtagttgttaccccatgttgtgagccgtgatgtacgtttgcgttgggacgtgtctttaaattgatgtacgagattgaggttattggggcacgggccttgacttataatggattattacgagcgcttatataagcaccgggtaagggatttatagagtatttattctctaatatcttaaaagcagaatcgtcctcctttcatcttctcctcccacttcacctagtgtgtccgtacaccgaaagtaattactacattcaatattttattctcaatcaccttcctaacttctctatttacatggacctggaactggttgattgcttcatgtaatcacctcgtttcttcaatggaaacaggagaagatcttacctctatttctaaaaaaacgctatttatatgagtttagtctgttataaagtacaagtatgctaatatgttattaatggaagaaattaagaacaaaacccaaatcgaatactgctcctctgcttttcttcctgttgttcttcccctgctcggcaagcaaaatctacccaaactcctatgttttggcgagacgccaacgatttgtcaccaatcgtgatagagaaccgcacaagccaacatacaaaatggcaacggtagcacaaagagctcagttgcgcagattacgggaaaagcttgaactggacctaaaaaatttataggcgtagcgtattactataagtcttaagttttaacaggtgatcgacagcccaaactgccagtatatcaaggtaaaccagtcagagacaatagctgcttccacatttccacatgagatcctcacttcccagcacatagaggcattgtttggataatgtgatagggaaatgatttcccacccatcaaaaggtatctttaaatcctagccatttattctctctcttccatttaatccaatcccttcgttcattttccaatcccaatcccaccctctttcccattatccaaacacacccagaggtgtggctagctctagctctagagagacgccttacacttgagcacgaagccgagcagcagcagcgtggccatgaggccgcaggatgagcccccgacgcggtgtatccagtaggggtcgaacctgaccaccctccggtccacgaagcacgtaacgttgatggccaggatcagcacgatcagcagcgccggcagcagcagcgccgacacgccgccgccctcctcgtcgtcgtcgctgtcccacgccgccggccgccgccggtcgatgtacagcggcgagagcacggcgagcaccgccaggacgacgcacaccagcctctccgtcgacgacggcctccccatggcggcagctctcctctctaccgctctctgaaagtctgaagaggctagctatgcgagaatgctgccttggctgttcagaatataacttgtttatgctgtctcaaccaatcttcagaaactaggagagaacctaacgacattttcttatcgccaaggcttttgactattgatgattgattcctatcatgcaaaaggaacatattcagactgtccatgattatccacggatctgtggcgagaattggactgcgatgtaaaggcgagattcttcctagctagtgagctcggaatcggattccgggacaggcagctcaagatttggggtatcctagaacagcgtggctgatggacgtaggatcaaaattgacggtcctgatcgttttgatgggaggaagagtaaagctgagctcttccccctgatcatactgaactttgttcgtgaagcaccagcctgatgtcattgcctgttcgatactagtacgaatgattttagaatcggtacggcacgattactctgcttacacctgttcttggaacgagaaaaatagcatgaatcctgcactttatttgcctgtgtattgtactaatatattgtgagacagagcatctttctatctgtttattattagctgttaggcaagtaagcagaagtgtgagcatcaaggttggcatcaggttgaagcggtttggtctgaaacggtaggccaaagcagatgagaaaaggcgagatgaatgtatccaaacaaggtccttcaagctagagtttcagtcttccaaagagaaaggctaagctatagcatttcgtagatgatgccattggaaggttcatgatatgaaaacaaagtgacttgaaggaatgttaggctggtggatttccccaaacaagtgtccacaactcataaatactccttgtatctgaacaatttatttccgaataaagtaaaagttctccgggaaacaagtaaattatgaataaaaaatacacacactaaactaaccttcacgatactattagtccccgccattatctagcccatgcgaatcttgcttatattctcttaaacaggtatacccactgttttgagtttttggcttaacctcaaaccaatgtgccatcatgtcctgtttagatgtagtgacaattcaatagcctatgcatccaaaaaataaacagattcgcgaatgcccatcaaccaatcatagattgatatccatccataaacagcaacacatagagccccatcgattggtcacacaagtcaaagcaaaagagaaaatttgaattttcgaacttgataaaatattttcaacataatttttttagtgttgacttttaaattaataaactgttttggtttattagagaatatgatcaactaacgaggctgttatactactcctatcaccaccctggagctttcctgaaatccatgtgtacagccatcaggatagcaaagcaccatgaacacgaacgcgacgcttcttctgtcacgtacgcccgtccctcatatggccaatcgcgtcgtcaaatggtccagagttcagacagccatgggccatggaaccatggaagggagccgaccggaccacctcaccaccgcgtgactggacgcggctgtaaaagtgggtcccaccccacccacccggacccactctccaggcccacagaaacaagcgaaacggatagcggaaaaaagagagaagaaaagagaagggaggggaaggcaaggcataggtagacctcaccggacgccgacgcggaggagctcatcactggccagctgccgccgccgccgccaccactgctccgcctccgattgctgccgtctctcctcgcggggtgggtggggggggggtgtatggcgaccggctccgtcgtggcgccgccgccgtcgctggccggcggggggcgagggctccgtcggcggggagtcctccaccggcgtctcgcggcctcgcctatgtgagcgctctggttcgatttttttgccttgttttgcgtcgggttcgtctggtgctatgcccccccggtcccgggtcctagttctttacaaagaattgcgttcatttcttgctgattgtgaagtaggggaaactggggaaatgaggaaattacttgagtggtgaaaaaagaaattaaggaggtttaggggtgttattgattagtgacttgctggatttccttttgcaagttatattgatggcaagaaaggctgatcaattagttcaatgtaggatcacgctcttgctatgtcggattggtgggtgtatttatatggttactgattgtattacagttttacaccacacaaatattttttttgtgctacaaatttagacatgaactgcaataaactcctctctttgtaagacgtagcagcgagcagtgatgactcctagtactttgtattttgtgatagttatgagttgctgtgtggaaatttggaaagtttggtccaagtagacaccttcatagatgcacaatttggagctagtactttgtattttgtgatggttatgacttgctgtgtggaaatttggaaagtttggtccaagtagacaccttcattgatgcacaatttggagcatttggtttgataggcaagaattgagatagcattgggcactcagaaaagtgcggagtaactcttacacagcatttatgcactgtcgatgcatcttgccgtcttcctcattattttcatacaaaatcagcattttttcccaggaaagatgaacctgtggcttcgacgaatggcggcaaagatgaaatggtcaccgacagcctcagtgttgctagaagagcctctcaccctgggctttcatcaagcttatctaatccaatgtcagaagtcaccacacctttccatccagctgcgccatctgatcttcgtttcaatcgtcttcgaccctcagttgaggaaagtgattgcaaatacaaaagattttttggctgctatgttgctcgggaggctataattgatgaggaatactgggtatatttcttgtcacctgtagaaaacattagattgttaactctgggaaatacactactacaattttcgctgacatagcctgtacaggtattttggagtattctgatgtttactgttatatgctaataccgttgtcgtcaacacgcctttcgttttgcatgctaatattgctcctaagatgagaccactagctaacacttatgttcctagtcttttaagctcaccttttagtttgtattatgaaattgtaatattcactttaacataaatgtgtaactttccttgtaccatcatcttgatagattgctgcatggttgagagcagagaatcgatatgaagatcagtcaagcgatcggttagtgtttgatttgcaagcaaattttatgcagcctcctctgttgtttgtactgcttttaacatatgatcagtgctatcctcatggttgacatttatttaccatcatttttactgcagctatgttgaaagcttcaaaaggaagtttgcatcgcaggtacacgggtaatcaattggttactagtttatgtctgtttgaaggcaattgggatgcctcctgctcaaatagctctgcttaaattgacaatgtgtcaaaacgttccattaatttgccgcctaatgtcattcaatacttcatgttgcggtttgtgtgtatcattgttggctatctttctgcaggaatttcatgcattaaagaggcgatgtagcaagctgcaaggagagaagtatatctgttttgttgcggtatgagacaaaagctccacgtatttggtctatcaaatttggtattaaatcttggatccagcatgttagttcataggaaatacttgcaagggatgaacacatggcaaaatgactaccacaaatcaccgtgggggcttcctccactgtttcccggtcaaaaaagtaaaaaggctaccacaaccaacaagtgaaaagttgacagtttttttgtctaatactacaatacttgctatatattctggtttatagagttgaactgacttgcagttgctttaccgacattttgcttatatttcacaattgaaaaatgtctgtctctggtgtaatatttcaggtaaaaaatgatgatctcaagcgaactgttttgaatagcgtcgttggcaccctggatgtttgtataaggcatcctctgcatggggagacatttcctgcggtatggaaaaatagcagtatagcacccatgttttttatataacttctacaatttttttatggtggaaaattacatctcaaagttcttcccaggagcctggaaagtcatcatttcattgtagaatataccagccagatcagccaaagtttgggtatctgacaaatgtttgtgttgctaaatatgcacggcgtcaagggatcgccagcaatatgttgttactggccatagatgctgcaagactcaatggtaaagcaagaagttgtttttaattaaaaaatgaaacaatgttattgtgtactagttagtacatataccagataatactgatccatctactgttatcttcaaccctgctttaggtgctgaagaagtttatattcatgtgcataaggataatctaccagctcggaggctctatgatcagataggattcagggtatatatactatcttgttttgctatagttctaaaaaaaatcatttggttatataggcctaaatataaattacacttcttctatgcgtttgtagatggttgacttcgatggtgctcgtcagtcgtcagatctatgcttactctccttcagttcctaggacttggatttttaatacgatggagttttgatcccatctccctgtgcagatgaaatgccactggtccttgtgatttggaaagcaggacggtgtcacgaatacatttacaatcttgtacatcaggatagtgtgaaatgtttgtaactttggaattgacgatgggttaacctatcttgttctgatgccctggaatgctgtggcatctgaatgcttaccaggtttcttttacagttttattgtacagtttgtgaagactgctaaaagttgttggtccgttctgtcgttctgtaaggagataaccaatgcaaaacaccaaagcttgtgttgcattgtcgtgtgaagtttaccacatacgagtaccatactcacactgccaaacacaaaaccatactcacactgccacacacaaaaaatgtgcaaatacctttcatataattgactataactattcacgaactcgttccaaacaatgtaagttcatcaccagttaaccactcagcagtttcagcttcagtactaaaagcaccattgtttggcatatttttattacatatgccgtatcagcgataaattacaatttaatccttaacaatttatgagtaaaccacgatgaaaaaaaaaaaaccaaaaccagcttcgaaattaagttttaaattttaagatttggtaaagaaactatgggatacaaaatagccatctgcaaccaataacaacgggtgaaaattgaaacacagccctatgatacagggtctccgagaattggaaaacaatcgcaaggtccgtgcttggaccctcctccgagcacgatacttgtagagtgacctttgggtccaatcaaagatgatcaaataaggttatttttcatatgaatatatctactatagcacaataaaacttaagtcttcgaagatactcataggatagtgtttgcgtgcgttcatgtaggatagggtttacgtgcgtgcgttcatatgggtgagtgtgcgttcatgtaggatagggtttacgtgcgtgcgttcatatgggtgagtgtgcgtgtgttgtgaatgtctaccgttgtactatataactttttttaaaaaaaacttataaaccacttcgtattctatctaccactagtaatatgcccgtgctaaacgctacggtactactttatttgtctttaataatttttaaaattttcatgttagcaaaaaaaaaaactattatatgaactgtgcatttgagttttaattcaatttatgtcatagatcaaatatatttcatgtaaagtataataatatgatataccaattcatgcagatatataatgcatatatctgtgtttaagtcatatgatattaaagatatatgataatgcgtatatttatgccttaagtcataataatgcataataatatgatatattaaggcataaatccgtgacacacaaaaaaattaggaatatcaagttaatcaggaatggagtatgtgcgccgtcaaaaaaatgatatcattacaaaggaacaactaaatctttgatgtggtagtagtacaggtcttagaccctgtttagatgggactaaaactttaaaagtccctattacatcgtatgtttggacactaattataaatattaaacgtagactattaataaaatccatccataatcttggactaattcgcgaggcgaatctattgagcttaattaattcatgattagcctatatgatgctagagtaaacattctctaattatggattaattaggcttaaaaattttgtctcgcaaattagttttcatttatgtaattagttttgtaagtagtctatatgtaatactctaaattagtgtctaaatacagagactaaatttaagtccctggatccaaacaccaccttactttgaatatttccaaggctcaaatgaacaaaaacttctgcaatgtattgattattttgcctcagattgggcgactaaggatagcagatctgttgacaaacaatatggttctgatttcaggagaccataccaccaatatattgcccaaaattggatatttttgcaattatacggttttcagatagcaaatagtgcatgtggcattaatcacaacctatgcatgtgctgataatttcccttttcttgagagggagagaaattctgttacatgcttggtgatttgataatataaaactgttttttgttatataaatttcagtatatacccctataggaaataaagcagcatatatcctctctatagaaaaatgcagtatatatgctcgtaatggtgaaaaaaaatggcacataggagacattgcagtatatacttttgtatataaaaaaaatcagtatatgcatttacaggaaacattcagcatatgcatctacaggaaaatttagcatacaaatctgaaagcatgcaaggactgaagtacacaatatccatctatttctataaagatattcaatctaattgtctcctaatcaaccactggcaataatttttggggcatacttttgactatggtgataaaatgattatcctcacctgcaaacgagtagaaaattttagacactgaatgatcttgcagtagaaaaatacatgtactaacctgctgctttgccacatgtacgtgaatactctgctgctctccttcagatgtgttcatcacatcagggcaaaagaaaccagatggcggccaggctgatgtggcgacgatggcggtattcaacaagtcaatatatcctgcaacgaggagaacaatggtgtcaactgtacatcattgagcagacagacaaacaaatcaacatgttgttgatgaatgaattatcaattgagcatcatccatgtcttgtttcaaaatccatctctttcttctttggttgtagtggttccactccggttatgtttcaaggttcgttttctctttctcgttgccacgacaatatgaggcttcttctaccagtaccagcaaaccaatgcccacataagcaacacctagctagtaacaaaattcatggcttgaatcttaggaactattaggcttgtttgccggcagtcagatctaaccttcatcttgcatctaaaaatatagttctattcctaataagcactaaagaattaaaagatctgccatcacaaaagagtaacccatctgaactacatggagctatttactcaaagatcaagattcacaattattagctagtcctctgtactataatgcatcagaacagagcagtatccatcacttaatctgatcgagcttgacaatgtaattagccatgtacaaatgaataagtgcgatttagattgcacagaaacatgtatcttcaatgacacggccaggccgatgacatactattcctttagcaaacaaggacatgccgatgaccatataaaaacaatatatttgtacaattaattggaaatggagaaaaaaattcataaacccctaacatcagttgttatgcatatggatatatataactaattatgggatgaaataggatggtttccttcaggacacatccccagtacttttgagtctttcaccgcttagtactatcatataatccaatatgctgttatactatactccaccgttttgtgtcgacctactaatactatatccatcctatagctagttaatgagaatcaattaagcttcagaaggaggtgtcaatttaaaagcaatcgaaataataagcacttggttaactacagtcacaggttcacagtgcacttggatgccttctcaaatgccgagatatcactaataggtaagaaattattataaataccaactgagaataacatattccagcggtacaaaatggttttttccaagtacatgtaataccgtgttaattggtaatttgattacagttcacaggaaccccattataaaaacattgaaaattggcaacacacagtaaaggaaattaagcgaattaattggatataccttcaatgcagggaaggaggttatgtgggtgggaagctactgttcgaactgatctggtaacacatgatctcatatatatgtcagtacattcatttatacgcctaccgaaatcatccgtcaaaagtatataccaataatatatacacaagaatgattgcaacgctgcccttctccaatcatcatgtcattagcaaaatagtgcggtgggttggagaaaaaaaaggaagttctgcatttgtaaactaatgatttttgagccttcatatctttcatctaaaaatattgttctattcctaagcactcaagcatgctactcttgacatcagttgatactaagcactca

SEQ ID NO: 11781 - DNA, 1998 bp, Oryza sativa
tttcaattgaattcccaccctgaagtcgcaaatccttgttgttggtggctcgcctccagggactgcagtgtggatgtggttcggctgtcctcgctgtggatcggcggtcggcagcgaccgcggaggagatagtcggcgtggagtagatcggcgatgcgggcggcggaggctgtcggcagcgcccgcagaggaggttgtcgctggcttccttggctgtcctcgatgtggatgtggatcggcggtcagcagcgcccgcggaggagaaagccggcggtcgtagatgtggatcgacgattggcgtgagggacgaggcagcgtagccggttggcgtggggtcggggcgtcggcgtgagtcgcggcggcgtccgggatcgggcgaggcgaggcgacggcggcggcgtccgggagcggcggcgtcgatctggaggcggtcggcggggaggggcgccggcggcaaaggcagggcgtcggaatcgacggcgccggtggctgcgctgcagttggcgtgagagggacggagcgaggaggttgggcgaggggaggcggagcgatctgggcgagcggcgtgattttcggctgaggtgcggtggtttctgctcgcggaggttgagggggtacgtgggatgataggagccattggattggatgattctggaccgtcggatttgatgaatgaggtttgtataggagtgtagttggtgaattatatggtagatagatgatcggacggctcacggctgggaggaggagtagcgcaaccaatctcgaaggttcgtataggtccacgagggcgggaccagctgtaaccgtgaaatacccaggctgtccacggctcggccccaaatcggcaaaatcgccaccgcacacaggagaggacacagcgacgaaagcagcgaagtcggcggcgcgtcgcgcccccaccgcatcgatcgcctcgccccggtgagccatgtcggcgcgcgacagggagacggccgtggcgctggcccgcctcgccgccgcgctggacggggcggtgctcggcctcggcacggcggcgctcgccgtcgcctcgtgggtcaagtacctcgccgcgtccgggcagctgcggcgcatcgcctccgcgccggcggccgccatacccgacctccgctcgctcctcgcggagtacggcggcggcggcggcgacggcgaccagccgatcctcgcggtggtgcggggccacgtccgcgccgccccccgaggcaagtacctcgtccccccaggctccggcgagcactgcgtcgtcgcaaagcatacccagctggtgagtcgctcgctgagaagtatcttgcgcccggcgcttagagctagggtttacgcttaggtggtacggatgcttagcaagggtgtggtttccaaatccaatcataaattctcaagggttctgtgcgtgcttaatgactgttctcgtgatgatgagattatatgggaacgctgaagattccgattaaactgtagagataagcatgtttaggcattggagtacgaagtagtcgtggagcttttgtttggtttcatgtgctgtattgcaaatctagatagaggccttaaattgtagaaatctttgagaatttcagtgcataaggctataatgtctgtttgttttcattactctctgtgtgtagcttctaggagtagtcgagtaggaaggtacgtggttggtattcccttgtgcataataattagatagtttggggaaagggtagatgcttgtggtttccttgtcaggctattcttgtgctcaattctgaggtttgacaactaattcggaaagtttggcaatattgattattaatatgcaaaatagcatttggcttctgttgcattgggaatcagatggttagtaccgtatatgagttatctggttgcaagatgcctactagctgcaaaatcaatctcctgtaaccctgttatgcttccatggatttgggtcttaggagagtgttgttgttaaagcccggaagtaatggtaaaatg

SEQ ID NO: 11782 - DNA, 653 bp, Oryza sativa
tggacatgtgctcaaaggatgtaataaatatgatttttttttaaaaaaaaaagatgaattcccagtaactttttttagggggggtaaaaaaaaaattttcttgccttaaaaagacatggtttgagagagagctctggccatgcagcaaggacgagccaatcagccaatggtatatgctgcaaaaaagcaaacgcatgcatgggccccagttgtcagtggcatatgcatgacctctaatttatatggtttattttttccctcgtaatatttcccaacattttctgtgtcacgtaggggaagctgcttagccctgatgaatcccctaatgattttggtaaaaatcattaagttaaggtggatacacatcttgtcatatgatcaaatggtttcgcgaaaaatcaataatcagacaacaagatgtgcgaactcgatattttacacgactctctttaccaattctgccccgaattacacttaaaacgactcaacagcttaacgttggcttgccacgcattacttgactgtaaaactctcactcttaccgaacttggccgtaacctgccaaccaaagcgagaacaaaacataacatcaaacgaatcgaccgattgttaggtaatcgtcacctccacaaagagcgactcgctgtataccg

SEQ ID NO: 11783 - DNA, 73079 bp, Oryza sativa
ttaataagttgaacaaagaattctcacatgagcctgtgtactttatgagagagaggggcagggagttaaaattaaacaagcgtaaaatggacaatctaataatttcactgaaacatgtttagttcttttgctttgtactaaaagcagggccttgtgcctcttatctaactgaagcatgtttagttaaaaatagcttcgtcaatcaatcaaagcatggaaaagagagtgaatagcctattatttttttggtcaactcacaatagcttttgcattggcaacatgaccatggatgaaaaatatacatatgacaaagagatcagcattttaactaagaatacagtttttgaaatgaaagtaaagcttaagagctgacacaagctaatggaattatagaatgtggagtaagaattccaggcagaaaagtatgcacatacccagtttacagttccagcaaatacaggaaaccctttttccttggggactggcaacgattccccagtaagcattgattcgtcaacaaaacttgatcctccaaggacatttccctaacagaagatatgtcaaataattacgtgcaagaacaaactgatgtagtaagaaaatgcaacagaagaaagacaagtgtgtccaaccatcagtgaactagagcagccttctagcattttcacctctacaaataaatcatgatatgaaccttaaagggtatagtactataaaaatacatgatcaaaaccatgagtggacatacaaattttacaaataacagaggatatccaagtttgagaaagagagagagagtaagcaatctatggtgcattcattgaagacagataggcattgctgataaattgtctaaaaataactaataaagaagagggaaaaggagatatattcaaatgatctgagcacacgcaattcatttgtaagattacttcactatatgaaattaatagtaacaaaaaaggggtcagtcaaacttaggatttatgcatattcaaagaaagtactataacataaaaccagtgtggctccttacatctacagggattgtttctcctggaaggaccaatatgaagtctccaacacgaacatcatcaacaggaacctcaacagtgattgcatctgaattcaaaacaccatctgaggatggatcgtcacttgaggaagtaacgaccaatcttgactgaggtgataagagtgactgcaacagaataaggcataagtagttgccacttgccaacaaattcagtcttataatgaagaacatgcagaactgcagataaattacttcactaccatcaactaccactgcaaagtttctccaatagtgtttgagggaatacatatttacttacttttattctacaaatgaaaaataagtgtctctgtaaaggaataaggtgtatacttacaacgagctcattcatatcgctagaagccttaagcctggcactttcttcaagagatcgtccaagaagcacaaatccgagaagcatgacctgcatgctacaagaaaagtttcttcaacattattatgcaaaacatattcaactgttaattcatcaatcaccaaatcagttcaagtaatgcggtaggaagtaattaggtttatatttgaacaattcaacaacacaacgggatgccatattaacaatacaccacaacatagacaaaaggcagacaacattgacaaacgacaggagtgtcaacaagaagatgaaacgtgcgtgcatggaagatcactcaccggttcatcaaaaaaggttgaattccattccagttcagggttcagcaaggacacctgcataaaagaaaagctgcatcagtattcttgtatgactgacagacgatttgggcactgcaaatgcacttactgaactgatagcaaatgccgctgcagatccaaaccctacaagagagttcatgttgggggatccttgcttgaatgctcgaagaccatcaaaaagtatatctggtgttacattgaacacattttgagaaaaggataaaaagcctgaagatacacattgcacggtcatgctgaaaatgttccagagtaatgtacaacacatctagttcttcatatcatctgccattctgttgtttcttaggaggctttaagaatatgtctcctttactacccacccaggcacccaccaacccaaacaaaagcccgtgaatcgaagtgatgaagtatttttcagggcaaacaataaggaaatccttgttgtgtacatacattagaaatatataaaaaaacaaaggagtgtttaccagagaaggaatgtgcaatctcccccatcaagtaaggctaccaaattttatctagccatgactgccatctcagagaattcaatgatcatatcaaggatgactacatgtaatggtatgagttttcagcatctcgtgtcagacaacctagtgacctgcttgctgctattgagttgtctatttttcattgtttagagaattatattgttcttaggaactaagttaatttggtcaagttattgctagtccctatctggtttgatacccaaaaaactgtgtagaagcctatacaaaaaaaaaacagtacattactatactatacctcttccaggcccaaacaatgccgctattgcaatgccacatttcacatacgaattatgcaacagatccaaaaacgttcctgcaccatgcataaaccgatcagatagtgatcctagtggaaaaacagttcaatatagcatgtgcatcagtggccaatttagactttcactaaacttcattcatgtccattcatctattgcacaaacgccacacaacctgtgatcacgctcccgtggtttgaactcaccatggccgacgtggatgccgagcgagtgtaggaaatgggttgcgtgcgagccgcagcagagcgcaacgagcgtccacgcgaaggcgacgcgcccacggctccgcgtgaggagctccgccttcctggccgccatctccctccacttccgagcgctgtcgctagcccccgaggccgcgccccctcgccgcgccaccgaggggaacccgcactccgtcagcctcgccgccagctccttcccggcggccggctccggcgacctcagccgcacggccgccgactccgcgaggaggttgaccgccgcggtctccacccgctcgtccgcggccaggatggtccgcacccgcgccgcgcagccaccgcacatcatgccgctcacgtcgagcagcacggtggcagcatcactggccccctctccttctcccgccgccgcggccgcgtcgaccgcgctcgaggccgaggcggagggatcggccgtggagcggggggtggccaccgctgggccgcgggggaggacgacgaggcagaatcgctgcgcagtcgaggccttaccacaaccgccacctcgacccaaccggagacgccggagcaacagggggttaacgccgcgaaccggagcggtgacatggaggggggaacggctagcggtggcggccatggaggcggtcgcccgcgagcgcggtggggaagcagctagcggagaaggattaagcttaggtgcggaggagggaggaggcggccatggaacgcgccggacgaggagtggtgggtggtggactggtggtggtgggaaatgcagtgcaggggaggagaggggaaaatgtggtggtggtggaggaggaaaacgggggagatggcgacgtgtgcgagggatgaggaggaaaacgggagtaatctttgcgagtcggatggatttggatagcaatctgtcgagacgtttggaggttttcgtggttgaaaacgtggtgggcgtgacgcacgatgcagatccacaaagtttcaaactcccatgtggctttgcaccgtatcgctcgcaatgtgccggtgaaactcccgtttattttgatgtaaaagtaagtttgcggcttacccaagtaccggtgtgtccgtgcgtaggagcatcgtgcgtcggtgcgtgtcatgttgctcgatcgcgataagcaacggaagctgcattctcggggtagacaatatattgtcacgaatcacatactccgtatgctcgtatttcatcgataactcagtaactcacaatatagccttgtcagtgtctaactgaccataagcattgtcagttgtcaccttgatcattcaactggattttcgtatgagatgtttgcgttgtaataacacctctttaaagaacatgtagcttattttttaaaaaaatcgtacatcgttttgatctatttacgagcgcatatcatatctactttttttttatttgagacacaactaaatggtcgtggactcgtgggcttgtggctcatcagatacctcctttctttaataaataacaccattgactttttatcacacgtttgactatttgacttattaaaaaaattatctaattttaacttattttgttgtgagttgttttatcactcaaaatacttccaacatgatttatatcttacacattttgtataattgttttaaataagatgaatgattaaacatatttttaaaagtcaacggcgtcatctatttaaaaaataaagggagtaattggtgcccactaataattattacaaactacttctccgtcaaaaaaatcctaaatatgtatatggacaacatttatatccagatacatctcaattggactttttttttaactgtgggagtaaaacttaagatacaaatacgacgcattatcatccactaacaattactcatgcaagcataactaatcatctaaaatatgatattgtaaagctcaatatacaagtatatcaaatcatattcctcacattgttttcataaatactccaacattcattatttctatagtatgcaacatatatcatatcttactataaagttatcccccactaatttattaagcttaacatgcaaagatgctacatcatcatccactaaacaagatgtcacatcatcatccactaattaacaatatgtcacatcatcatccactaacaattatcacatttaaacatcatgcaaacatgctatatatttatagtttttataatttaagagctttttaaatacaaacatgttaaattatcatccaacataattcatataatgtttcaatgtatatatttattatgttttatgatatcctatatatttatatagttcatcctcacttagttagtgcttaaatgattaaactatggtccaaattatctttctccttttttcctctaattaatttatatcacatcaattgtttttagcatttagattattaatctacggtccaaactatctcccttcttttcttcttctataaagtcataccaccttactttttacgtttgaatcaccattctacatactatttaaatttaaattatcataaaccacattaatttacttaatctgttgttatccagctatcttacacgttattttttatttctatcataataaattcccacagcaatacgtggggtttcacctagtttactcatacaatttgtaacaaaacgtgggtatcacctagtaatgctcgttggctaaaactccaatattagagggtgtggatagtgattgagtgggatttaggtcctctcactaccgcaataaatgctagtgcaatctttcgtagctacaacactcgctattggattttgaggcaaatttcacttggtgctcttgccatatcaattgatatgatgcatacatcacaaatcctaggtgtatagtgtctctaatggtgttacggcagaggatctcatttcacttcgatagatctccgcctcctattaagtagttcttctattaatgtcatcgctaatataatgttctaagtggctcctttgacaagcaatgtcgttttatcctttacatataaccgatggtaaaataatttcaaatttaatcaaatttttacagcagaaatagacaattaggaagtcatttgagcttgtctttaagtcaaacttctctaaacttaactaagtaaatagacgcaacaacatctacaatatatgttctacaatatacttattttgttttgaaaatgttactaagtttttatttaatttaatcaaattaaaaaaatgacttggagtaacaaaatgagcatttccaacacaaaagtagtactagttcagaaatactagaacgtaccaggggcaaactccaaaacctcccatccgatcacctccgtcccgaacgttatctctaaccccttcgtttcccacccaccacctctctccggcgtgctcgctcgcacacagtccccaatggcctcccggaacgccgacccgccgcgtcaccacccctcgacgccgcctctcctcctcgccatgcgccacctccccttcccgggcgtccaccggccgcgcgcgctccccgccccggacctcgcgcccctcgccgcccgcctcgaagagctcgctgccgccgcggccgcgcacccgctcctgaagccgctcttcgccttccactcccacctcgccgccttctcccaggtaggtcgacgcccgcggcctccttgagctcgatcacacgaacagacgtgtatgtgcgagggttgctcacgacgcgcggttgttggtggaatgagcagagcaggaggcgggcgatggcgacgatgcgccggcggcggacgacgggcgagtgcccgctgtccggcgagcactgcttcgcggcggtgctgggtgactccgtggccggtgtggtggtgtccagcggcatcaacaacttcctcagcctgtacaacaccgtcctcgtcgtcaggctcgtgctcacctggttccccaacacgccgcccgccatcgtcgcgcccctcaggtacatagtactcgtatgtatgtatacagtagctacgcacacggcgcaacgtagcactttagtgacagtgtttatggagccaacaattagcctggtctaattcagaaaagaaactcaaaaacattctccctccgttcataatatagacatatagtgcatattttcgtagtctaattttaagcttagacaaatcattcaatccaataaaaatgataattctgaattcatatcgaaggtactttcttattttgtaactgcaatcaaaatagtgcaaaaaaaaaagtgcattgacacatctgactttgtgcagcacgatatgtgatccgtatctgaacattttccggggaatcatcccgccgctggggggaacgctcgacctgtcgcccatcctcgcgttcctggtcctcaacgccttgtccagcaccgccgccgcgctcccggccgagctcccggacccagcaccgccgacgtctcgcggcgcaacctcgtcaagctccgtgctcaccgcaaaccggaggaaatggatgcggagaatccgcccggtaaaatcgcaggaaggagaggaggaaatgtgatgctctatctaggtgggacttcgtttgaaccagtttggacagatggaatcgctgtctcactgacatggtggccatcagactaagagtctgggcatgttcagacgcgaacgatcatcaattaagcaggcggaattgttttggttgtgttgcttcagaagatttttgcttgtacgctgtagaatccatcccattgaggcttcgtgttttctgcatgtatgcagaggaacaacctgcttgactagtttgacatgttccagtcttttggatgagtttgttactttgttgatgaatcgcatgctcactgtttatactacatcacagcagtacacgaagcatttttattctgtatgcatccagtgaatttgattttggagttgttattaggctattaacatcgtacatcacacttcaagcgtgcccctcccccccaaaattcttttcttgtatttttaagggtcatgggttttctgcaaagctgaatcaaaccagtcgaccatatgtatctaatgctcgtttgaaggggaaccttgagatccaagcaagaagtccaacacgatcttgttgaaccgatccgggtcctccatttgaggcacgtggcctgtcttcttgatgatctccaatctaacatgatctcccaagcagctgcaaccgtcataagcacaaggaaaaaggttaatctgcagttgcaaattttgtattgctgtgaattattttacctcttgacagcaaatgccttatccaaggggaatatctgatcatggtctccccagataagcaatacatcctgagccaatggtgtaagctggaatgcatccgtgcccacagttgtagcattcataagctcgatcttctcttccctcttgtccgaaaaaagtttctgcaaattgctgaaatgcaacattagtgtgtttgctagcataacagtgcacccaagctatgaaagaaacttgtgctctgcacaatgttcaaaatataaacatgagaacacgaggaattcgctggaattttgagtgatttatatggatccttcgtcaccttcatgatgtctcggatcacgaagtccggtagcatggcgccggcctgcttccggtagaaggtcagctccatgagccggcgagctccgcgcgcgtccagcggcatgagcacgtcggccgggtgcgtccacccgctgccggcgcgctcgaggaacgcgccgtcgtcctccgccgtcttgagcaaatcggagttggatatcgccacggggccgaccctctcgggccccgccttgcgcgccatggcgtaggccacgaacccgccgtagctggtgccggccacggcgacgcgcgccgccgtccccacgagcgccgggagcgcgtcgagcagcgcggcggcctgcgccgactcggacggcggcggggaggaggaggaggaggaggcgccgaagcagaggaggtccgggacgatgatgtggaagcggcgggagaaggggcccacctggcgccgccactgccacgtcgccatggggccaaagccgtggatgaggaggagcggcgggaggcgcggctcccccggcggcgcccagtagtggatggtccgggcctcaccgtcgccggaggtggaggggagcgtgacggtgctggggcggaggccggcggcgaggaaggcgcggcgggcgatgtactccatcagcgggatgacgccgaagcccatggtgacttacgtggacgtgatcaagtgatcgagacggggctctagtagagaaattggatagtagcaggtagtactagcttggcatacgctgatacgcaacgccgccacggtgagatgcatacagaggagaaggaagagcggtggggtgtaaatgtaatgacgtataccaccctaaccagctctatagctgcttctatagagggctgtatacatagggagtggattttaatcctgggtgggacgtcccctcgtatatttttcttctaaatttgatacaaataattataaaaaaagcctataaaaattaaatgtagagtatagttatatctattggttcataaaaaattaagttcaaattcgatctacacaccaagaaactaaaaagacatattcaaatgtgaacaatatatggtactattcatatgttaaatttgtttttttaatctcgttgtgtgagttgagttttgatctaagattttgtggagttgaatagagtgttgtataagtattgttaaatttttctagattttttcataactatttggattttttttttgatttttttaagtaaacgagggatattccctcgagggttcccctatatatgcttatttgattgatgttcaccagaacttttggtgatgtgataaatttagtcattgtttggtttgctattagaatcttgagggtgccaatctatttgaagataggatttttggtaagcatgttgatatttaaaatcttcacatcaaacaataatcctacctactctttcaaagttttgatttaattcagcaacagatacaaacgagatgcaccaacattaccaaaacttcacagaatttagcttactgatattatggtaagctaaccaacatttgccctgactctccattgactccattcaatgctttagatggctaagaaaacaaatcaacaatccacccattttctttaattatttctcaatgtgcgttctcaaataattcgtagtacaaattttagctatgaatggacgaaggtggctaaccatcttatttcaatcaatcaaatattcgagtgggcatccgacttattgcgatgcgccatttgacgaaggatcaggcttgtgagtagccagcaagaagtctagcaggatcttgttgaaccgggttggatcctccagctgtggagcatggcctgttttgcttatgatttccactctagctttcccatccaaagaactggacagagcgaattttgtgcaggaaacgtcaatccgtgttcagttaaatactgaaatggaagcttcgtactagtatgttactatccattacctctgaactgcataagccttctcaaccgggaacaactgatcttgctctccccagacaatcaacacttcctacaatgccaatgaaacatgaaaggtttcagctacggtaagtgtcagtgaattcactggttgaaatactgtaataagtctgtcacttacctgagatattggagttactgggaacttgtctgtgccaactgtgatccccttgaagagttgaataagttgctctctgttctccgtgaaaagtttctgatatagtagaagataacaaaaccatctatttcagaggacagtggcgtttggctacttctgtgagtaatctgaagttctgaatgatatactaccaatctcaacaaacatgagctgtgtaaactgtagcacccgctaaaagtagttgggtattattgcagtgtgcatggctttgcctcttgcaaatggatgctagattcattacttagctgtgagttgtcgtcatttgtttagatgccagtgcaagttcaaaaccaacattttttttacgagaaccgaatatattactgtgacgatccagccaaatcgctggtcaccagacgttccaggcccaggcggaatatcggcccagctggaaatgttttggagattgcatcccatggctgccaattcatgcggcaccttgttacattcccgaggacagaaattaaccgaaaaagagagaaaacaactggaaattacatttttggcttactactgagaacagaaaaaaaaagcaactgcgtatttcgatcaacagttgcatattttgattcatgcatttcaaccgtcagatggaaatgacaggatatataatcttctactatgcttatttggtactccctccatctcataatataataagttttagagttgagcgtggttatattaagaaagtagatagaagtaagtggtggagggttgtgattggatgagtagtggaggtaggtgggaaaagtaaatggtggagggttgtgattggttaagaagagaatgttggtgtaaaagttattatattttgggacggagggagtactactaagagcaaggtcaatagtatagccaactattagctccaaaacatctatagccaatctaatagatcattcatacaatagttaaatataaaaatatactacaccattaatatctggtcccatctctcatacacacataacattttggagtctgtgttgcagccggctacaaatctgtagcccgctttcttctctctcttcacttttcttctcgatatatggttatagctggcttatagcctgctattgtacctgctctaagagcaagtttaatagtatagcccactactagctccatatcatttataactaatgtaatagccaattcatacaatagttgcttactatactattaatacctggtcccacctgtcatacacacattacgtcttggagtccgtgctgcagctggctacagatttgtagcccactgttcttctctctcttactttatctctttaaaatattattatagctggcttatagcctgctattgtacctgctctaaatggtaggagtaatttacatggttgttttcaacatgattttagtaagattatagatatattgttggtttatgtctctttgaatatgtgttggacgagtgtgattttgtgcgtgtaatgttatgcgttcttgttcatccggcgtttaattaaattaaaaaaaaaacatgtttgctctccactgtcagtcttcacagttcagagcgtatataaaaatgcgagcagcagttccacggatcgaacaggaacatgatgcccttcttatactttttttttaaaagaaatccaactttatgctacgtacgagcgattcgagacggcctagtttttgaattgtcagcgcgagaagtagtgggagtggtttcagttttgacctggatgaagtcgcggaggatgaagtccggcatcagcaccggcggcggcggccggcacgaggccatctccagcagcttccgcatcgcggcgggctcggccggcaggagcacctcctccacgccgctccacccgtcgccggccctcttcaggaacccccggtcgtccgccgccgtcttgagcaggtcggagctcgcgatcaccacggggccaaccctcccggcccccgccgtgcgcgccagccagtacgccacgaacccgccgtagctggtccccgccaccgccacccgcctccccttcatccccggcagcgcgtccagcagcgccgccagcgccgccgcctgcgtagcctccgacggcggcgaggcggcggagtcgccgccgaacgagctgccgccgaagccgatgaggtcgggcacgatgaggtggaaatgccgggacagtgggcccacctggcagcgccactgccaggtggcccgtgggccgaacccatgcacgagcagcagcggcggcagcagcggctcccccgtggaggcccagtagtggacggtgcaggtcgcctcgccgccgtcgcccgggtacggcagcgtgacggcgccggggctgaggccggcggcggcgaactcccggcgcgcgaagtagtcgaggagcggcacgaggctcaggctggcgcccatggtggtgatggtcttctccctccactgagctctcgcagtctcgctcacgcagcagcagcgcgcctcgtgtgataacgtctggtcgaggaaaaaacgtaaggctcacacttaacactggtggttgggcgtgtaccaaacttaatcgcgagttaaggaaaggaaaattccggttcgttagttggtggtgggcttctttgaatgggaggcgatgttattgacggggttaaggagagccgtccgtttggtgagggcgggctccatgatgctgacacgtgtatatcgccagtggtgcattgtactagtactccgctagtggaggtgagagagtagcggccaagggaagagattgccgcactggccttctcaacaaaaggagaaagatagtcgtcaagtgaaggacagcatgagattgccatctgagctgcactgtgctaaataataccaagtgggcagtagcaagcagcaacagattaattactttatcgacctgtcaagaacatatgcatctgacgatctcagaatgatcacaacaataaattagccactttagtggtactgccatctgcctgcagttccatagtcaagaggaaaaaacagagtccgtgagcatcacatttttttattgggagatttcatatttgacaattaatcaatagttcacggtatatattttttacatcccaaatagggtcattacactatcggcatctgaggatagagggcaaatccgggttacagttggattggtttgggcctttccgagagctcctgcttctagtacttcttagcagggctctagtactgggccactcccaacttccggcccatttcacgagtccaggaggaaagacttgatgaagcggttcacttggtcggctccctccaactgcaacgcgtgccctgcgtccttgatgatctctagccgtgacacgtctcccagatgcctgcagccacagccatgcgaaggcacagtgatcactgcttttttttgcaatcaagcgtccatcaattctgcattaatgcggtataccgaagtggtgaaattaggtacttgatgtccaattttacctttgcagtctgtggccgagatccaacgggaacacctggtccttgtcaccccacagaatcaacgttttctgtggtgcacaccaaaacttatttaggctgagtttgagtgggaggagattgagaagattgagaagatacgcaaaacgaggtgagctattagagcatgattagttgagtattaattattttaaattttaaaaatggattaatatgattttttaaagcaactttcgtatagaaactttttgcaaaaaacacaccgtttagtagttcgggaaacgtgagcgcgggaaacgagacaaactcactcacaatctcctcctgccgaaagctcccttagttgcttacaaacaataaaattaaataaagggtccaagggaagatatcgatcgggcaacagtacagaagaagagagagaaagtacagtgtagacacgcatatgacagaatgaagtaatgaacagcattacagcaacagtacgggatgatgacgctttctgtgtggactccgtttgagattgatgactagacaaacgatcatgggatatcgatcgatcagatcacctttttttttttggcccggcaatcagatcatttgcattagagtatttattttcttttgttgagtgctgtgaaagcatggcatatgagatgcacttaaagtacagtgataagatgggtgtgattttaaccctaaaatcctgtgttcaattttcaatgtggtgggacgtttctttctctaaatctcgtttttaaaaacatgatatatgtatgctattttttgaaaaaaaaattatccggcctctataaccatattggcgtatgtatgtatacacagcccatacactggaaatgtggatgtggcatacctgagtgagaacggggaggggatcgatgccagctccgttcttgagaagctcgtgtagcagctcggccctctccttcctctgaaccacgcacatcaactgtgcaaaaaaaaaaaaaacagagtcagtacaaaattacattctgacatactgaaatgccatatatctccccgtttagaatcgagtccagttcgaactgcatatgtcctgaactcctgatcaaatgctcatcgttaagggagggaagcacacgtgagtcccctatactttttttaatgcaatcagtacgagattgtactattttattaaatatagcggtagaaaaatacaacctctaaagaaagaaagaaaaaaaaaactatacagactatacgtgtggagaaagaaactcgctatttttttttgcttcagcgagaacccaagttcgtgcttcttccttcattttagccaacagcctaggaaccactctttatatttgaagatacgctgatttctctccttccaaatctcccaaacaacaaaaaggagtagagtacgcattgatctgctgattggcgaccaactcggaaaggggcacacggctgatagaggtgggtgcacatgcaattcattgctcgatccaagcggcgtatcccatgtaggatcgagttcatcgcgaagatcgtatccctccataccgagggacattctatcgtccgtgctagttgctgatatgtcccctgcatatgctctgctcttggagttactatgtgctactgtactttgccgttgtatacattcagtgcgtgcaccagctggcgtacgcgcgcggtcgagagctggtcgttcttcgcttcccccacccccgacgttattacgcacggcggcgcacggcatggcgtcttcatcttataccctttgacttggtcggatccacgtcaatggtgtccatacatggggttttgtttgttctgttttgcaaagttaaaatgaggcaaagctttttccctccattgaaaaatcaaagaaagttacgagaaatgtgagatcttgtgctacaagttcgtgtagtgcagattggtgctgtcgtgttgcaagcttgcaataagaaaaggttacgctttcaccgtcctagaccagctcgaatcacacgccaaagttcgaggccatactttaattggagtgcttgatcggtgttacatccaccaaaaaaaaaacaaaaaaaaacaaaatacgagtaagtggcagctagtggagcagcaacattattttggggctggccctcgcctaattttcgagtcgattttgctagatatttgtcatcaaatttctccccctaatatttgtcagatgtaattacagtacaatcgtagtgtaattacactgtaacttgcatgtaattacactgtaactataatgtaacttgtatgtaactttcaagaatctctcggtaacatgttatttcagtaaaatagaggtcgtgggaacaaattctttcatatatgtgtgtgatgtgatttttttcttcctccatagaacaaatcttgtaatagatctaacgattcaaaattacgtgaaacttacatacaagttacactgtagttacatgcaagttacagtgtaattacatacaagttatattgtaattacactacgattatactataattacatctgtcaaatttttagtagaaaatttgtcgacaaatgtataggtggtcccttttcgagtagtattcctgaagacgacacgtgggccacgtaagggcccagcgcccatgacagaatccacgagatttgacgtaacgtacggcatcaccgccacgtcagtccagatctaccggagcactttacctttacgtgcccgtgccactctcctccagcactacacgtgtaggagtactgaattgccgatctatattttactctagtatttttcaaatttgctactaaatgcaaatccaaattaatctctggtggtgccgtatggtgctgtacgatctgattctggaattgctcacatgcaaaggatagcgtgttctactctggcttaatttggatgtgtccacctgaccatgcaatttatatggcactgttatcaattgttctcgcttaattcctgctaccatgtttggcctaactttatattcaaactcgtggagatctcaattaggcttatacttaaaagtcaaacgcatatgtatatacagtacgatctaaacgaacactccagtctaagctggagtttcgtatataaactctactaacctcgctcgaccggcaagattgctcaaaaaccgatcaatgtacatgtttttcgtgagaaagaaacttagggggttctgcatcacaatccggcacgtgcacaacacatgcatatacgccaccgtacaaagagtgcaagttccccgtactgtttttgtaccaattaacgaggttttccttaagaggcttgttccattctatcagtaagtggaaatgttgcatgtgaatcttgcaggaacaattaaattgctccccaattttaaatatacgtcactggtgatttttaaaaacaagatgtttgcctgtttcggattattaaaatggatttagtacaaatataaaaatacaagtcagattttaagtatcttcatatcaatgcaacatactccctctgtcccataaaaacgaatctagaatcggatgtgacatattctagtactacgaatctaaacaaatgtatgtcccattcatagtaggggcatctgcaaatttgccaccggttttttcaattttgcaagaataccacccgaatgatagttttagtgatatttttgtaattttctagtgacagtcttacaataacaattatgttatatatggtactagattagttttttatgagacggagggagtaaataatacttgtataattttattaaataagataaatgatcggacaccatttctaaaagttaacttatatatttaaaacccgatgacgatactatatacaacatcacgaagttaaatttgtcccacatgatttttattcattttcttatcttgatgtttgagatagactaaaatataagataaaattagtgcatgcaaaatgaagcacatgtaagttttaattattacaaacataaaaataacttctatttgctaatatttaaaggcagcttctatatgaaaagttattttaagaaaatagcgtttgctagtttaaaaaaacgtgctaattatctgacgctaatttctagctaaaaaacgtgctaatgaaaaccttggtaaatacacatattaataaaaagaaaagaacggggcctgtaattaagacaaggctttagtagtgaaagttaatcgtgccagttaattatttgaaaacggcaagatgtactcttgccttgcacaggctagtcattattggatggattagcgagtgtggtagtaggtgctggaatgtgctgagctgaagcaaagcacgtgcatgctgagctagcgcgcatagcacagcatctgctcgatccatgggagtagcaaacaaaactgcgcctaaaaaaccaagcaaacacacaagacgacacgggccatcgatcggacagaggcaaggcactgaccttgatgaaatcgtcgagcacgaagtcgggcatccatggcggcgggcggtgcatggaccggcggacgaggcggcgcagcccgtcggcggtctccgggagcagcgactcctcgacggccctctcctcccgcgccgccatctccctcatctcccccggcgtcgccgccacgccgctggtcatcaccaccaccctcggcacccggtccctgccctccacggcggccagccggtacgccacgaacccgccgtagctgatcccgaccacgtcgtagcggtcgacgccgaggagccgcatggcctcggcggcgcaccgggcctggaacgcgacggtgcggagcggcgaggcggatcgggagtgcgcgccgaagaagaggaggtcgggcgcgtagacgtggaagtggcgcgacagcgccgggaggttgcgcgcccacgtccacttggagtcaccgccgaagccgtggaggaggagcagcggcggcttggcggacggcgccgcggggcaccagacgcggaccgtggtggcgtcggtgcccgggaggcggaggtggacggggcggatgcggaggcgggcgaggaagtggagggacagcgcggcgtcgcggaaggcggcgaggcggagccgcacgaggaggacgagcagccggaagagcagcagcgacagcgggagcagcgcgaagagcgccgaggcggtggcggtggcatgccgctgcttcatggcgcggacacgcggtgcactgtgcgtgcacacgacgagcagaggccgagaggggtgtgggtgtcgaggggcagagaggatgatggcctgccgttgctattaatagcgggctccttggcttcacagaaaaatggctatggatcgatggatcaattagctcgaccgcggagtatatacaattaaagaattggctttgattctgttggaacttggacagttggagtgttgggataattcaaaactcccttttgcagtagtttccagaaaataaaactctctgttgcagtagttccattaatcatgtactctcttgctccaaatgatctatgtggtgccttctctgtctcagctaactacatctggagggcgataacatattagcatacatggttaatttcatcgtgcgacatgcttcgtgcatgccttgagctgctatgtcaattacctcttcaaatctgtgtgtactctgcactggcatcagagccatcaagtgcaagggaccatgcaggtacagcggcgacacccagacagggactcaacgaacggtgaggagcactagatcattcgtttttgatccgataattggcaggaaactggtgacaggctgacagcgctctgcattctcaaaataatgatgtcaaattggtctcgatcgttttgatttgtttaccctgcttgttttgttagcgcttcatggcctgctttttctctaatatgtcaaaacgatttattagaaaataaaaatatatttataggtaaaacttttatatatgtattcttactgacttaaaaactaatgtaaaaaaactatgctgaaaaaaaaatctcaaaattaagtttaaaaattttaaatataactttttctttgggttaggccatcggatgggagcatccaatgctcttgcctccgtcagacaaagaccacggaatggtatggtcgtctgtgcgtacgccaaacagagtcactgtctattattcacgtttttttttaaatattgtctagtgtttggttctgacttctgagaggtgctcatgaaaagaatcaaggctgtaaacgattctagacttgaggtgtttataacaaaaaaaaaaaggcaatattatactccctctgtttcacaataaaagtcattctagcatttttcacatttatattgatgttaatgaatatatatatatatatatatatatatatatatatatgaatgtattcattagcatcaatataaatgtgagaaatgttagaatgatttacattgtgaaacggaggaagtagtaccgaagaaaatcaaggcactcgttcaacagaaaaaaaaacatcaaacgttggagggaagaagacattgagatataaaaaggttcagattagagctatggcatatgctgtccttgctggtggaaattcggctgagagccgcgcagccaaggcccatgggccatggacaacaggccacgatattggcccatctgtcacgcgcgaatcataatgggctttatccgcacgaatcctagagccttgtcgttggcagaacagcgcacattattcggcgggcatcgccatacaagtcttatactccatgtaaatttgatcctaaataaaccattctaatccatgaaattgatcgtatggagatttagaattcaagtttcctgtttcaatgaaccataaaaggttccattaacgatgaaatcactccacaatccaatacaatgcaactgtgcaagtgcttctaatgtcttcttttgaaggttaagagtcatcatccctgatctttcatggtccaaatctaacagtggacttcctgtgaagttgtgaaccacattgtcaccagcaatacttagtgtggggcaagcaatacttaaattcatcaacaccaagtttccagcactgccatttttttcgtggacgcgcaaaagtttccagcaccgccatcacccagtttactcaacaaatcataatgacttggatcatgaaccatgatttcgtcaaaactagccacgctgttagagtttgtgtcgaatgtgtacgtagttggttacagtttaggacttggagttgtaataggtatgagtcggactctatcctaggttcactcataaatagaggggcatgcctgttgcaaccgcatggcgacttagcatagcgagagggagcggctgccggcatcgaccggccgtgagtcgttgtaactctgatacgctgtatatgctggatcggggaggagcgcccgtaatcagtgccccggagatgtaggctacggctgaactccgttaccaaatatcgtgtctcggtgtcgtcattgttttggatctcctatggcgttttcttccgcgtttagctaccgatgtcgatttcggggttggtttttataacaagtggtatcagagcctgcgggaggtccatggtagaggcgcgatggaggtgctccacactgcgtagcctgctgtaatgcccagggaggggcattggcgcaaggtggagcacggcggcgatcaacggagtcttgatcggtggatcgaacacttctggcggtggccggaaccgtcgatggctgctttcaacagggagatgactagacgtggtgctcaggttgatggcggtggaagcgattggcgatccaatcgatgggtcggacacttcgggcgggtggctcggactttccggtgagctactctcgacagggaggcgtgcggccacacgctcgggttgattgaagctggaggcgatcggcgttctcgatcggtggatttgaacactctgggcagggtggcccgggcctttcgatgagttgcgttcgacggggagatggctagacgtaacgctcgggtcgttcggcggctgggaagacggcatgtgacttgtcggcttcggctcgcgactagattgatggcgtttcaatcggaagtcggagcgggtggatcctataggctgttttggaggtgttgacgaggtatttgcacgatggaattgcttcaaaggcggcgtattttgtggcatatggctgaacaaagcctagggcgaatagagcagcatctagtagcggttcaatcctggagaggttttggttcaacctgtttttccctctagcagacaagaagtaaaccacatgggctgtagatcaatgacaacagttgttggtggagtcgtcggtggtgcttggcattggtgctagatgttgtcagagatacgaagaagcccaggaggtcagggtcgcggcggtgtgcgcgtcttgcgtcgaagccgagcaggtgacggagatcagggcgatgccgagaaggagctggctagggttttagctaggtcgtgcagggttcggtcttgagggtttgtggtgtggaagacacggacatggagtcgtctccggttcagtcatggcacggacacaatcgaagacaagcagtggataccaagtttcaacatgaaggggaatcggatgaggactacgattcgttcatgaatcggactcgatttttcccaaataaaagcagcagaggaccacgggattgcaacaacgcaatcgaaacaaatcacctagcagagggcgagattcgtacccgattttcacagaggcggaggtggtttgggcggtgaggtcacgggcggctggaggcgcatccttgcaggcggtgcgtggcggcgtggtactcggcggcgtccgtcggagctcgagcaggagcttgcggcggcggctgcagcggttctcggcgaggaaccggtgcaggtcttcagcggcggcgctccaaggcggtgcggcagcctcttgcggggccagcggctccccaaggtccggcggcgcgacggctcctcgcaggtcggcgcaggcactggacggcggcgggaggcggtggtggtgtgcggcggcgcaaggcagcggtgtgcggcggctttggcaacgaggcggcggcgcatcggatagggcggcagcacgtgcggtttctgggaggagcgagaaaggccgaaggaggaaaggggatcggctcgatctgtttccctttaaccgcacgtttgactggtttttttactagaaaagaaaaccgaccggtttttttctggagaaaaaagaaaaaggggttggttttgtccggctggtgactgtgcaagtttagtcggtgggtcaattaatcagggcagatcaatttaatagggcaacagctgttgagttgattatcgtcgatggcggtgacagttgtttccaaatttgaggtggtgaagttcgatggcatcgggaattttgttctttggcagatgaggctgaaggatctgttggctcaacaggggatatccaaggctcttgaggagacgatgccggaaaagatggatgttggcaagtgggtggaaatgaaggcacaggcaactgcaataatacgcttgagtctctcggattttgtcatgtaccaggtcatggatgaaaaaacgccgaaggaaatttgggacaagttggcaagcctgtatatgtccaagtcgctgacgagtaagttgtatctcaaacaacagctgtatggtttgcagatgcaagaggagtcagatcttaggaagcacgtggacgtcttcaatcagttggttgtggatctaagtaagttagatgtgaaacttgatgatgaagacaaggccataattcttctgtgctcgcttccaccatcgtttgaacatgtggtgactaccttgacgcacggcaaggatactgtcaaaactgaggagataatttcgtcgttgcttgcacgagacttgagaagatcaaagaaaaacgaggcaatggaggcttctcaagctgagagtttgctggtcaaggcaaagcatgatcatgaagcaggggtgtcgaagagcaaggagaagggggcacgatgctataagtgtcatgagtttggacatataaggaggaattgcccgttactgaagaagaggaaaggtggcattgcaagtttagcagctcgtggtgataattcagatagcagcagtcatgagattctcacagtgtctaatgagaagtctggagaagcgtggatgttggactcagctagttcctatcacgtgacatcgaagtgggagtggttctcttcatacaaatctggtgattttggtgttgtttacttgggcaatgacacgagttatcgtgttattggagtgggcgatatcaagttcaagatgtatgatggaaacgaggtgctactttcagatgtgagacacgtgccaggactaaggaagagtttgatttctcttgggagcctacatgagacaggttggttgtatcaggtggattctgataggaagaccatgaatatcatgaaggacggcaagactgttatgactggtgagaggacaagctcatgtttgtacaagttacaaggaagtgctgttgcaggtggagtcatggaagatgggcatgctggtgttgctgtgcacgatcctgaaggcggcaagcctggcgtaggctcgtcgggcggctcggcatgagctgtggcagaaccaactcaagtcctggtacacggaggttcgagcaagtaacaaattcaggttggagtggcatattcgccaaggtagagtttgttagagtttgtgtcgaatatgtgtacgtagtcggttacagtttaggacttggagttgtaataggtattaaaactagagtatgagtcggactctatcctagattctctcataaatagaggggcgtgcctgttgtaaccgcatggcgacttagcatagcgagagggagcggctgccggcatcgaccggccgtgagtcgttgtaactctgatacgctgtatatgctggatcggggaggagcgcccgtaatcaatgccccggagatgtaggctacggctgaactacgttacaaaatatcgtgtctcgatgtcgtcatcgttttggatctcctatggcattttcttccgcgtttagctaccgatgtcgatttcggggctggttttataacacacgccttgttccaaaagtatccgtaaaccatcctatcctatatcacggcccggattaggagcagctagcgtctttgcagggtggttctaagtccgagtcatagagtatgtttgcttcttccccatggcgtcttctaccttgagtaagagatgacaaccgtaattagcacatgacaagcaagtctaagctctacacaacactactagttgctcggctagtaaggtgcagcccgtcgttgatgccggctgccaccaagatcagtgcgccagggccgcatgctaataggttgcggaacaggtttagaaatggcccgtggaagatcattcactttccaatcacgaaaagaacctgcaattacagtagtacaattagtaggaaacaagagcgatttgataatttaacacttctcaaaataggattcgattatttgatatactagtccactttcattcactcagatggaccaagcagtactccttcctttaaaagcttaatgattaattacctggacttatcttcaaatactttgacagcgtacaaggtctgtatgggtggcaggtctttctttcaggaccatatagtgcaagcgcttccactgtcttcctttgaaggttaagagccatcatcactgatcttccacggtccaatttgacaatggaactcatatgaaccacattatcaccaccaatacttaatgtgggggaatcagtactcaaattcatcaataccaggtttccagcactgccatctcctaattcacttaacatctcatagtgacttggatcaggaaccatgatctcatcataactagccttgcaaaccttattccaacaattcccataaaccatcctatcccatatcactgtcctccaaccaacaaagcttttaagccagatatcaggatcaggagcatcttctttgcagggtggttctaagtcccagtcatagagtatgtttgcttcttccccagggcgtcttctaccttgagtaggttcttgagtgggttcaacagtaggtatcaaaaagtgctccatctcaataaacttgatcactccacccatacaatgaacatctcgaatcatatgcggagaatcatggcaataattacccggcatgagctctggcagacggatgaaacgtaccacagggtgatcagcaagcacgtcgcagatcaaaatgcccttccaaagatctacccatcctagcaggcttcctccaagctggatcgtcttgtgtggtaaggctgggtaatacttactatcaaccctttcaagattgcaagaagggtccaatggcactgatttcatagtccactgatccgatgccgaggaataaaggtggagagtaaactcacgaatattgcaagaggtgaacaggagagcagccaggaagaattgtccatggtcaccacaccggatgataccaatgtcctcgccgcgattgtatcgtggatcgtgggttgggatccggcgaagagacggcgactcggtgccggatccggccttgtacacgaagtactccttgtcaaccctcccggagaacatccccgagaaggccatcggcatgagcagcaggagcaggtcctccgactagcaggcgacggagggcgcggcggtgaaatcggccgccgtcagggtggggctgtgcacgcacgagatggccggtgggttgtcgacgcagaaggagacctcgacgacgtcgccgtggctcgtcgtggccgtcgccgtcgtggcatttgtgcactgcgcgtggtgcaccttatcctcgaggagcatccacgcgggaggccggaaggcggtggcgaggcgggtttgaatcatcatcgtgtaatgatctaggaactagggttttggagtacctctctagggaagagatcgaagcagctattcgatttatgtacgggatttttttttttgggatatgtacgggaaaattaattttccgatcttgaattattgattgggatttgctacgggtggcgccacccttttctccctggacctatatctactgtgtgtggattttagtttaaaaaactcggcccattccttgtggataaggcccatccaacagcatgtctactaccacgcggcccaaaaagcgcttggttgctattgggcccatgggtcagggtgtgaggcggtttcaccagtcgctagctcaagcctctaaacccttcttctccccagctcaccccgttcgccgccgccgacgccgctcgccgggggctatcgccatgtcgccggccgccgcctcaccggatgatcgcatccggagctacgaggatttcgcgagggtgcacgcgtacctgctggccgcatccgggatcccgccgtcgctgcaccagcggctttaccgcaagctcgccgacgaggtgttcgacggcggggaggccttctcggtagagccctgcgagggagggaggcagcggaggctcgttctcgccgctgagtggactctagggagggagtccgatgtcttcctcgtcgaccacgcctggtccttccgcctctccgatgcgcttaagcaggtactaatactatccctgggaccgtggtttacttctgtggaatcagttgcgctagtttgttgggaagtgattagtgcgattttggcggcttttgtgctgcctagctgtattatggcccataacgtagtgtattactgatgaatgggagcgcaatgacgacattataacggacttgttgatttaatttgtttactcttgtgacttcaagtagggtttatgctgtactattatgccatttacttttatgttggatacatggaacgattttagcatggtccttgctgattgttaatgtgttattactgtgaattggagtattgactagttaagtgagcgcagctacagttcgaactaacttaagagtgtcatagtttttttttttgggtgctgttaacgtcttgtacttattagctttcttatgctggttaataagtggtcgacactgcaaaatcagggtccgttttattcttttcatgctatcatctgatagctatgtcgactgaccaacaaatacacattttgtgagtgttcatttacagagctttttacttccatgagtgctcttatgctcttattttggtgatatgcagttgagggaagtaccaggactggctgaaagaatggcagcattgatgtgtgtggatctggacgagagaactgaacttgaagaagcagatgaacaggacaatgggaatggagggagtttggagagtgccttggaggtagttgagaaagaaaggactagaatccaggagaagggaagtgactttgcagcatggctggaacttgaggagcttggaattgatgatgacatgctaatagctttggatctatcttcaaaatttccggtccgttccctttatatattatttattcatgtttttactttttagttgccgttgtctgcaacatacaccaaaaagttgtttatctgccttatctgataaaaaaaaaaccctgctgtgcatatctttgtagatgatccaatccaataattatggtttgaattattcttcaggaaaagaaactttccagtgttaaagatcgtttcagtaaaaaaaaaagtactaatgtttagtactggtcttgctccccaaaaacattatgactttgagatgtgtatttttaccataatttcatgtttctttgaattttgtgtatgttctgaagttttccttttattttctttgtatgccattagaatatggtagccctcaacctatggggaaacaagcttcaggatccagagaaaataatgaaaggaataggggaatgtagaaggctaaaggcactttggttgaatgagaaccctgcactgaaggaagggtcagaatcaagccttatttgtttttgttgaagttttaattttgttaattctgttgtgaatatttttcatttcaagtttttcactgttatagcctgataagtccaagtaggaaaataactctgggggtcctgatggaagttgaccagcaactagttattgtggaatcatgtagttatctcaacatgattgataggagaaaattgtaacttctgtgcttgaacagaaagcaagtgaacaacatcttaagataattgagatattattttgcttagttatagtatatgtcctctttaatttgaagaataaaaccatcttaggatgagttggttcatcatgaggtcttcccatggttttagtgggatgacttccttcttcatcatagtaataaacatgtactaacaaacataaacttataaaaaaaatgctgaggtgataaatggatcctcaaaccaaacaagtgaccagttttggttgggccattcgccatctcttcttttgtcatgtggcattctgatgtttttttccttaatgttgatagtgttgacaaagttattcttgacggtctacctgaattggaaatatacaattcacattttacgaggaaagctggagaatgggctttaggtttctgtggggatattattggagcagacaatccctgttcctcagcggaaagcataccattggagaatattgcgtctctcgatctctcagataggtgtatccacaaactaccagtggtaatagctataactggtcttctttattgacattattcactaattcattttcttgatcaaaattattcactaatccatttggcacattttgactttaagatgttattttccaaactgtacaatcttgaaatgtggaactcttttgctgataattcccttctctgcatatacaattcaacaggtgttctctcctagaaaactttcctccctgttgagcttgaacatccgtggtaatcctttggatcaaatgtccagtgacgatctcttgaagttaattagtggatttacccagttacaagagttggaggtattaccagcctaactgcatgtctgtctcataaataagatcaccttctttataaattaataagatgattgcaatcaaggttttcatggcaaatttctttccacaggttgatattcctggctctcttggaaacagtgctatttccattcttgagtgtcttcctaatctatctttgctaaatggtatcaatgtggcaagtataatagagagtggtaagcatataattgattctgcacttaaaccacgtctgcctgaatggtcaccacaagaatcccttcctgaaagagttattggtgcaatgtggttatatcttatgacataccggcttgctgatgaagaaaagatcgatgaaacacctgtttggtatgactacttgcaagttgcaaccttttctcatccctttatggagcattgtgcgtaattttaataacttcgaggtgaagttctgctaaaagtttgaacataaataattatgattgtgtcaactagcccctagccataggtaggtttgcctagtgtagatattcacctttagacgatctagaacattgctttgttttcacttttctgcagtcataaatattgaatcgaatggcatgaaaagaaaattttgtatctgattaacactgtgtctactattctgtgggtttgtgtctggttattcatgtaggtatgtcatggatgagctgggttcagctatgcgccacagtgacgatgcaaacttcagaatagcacctttcctgttcatgcccgatggtaaactagcttctgccataaggtattgtccttcgaacttcagcaacatgttagtaatatgtagcttgctaatacccaacattttcagttacacaattttgtggcctgttcatgatgttcatactggagaagagtgcactcgtgatttcttgtttggtgttggcgaggacaaacaacgctcggctaggcttacagcctggttccacacaccagagaattattttatccaggcaagaaacttagtctgtaaacttgtggtgctgggataaacggtcttatcttttgtccatatgtttatcttcctctcccttttcaaccttttaggaattcagaaagtacaaggaacaacttcaatcaagcagtatctgtccttcaagaaaagtaacaccggtgaccaaaagtatccgtccaagtgatggccatgcacttcgagtatttaccgacataccccaagtagaggagtttctaacacgtccagaatttgttctcagtaaggaaaattccaccctaccttatcgtttatctgtttttttttttggtaagggtcaactgtctttagatagaaataaactcttaacttctgtttatgtaaaacattaactttaagcttgtaatcaacttgtcctcctttcccttggaacttcgtttatgtaggaagcattgatgtagcttgctggtgatgcacattatagaacattcatttatctgggtagtttgaacccaatcgtagatgttcatttgagattaaaagcttttgtgtttgctagcactagtttacctaaggaatcagctaggtattatgttttctctgaccagtcccaaaaaaaatattgatagtgctcttccatcgtatggtttacttatatatggtcaccaaatgttcctcatttgtatctattttgtatgcctgcagcatctgatccaaaggaagctgacatcatttgggtaagcatgcaagtggattcggaattaaagaatgcactaggacttacagaccaacaatatacaaatcaatttcctttcgaagcttgcctggtcatgaaacatcacttggcagagactatccacaaggtgagctactgagctgtttagcttagatctgtttttcagggaaaacattgcgtgtaacttatgtcaaaaaaccatacaataaacaccatattctttcaatggcatctgaaaattagcatcaacttctacaggcatggggttcacctgaatggcttcaacctacgtataacctggagacacatttatctccactcattggagattactgtgtgagaaagagagatggtatggataacttatggattatgaagccttggaatatggcaagaacaattgacactactgttactggtgatttatctgctatcattagactcatggagacaggtcccaaaatatgccaaaaatatatcgaatgccctgcacttttccaaggaaggaagtttgatctgcggtatattgttttcgtccgcagtatatgccctttagagatatttctttctgatgtgttttgggtatgacctttaattcgaatgatacttttgatcgatctcattgttcactgtgatacttactaattattttgtgactctggtgcatataacttattattcgcaggttaggttagcaaacaatcagtacactctggagaaaacaagctttttgaatatgaaacccatttcaccgtgatggtatgttcaaatttgattgtaactatacatattatttgtgggaccatgaatgttagttgctgtcaggagtgtataagtagtgtgtgttcagatgttctttcctgttctttaagtgattttatgttctggctttatgcttatgttatgtttatagtttttttttttctaagaatgaaaatgtgctttagatgcctaactatatttcccttccagaattatattggaagggatgttggcatcaaatatcatgtgaaagtctagattctagaaatatgatatatttttttctcagaattaaaatgtgattaggatgcttaactatatttcccttccagaattatattggaaggatgaaccatatgaacacaccagagtttgtcaaggagtttgagaaggagcaccaaggtcagcttgcatttttctctttatattatgcgtgtctagttactgacttctgactaaaattttagttaaatggctggagatccatggacgcatacgggatatgatacgatgtgtctttgagtcagccacagctgttcatcctgagatgcagaacccgttctctagggctatctatggggttgatgtcatgcttgataataaattcaatccgaagattttggaggtatgccttacctactttcctatcctgcaaccgctgaaatttcgttgcctccccctattgttgacatgacatgctgaaacctgcatatctacacaacaattgtagtgccgcggcacatggttaaagttatatagtactgacgtgtgaaagccattgcccatatgcttcactgaactaatgaaagcccttgcgcattctcattttatgcccagctcagaattaatttcagaagatatgccagtatgttgatttagatattcttgttgtagcctcacatacatagtatgtcaggcaagatgtggtacaaaagtcaggaagtaacactcagttaatctctgtttgccacccaagcataagcttccaattgaaatttgactattacatttggaattttatagatgttcagctattgtattatataagcattaaaaccttcttcctagtaattcctctcactgttccgaaaatttataaaatgaaatgcaggtgacatattgtccggactgcacgagggcatgcaaatatgacactcaagctctcgtgggaagccagggtgtcatcaggggcactgaatttttcaatacagtgtttggctgcctctttctggacgagcttaaagatgtatcgccgctgtaatcaccacaacaaggttgctgtaacaccgaagttcaacacaatacacgcacatgtgagttgtgatcctgtcgttttatatgccatacatatcaaatttgctcagtacaattacaaagggggtgtgatgctgcctcctgcctgtaccatgcttcggatcagattgaaatgagcttgacgaatcctcctcctgctgttcaaggttttggttggtcaaaagccagaaagcacgtacctcatgctccaaggcaagctagcccttacctttccgctactcatacccacagtaacttgaaagcatcatcacatggcaacaacattctagacatatatacacaggtagtagcagctactgatatctcgacctaatcatctagagagtagaggcatatactcctttcccgcctaaactggagccaacctgatcgagacgcagccatgcgagcagccgtcgcccatcgaatcctcctctcgctcgccctcttcgccgtcctctgcagatgcgatcccgacctcctcttcgactactgcgtcgccgacacggcggcggcgaccgcggccggggcgttccacctgaacggcctcgcctgcatcgacccggcgctggcacgcgccgaccacttcgccacgtccgcgctctcccgcgccaccaacccggccgccacgctctacggcttcaacgcgacgctgacgagcccggccgcgtcgctgcccggcgccaacgcgcagggcctcgccatggcgcgcatcgacctcgcgccgggcggcatggcgccgccgcactcccacccgcgcgcgtcggaggcggcgctcgtcctcagcgggagcgtcctggtcgggttcgccgacacgtcgtaccggctgtacacccagctgctgcgcgccggcgaggcgttcgtgttcccgagggccatggtgcacttcctgtacaacatggacacggcagcgccggccgtcgtgctgtccgggctcaacagccagagccccggcgcgcagctcgtgcccttctcggcgttccggacggagccgcggctgccggacgaggtcctcaagaaggcgttcaagatcaccggccaggacgtgcagaggatccaaaaacacctcggtggactatgatcgattcgagattctacccatcagattttaggcacaaacatatgatatgagttggatccaatattgaaaccactggaggatattctttgatgctgaatttgttaacacatgctgaaagttttgtcaacgtgattcatgattgtataatatgtgaagtgcaatatcaaaatttgtactctgcgttcgtttatgctggttgggaccctatcccttcagcacggaaaacagaacaacttattatcgcataattaattaagtattagggatttaaaaactttcaactaaagattcgaagctttcaactcaaatttaaaaatttcatttaaaaatttcatttaaaaattaaaatcattcaacttgaattacaaaaccttcaaacttagagtttaaaacttttaattaaaattttaaaaacttttgactcaaaatataggaatcctctctagtctgaacctaccatttgttgtccttggttgaattatattcttaaattatacacacatgttctttgtgattcgatatctttgaaatactgctaccattagttgtcattggttgaattatgttcttaaattatacacacatgttctttatgattcgatacctttggaatactgtgattggataaggataaagatgaatggcgagccgaccacgtcagcttgttagaagagcactgggaacctgggaacgagttgttgtgcgagcagccagataccaacaggccctacgtcgatatcatgagaagcgcattcgggcccatacacttcatcaacgattatatcgtccaacaggtccagaatcaggcaagacgcaataagcttttagaattgttgagataattttatgtataagattgatatactatttgtaagttttgctcgtatatatcaatacaaatgagttcgtacaactattatgttatctcagtgcacaatgtttatccgtcgatcccctgtttccatatcgctattgtatgaagtcatttcctatcatcttattacgttagcatgactaatcaccaggtctcagaacctcaatcagggacgcccgatcaatgctaacaagttcccataaggtctcgtttttttttccaataagagttggatgaagattaagattttcgtagcatgtttttcaaactgctaaacgatgcgtttcgtacgaaaactttctatatgaaagttgctttaaaatatcatattaatatattttttaagtttgtaataattaaaacacaatcaatcatacgttaatactatctcgttttacgtaaaaaacttaatcttcatctttatctttaggagaaaagaataccacctactccatccgtcccataaaaaaccaacctagtactgaatgtgacacatcctagtattttattgtactagaatatatcagatttagttctatagttctagatttgtttttttagacggatggaataagtatcgataattttgaagattttcaaataaacaaaacaagtccgtatatacttcctgatacaccaactcgccaagcaggggcggagctaggtaggatagggggggtgcccagaaacccggttaagaaattgttttagctatagttcatctattttcaccatatatgcaccccctcaatctaaaattaagcacttatatcagtctaaagtagagtaaaacaagtgagtggcacctatctccatttcgttgtagctccgcccctgtcgccaagcggacggaacctcggagggttggaggtaggagtacatatagatggccatctaggccgcccggcccagcatggcccaagcctagtcgtgcctgggccaaggcttgtcaggccggcacggcccgaccgatgcaccgggccgtgccgtgccgtgccagcccacgggcggcatacacggcccaatactactcgggccgtgccgggccggcccgaaggcacgatgggctattgtgctgcctcacagaaaaagtctatatttggtccctcaactatgtgggctgtgttaaaatggctggaaataagtctatttttggtccctcaactctgtgggctgtgtttaaatggctggaaaataagtctattttgtatacatattgtcttgggccatgccttatacgattatataagtctatttttcgtccctacatttttttatttgatcgggccgtgccgggccggcccaccgtgccaagggtgcagcccaggcacggcccggctgtcgggccgggccgtgcttgggtcgggccaaaattgcgggcttcgtgccgggccgtgggccgccatctataggagtacatggatttctaggaattttttttatttatacttttttttattaaaatatttacaaaaataatttgttgtttcgaaaatttacaaatctaatcgcctgccgccctttgggagggcgatttttaaaaatcgcccttccacagggcggcaagggacctaaatgtaaattttccagcataacttgttagctctataattttacaatttaaaattatattatataaagtcagatgaaataaaactttatatcaaaattgtagagctcaaggagatctacaactttgtagttaataactttttcatttaagatgttttagatatccaaatattcgttacaaaatataaaacacattttaaaaaatctcagatctacatttcaaacgacattggatggagataaactttatataaagttgtagatcttgatgagatctataactttgtagtttatcacttttccatttaaaatcatttggagtatcgaataagcattattagtttttaagcaattaaaaccggtgggaagggtttgaacacaaataaaaattttgtatttaggtcccttgccgccctttgagagggcgatttttaaatatcgcccttcttaagggcggcaggcaattagatttgtaaattttcgaaacaaaaaattatttttgtaaatattttaataaaaaatgtataaataaaaaaaattcgatttctagcgtgtcgcagctaaccccaagcctccctggcgtctcgcaccccctccttcctgttgcagccgccccgattcgacgccaagcgccgcctccgcctcgatcagcgcctcgtctgcccagatctgccgcatactcctcgtccatcgccatccgtcgccgccaccagcctcccccgaaccctaattgccaaatcctgtgaccttaccgatccatggggatttcctccgcttcctatcatcccccaaccttgcagcttccgtcctccgccgtcggcgcctcccgacgctgcggctctcccgactgggtcatgctggatgaaacagcgtacatctccgaccgccggaacaaatccaccgctgagtcccagacgagcgagggccagatcatccaggtgtccttctggctcgtcgatccgccgggtctttcctacttcactgtccattgcccgggactggaggaggacggcctcgactgtgagccctccgttctcgccgcggaaggatccctcgttctcttccgcgtcaaattgtccccccgtcccatgagtgagcccatgcgattacttcgtctacagggctgccccctggagtccatggctcgacctgcttcctgaccccaatgtcatgtccttcaactccaagaaatttggcctcttcccttgtcgcagcggtgtcagtgagcactataatgtggccttcctcaatattgaatgggtgccctctgatgtagcttgccagtttgagctatacatcttctcatccaagaacagaaagtgggacgttaaaccagtcttgcaggacttgtcccgttctgagaatcacaaggtagccctcgagcatgagatcgacaagctgatcaatataggacacgattcgttgtgcttggttgatctctggcatggtattattctgctcgaaaagatgttcgacgactacccagttgtgagatatatgacattccctaagccagtggtgtacaccacggatgcctatggtgaaactgtatgcggcgaaacagccccagagtgtgtacgggatgttgcctgctgcaatggtttgatcaagtttgtggacgtagaatactgctacactgacgagaccaatggtaatggttggaaagccacaacatggaataggttgccttcttggaaagattggcgcaagcgtttcacagttgacaaaactgacatcttggttgatcccagttatgccgctgttttgcctgagctgtgggacaataataccaaaaacatggaactgaagagactgatttgttctatccccactctgagtatgcttgatgatgactttctttacatgataaccaagatgaacgaagaagacaaaaatgcctggatcatctctgttgacatgaaacataacacactgcaagatgtggccccaatttctgctgcaaggttctccattctcagttcaatttgccatccctgtgcaatctctaagtacctcaagattagctggataagtgctattgctgttggtgatgcaaatgggtatatctatgaagggcagtatgtgagtattagggcctgtttgggaaacagggacttattttaagtccctgtcacatcggatgtttatacactaatttagagtattaaacatacactaattataaaacctattctataaccttggactaattcgcgagacgaatcttttgagtctaattacaccatgatttgacaatgtgatgctacagtaaacttttcataattatggattaattaggcttaaaaaattcgtctcgcagattagctttcatttatgaaattagtttttttattagtctatgtttaatactccaaattagcgtcaaacattcgatgtgatacggactaaaaagttttagccccatctaaacacccccttactttatttgcttagctgataatcaagtgatgtctaactgtttactgttgccgaaaccattattatgcactctttagtaacttctgcctttaaatgcacaagattcattaatcaagtctttcttgccctgaactcaatacatttatcatctgtatgtgtattgctgtggcattccaacctgatcttggttgttactgcataaacattattaagtgaaaataacagataattaataagatccagttaaaaatgggcgtagatgtatgtactagtactatataaaggagaactaagggcaagtactatgagcatccaagcataagccccaagataccacatagggctaaatagtgaagtggatgagagaagaaggatgagagagaaatagtcacctctcatgcaagaggcagcccctacataaatttcaataaacatgtgagagtgttagagatattggggattgtgtagtagaggtaacctattatgcatatcacctcttaatttaattatatatgtcatacataaaattggatgtgttagtcatctctactataaaacttgccttaaggttcagcctctatgagtttcaccacctgcctaaataactatgtcattaattgtggcattagttaggattgcatggaatgatctttgaggtgataacatttgtcaaaacttatttgctggagcatcaggggtaaatatctgtcaattggaaactgggcaagacaaagttgtcttgcttttgtaaactgaaaagaaaggagttgcaaatatgatactcaagcgctcgtgggaagccaggtgtcatcaagggcagtgaatttttcaactttgtgttcggctgcctctttctggacgagcttaaagatgtatcgcagctgtaatcacatcagtgacacacatcaaatttgctcagtacaaagggggcgtgatgctgcctcctacctgtaccattgctttggatcaaattgaaatgagcttgacgaatcctcctcctgctgatcaagccacgcagggcttgggttttggtttggtcaaaagccagaaagcacgtacctcatgctccaattatgatgtgaacttaataggcctatcaattgaacaaaccggggctcgcgtcgatcacgttgcggcccattaaattttcggcctttcttcatttcttgcacgttcagggcccagtaagtccgttgaacagaatacataacatttttttttagcaaaatttgttacaggacaccaaaagattgcagtctttactgtgaaacacccgaagatcgtgtatttactcgtggacactgtaaaaaagtggtaattagctgctggacactcctcccattattttattatttccggtcaaaatgaagagagaaatagttgtgtaagtaccaaaatgcccttgtacagtgttcttcctctcacttcttttcttttccccttcttgttctttgcagtggagcagagggcgacggcggccggctcgagccgggacggctgggccatggcggggtggcggcggcggcggcgcatcgccgggacggcttggccacagctgggcggcggcggcggcgcatcgccgggacggcttggccacagcggggcggggacggctcggccacggcggggcggcggcggcgctcgacgaccacagtcggaaggctctccacgacggccttccccgccacgcgcacgccggctcgtgctccgcggcgagctgcccgaacagcacgtcgtcggcgtcatcgaggaagaacgtgtcgattccaccgtcgtagtcggcgtcgcaccgccgcacgctgctccacctcgagcagcaggtcgtcacccacggcgatgccctccgcgtcggcgcggtgcgcggcggcggcggcgggctcgacttcttcgcgtcgtgctcccacgccgcccgcctcgtcgacctcgtcacctcgccgtggcccgcccgcgtcgtcgcgtccaagcacgccgccgcctcgtcgtcctcgctagcacaccttcgccgtggagctctgcccggtgtgccgcgacagagaaagagaggaagagatgaacagagagaaagaaagcaagaagaacaagagagagagagattgacgagtggacccatgggcaaatttgtctttaaccaaagttttcctctccattttgatcagaaataataaaataatgggagaaatgtccaggagctaattaccacttttttacagtgtccacgagcaaatatacaatcttcagatgtctcgtagcaaagaccgcaatctttcggtgtcctgtaacaaattttgcctttttttcagttatatacgttgcaaatacgtcatacaaacacaacagctaagccatgtcacgctggtgtacgcagtaagcgaagttgattcttccatcatcatcttcttcttcttgatcagtttctctggaaacgtcggcacacaggcgcaatcttccgcccccttttcgtacgcacggcggtgttggaaaaaccgggggtagtacgtattttgaaactggaaagtgggaaaaaacaagtactccctactaggcatttgttcaagcaagagtgatttcttgtttcaaaaaggaagggagtgatttttcctgcctcctttgctactcttcttttaggagacttcacctctagtctctagaaagtaaaaaaaaaaaagggtgaataatccatggtaaaccgacgcgagtacacgaccgagcacactttctcacctgtgttgttgacacttccattgacaaggccacgcaaatttcttcccttttttcggctgtcatttaaccacgacgacaatttcagatgtacatgtacagtgtacacatcgtataagtctactcgtgacgtgaatcggtggcagttggtactttgatagggtagaattccttcgcccatctcgatcaattacatcagaaaattagcaaagcgtctcttctttttctacacaccggatgctgctaccttttcgatttcgacttttggggagcatcgacgagtctgagtccgtcacctctcttttgatctctgttcacatgcgtatgaattcatatgatcgttccgttcttgaggctaccaatctaccatcagtctgtaattctgtatgaaccgtcaaggaaggcaatcgagactggacatctgctaatccatttgcagccatcaatgaagtctgaagagcgtggttactctaaaatggacgtttctttcagcagctttccaaacatgtgtgagctcaagaaatcgatgttccctaacatgcgtgatattctgttcctcagcccaatccgtgttaaatcagatgacccatcaaagatgatactgaaaccgggcaagatttgggccacatgagagccagttagtagcttaatcagtttggcaggcaaagtcgaagagatatggtgcttaaatgtacaacctgcatgatattttacagcagcaagaaaggtgagaaagttgaaactgttgaatgatctgatttatgaaaacgtactatatatgtcagagatcacctggcacaagttttatacaactggaatcaaaaggagataaggatagaaaccttttattcatcaacaattgcagactcaagttaaataattctgacaagacatatttcaattttccaagtcagatgaagataactagtagataaatactcagctagtagccccttgaggcatataccacacaattcaatctctaatgcaagtcagttcaaggagatgtcgttttctgttgttataggtaaggaccaattcccccaaggcctacctccctgtaactcccaaatctgtcttcatctcaagtcatatagatttgaaatgatttttcgtgggtgatgtccagaaatatgatttctcccagaactattcagtaaacgtaatgtaattggataatatgaaagtgttcaattctgcacctaatccctgaaatggacgttgcttataaactgataggtgttctgatagagatagaaatcagacaaatcagagtgatcgaataagttgctatcactgaagcgaaaattttcccacagaaatttggaaaggtcataggcaatactacaattctacgatcgattctaatcgcagtgtgctttaccctgcttcttccattgatacgcctcgtttcctttagagccgcttcaactaaaatcattatatctgggggcggcttcggaaacatacctatttttcctttatttggttgttgacaaatacacgaaatcgttacgtttctattaggttagactctacaacattcatactggaagaaatttcatcataaaaggcaggaattttaaaaggtgcagacatcattcaatttgaattatgcaatgaaaacagaagtgcgaacttggagaaaataatggatctggagctagtgatattttcctgttatattttaaatgtcgacgcattaattcacaggtcggcatacttgagttgtgctaatcaagttggtcacaattgaagtcatgtctgaagatggagtaaacctgaagcatttgctgccgttgcatcctactttgagttaactggcaaactgctcacagccactctgcatggtggccttgtccatcttgatcaagatgtccttgtctcttctgtgagttttgtaaatttcgtcttgctcgttgacataattaatgcgtgaaaaatgctccgatgcttccaaatgatcggggtatgatccatgttctagaagcctggtgctgatattcttgcgatttctgacaccgttcgttgatcattttgtctgcataatctaagctgaggattgatgacacgttgaagctgaatgcagccgcttgggtgaattaggatagttacctgaatccaacaagttacggtgttgccatcattaaaatgttgaagggtttgatcaggacgtgtccttttgtctcttgcatacatcactgttgaaatgcaatactgatataataggattatctgcctgcacctttgccctaaggtcaaacgctcaaagagacacgaaaagaaaatgtcttgggctattccatgcatggataatatggtagcctcacaaaaatgttgttttgatgcccggacactataggagtttccatgacatgatcatatatggatattaacgtaacttgattattaaaacggctgagatggtagaatataatcccatatgttttttttcgtgaacacgtaaaagaattgcacgtcaatatattagaataatagagtttttgttacacgatgcacttagctagaccggcctatgccaaggaaggaagaaaaacaaagataaaaaaaacaaggaaggaaaggaaaaaacttgatacgacggtaactctactccaaacagcgggcgggggcagagccactctacgctcccaaaaattctccaaagaaagcgacggccgctaacgaccacagccagtcctccgaaagaatggactatagaagggaccacctatatatttgtcgacaaattttctattaaaaatttgacaaatgtaattatagtacaatcgtaatgtaattacactgtaacttatatgtaattacactgtaacttgcatgcaactacagtgtaacttgtatgtaagtttcacgtaattttgaatcgttatacctattacaagatttgttctggtgaggaagaaaaaaaatcacagcacacacatatgtgaaagaatttgttctcattacctctattttactaaaataacatgttaccgagagattcttgaaagttatatacaagttacattatagttacagtgtaattacatgcaagttacagtgtaattacactatgattgtactataattacatctgacaaatttttgaaggaaaatttgtcgacaaatatatagcaaattcgtttacgtaatcccatatgtaactcgtgcagttacatatgtaggcgatgatttatacggtgatcggcggcctctaattttgtgagaaggctgttcaatgcagagtatctagttcaacctttttttttgggaaattacccccaattgattggtagctgttgttaggtgaaacaagagataaaacgatcggggggaaacgacgtgcgccgtccaaatgcatggaattgacgattgggtgagttggcatttggcagcccaaccaacatttttcacatcgcctcctacatcttacccctcccttccaaagtccccgtagcgcaagtgcgcgacggttgctttcacagttcaaaccaatccaacgtactcggcagctccagtactggaagtcaactactcaagtaatcaatggatatatgacatctgctatacatccaatctggaataacacacaccgattgatcgggctgcaaatggtgatgtgtactgtggttagctaggggttagctcgcatcgcagccgtcgtacagtatgtgcctgacctgacctgacccaacgaatattgcggcaacgcacgctgttttcctcgccatctcgccgcaccgcgcccccgcgcgcgcgcgttgcaccgcatgtcacgctggcttccggatcgacccggtcgcgggcgcggacaagtcgagggaaatgccgcgtgggttaattgatccgggcgtgcgtgcgtgcgcgtgcgatcgaagagcccaatctgtggccaccggtccaaccgcgcgcgcggagccggcagatcagatccatccagcagttgacgcgcgcggctagctcgtccggcctcccgttgttctttcgcgttgatcgagccgaccgaccgattcgcctgatccaacagtgcgtgctaggccgcggggggcgcgcgcgattgcacatatgccttggcctacgcacgtactagcaacctcgcgtacgaatcgcgtgatcgaggcgagcccaaatgtaggcacggtttacgttgtacttcaccgcggcagtgaggcaaaggcatgaacctgatgcacctgcacctgcctgcttttacataccaacataaccagtgcacaactatgactgtaaatagtatgcaattaatattggcattcttaacttatataagtcgatcgaatttacgtgtttgtgaaatgatacgttaaatagtattaattattattattttgataactttacaatcaacattagaaacgtagaagttccttgagggtcaatgagactttcccaatgcaaacacttccactaaagaaaacaaagtcacaaagagatcaatgtgctattcgcgtccatgcggcgctcatggtttcgatcgtctctctctcctacctgcaccatattgaccgtacgtcgtacaactacagctgcaggtcagctttggtcaggtatatacgtacgttcctgttaccttctagaagcaagctagccacatccatatcaagttgcacccaacaccataggattaaatccattactactactaatttttttaatttgtttctagtgctcgatcatcattaagtaccatatctcctactcgtttttatttggcggcacctaacacccggcaattaaaattaaactgtagctgtctatctgaagagttcctttccctgctactagcagccaggctcgatcgatcgtctccatcagcttgtgtccagtgacatatatgatacgtggacgcccggcctgaagaaggttctgaaatttggtgctctgtccaatccttgagctcgacaacgatcagttggcaattattctagtacctctagctagatcataaacgtttctaattaacttcttctatagctagataatgccatgttgcggaatagttaaacaagtacgacatgtcacatgtgtgtatatcttgttgaacaagattgaaaaggggcataaagctccaaaccggtggatttaattaggacaagatcattttcagaaactgaagatcatctatgtatgtgtgtgtagagacgctaatgcttccaagtgatagaagaagttgaggtaaaacaaaagggagctagcacctttatgatcttgttgggcctactgctccattttcttaatacaggaggttgcatgggactgttcaatcatgtttaaactacaatttgtagttttgtactctgttaggaaacgatagacgaacaaacgataaaaaacaatagatcaatcacaaaagacacgagatttaacgtggaaaaccctcccaaaataggagagaaaaaaccacgggcgccagccagcaaaatatcttcactatatctgaggtgagattgcatcgccgcacggcggcttacaagaggtatatatatagtggaaccctaaaagggatgatgattcgctccgctacggcagaagctggcctttattaagtgcaaatgaatttggatcacaactcaacaaactccaccttgagacaaattccttcttgtagcatgaatcaatccttcactctgaacacaacaaagacaaaaaaacactttcggcgccaaatagcctctcgggctaaaccactataccaactaagcttgagcaaagctcaaccttagcaacaggaacagactttgtcatcatatcagcaggattatcatgagtacttattaaatggaaataagtttggatcacaactcaacatactctgcacttcgaagcaattgcaaatttgtagtttggacgattcatgtcggcacgaaaacagagttcagagccacggctccggtggcttgcattgcagatggtacggacacaacctttacctgctctcaagactcaaactatatcatctttgttttttttttttttcaaaaaaaaattgcaaggagtatcagcttttccttgcagggagcattgctagcgaaacagaagcaacgttccttgcaagtttgatcaatgcagtacagcttctggaaagggagctttgataatagtacagttgtacattaagtacaaaaggatgcgccaatagtcgactggagaacggagcagaggacacgtcattccagatagagccatctctagctgctcgtgtgtgtttgtcagcacatgatgctaactagtacgatctccgggcaattaacagctttattttttttatacttatacttatcaactaaaatagttctcaaccttaaattttgaagttgattttagagtttttcatcgaaacttatttttcagccttagcttttagatcgttaagaacacgtatataaaaattttattcataaattatttttcatttgcaaatatatttttggcttattccatttgcaaatatactatttagcttattccttaaataagccaaacgatagggcagtaagttatcatatgacattgataagaggttcatcgtttgttattcagtttatccagccaaaatttaaatttaaaactcaattttaaagttaatattaatgtttttgtcttaatttatttttcggtgttggtttttaagtcactactaatacatatataaaaattttaccttttctttttctaataagcgttgcaacctatgatcagcaataggtgaaatgaagggataattaattgagagaaaattaagcaagttaattaattaccttggtaaaaacacattgaggaaaaagttttttttttgcggggaggaaaaagataatttaaccatgtgtgaaaatacacttggagataacgcgatccacttgtgcctcttgtcggtccagtttgaaacggacgcaaactatggagtactaccttttttttttttttgacacgaactatggaggaccaggaggagtactagtactagtaaagggaagctttcagcataccaaagcatttgagccatgcctttgcctgcttttccatctgatccgtccagtcctcatccgacgcacgggaggcaccctcgccgcgtacctcccgttgcaactgacggcgcggatcggagcgtccgtcgaaacccccgtttccgccggcggaatttcacgcatttccccgtgtcaaaatggtccgccaagtcaaaagcccaagctagccccctctccatccacacacccccaaaccaaaattaaccaaacccccgcgccgttaaccctctgagcttgtgatgaattaacgatcgtgaccgatcaagtgagcgattaataataacccagcggcacacaattaagcaatgcaagaagccgtcgtcgttaacaccggcggccggtgggcaccaacccgtatttatatacacttctatccggccaaagcagcgggcgcggccgggtaacccaaccacacacgcacgacacgaagaacgccatggcgaagcaggcgtggagctcgctgttcgggtgcttcacctcgcaccacgacggcggcggcaagaggaagaaaggcggcggcggcgggaagaaggcgaagaagaaggtggcggcggcggcgagccagaagcagcggaagctgcagagccggctgtcgttctccgacctgtcgttcggagggatggtgtcgccggaggacctgtcgctgtcgctggccgggtcgaacctccacgtcttcaccatcgccgagctccgcgccgtcaccagggacttctccatgaccaacttcatcggcgagggcggcttcggccctgtctacaagggctacgtcgacgacaagctcaagcccggcctccgcgcgcagcccgtcgccgtcaagctcctcgacctcgagggcacacagggacacaacgagtggctggtaagtacgacacttaatcactagtagctgcttaattacgcctcgctaaaatttaattataaactactccactgcttgctagctccatcggctcagttcattacttgcacggttgcacctgtacgtgacctcacattattactagctggcatgccttgacactccaattaggcggttattgttggtaactaaattaatacagaacaccactttgcaaaaagtacgaaactgatcataatgatcagtttgatgaatagtgtggttctttacctgctatacgcatgacggcatgagattattgctgctatctagtacctctagttgatgagacttgcttacttgttcaaagttagttgagctgttctagtaataaggtttgagttaattagctgggaatttaaaccatgataggacttcagataaaattaattaattaacctatatgtacatgttacataagttcaggaaagtatatacccagcgtaattagcattattaacttggccttgctacggtgggtacaaattaaagtatatattctgaaatgtcaggggaaagaattcagaaaatgattacatattttctataagaaaagaaaacttggttttctgttgaaatataaaataaattgcttgtatttcctcactagcttaagtttcaacatggaaatagagccaaaggtctcgaattcaaatcttgccagctggtgcgtaattaaattaaaattgcatccacttttattctatcctataggcttgatgaggcccgcatgagaggatattagaatatgtaattacttgtttttctttattagcttaattaaacttttgggttaaattgatcggtgtatgcaaccgagctgaactttattttgcagtatctattgcttttttttgtttaaaatggttaattagtattccttaaaaaaggttaattagtattgtgatactgtatttgtttatgagtacgtacctgctctattctttctactatattttttctcaatattccaaaccactagtcttttcttatattaaaatggttaattggtattgtaatactgtattagtttatgaatacgtacctgctcgattatttttactattctttttctcaatattccaaatcactagtcttttcttagaagtagaagttttcttggttgacgtgttacacatactgaactccattcgagaaagtttcagaagtttgctgctagatagtagataccatggaacaataattcaatagaacagtgctgcttgcttagctgaaatgcttccttattttatttttctcccagttaaaagcaatcaaatgagaaaaaaaaatgtctggacttgactgacaagtctgcaaatgcatacatggcccgatgattatgcagactgaagtcatctttctggggcaactgaggcatcctcacctcgtcaaactgatcggctactgctacgaggatgaacacagacttctcgtttacgagttcatgacgaggggcagcttggagaagcatctcttcaaaagtaagcttgaaaaaaaatactaatattttgttattgtttcctatattatgctagctttctgctactctgaatatacaagaaatttggtgcaagcctcagttgttttctgacaaattagcagaagtaattaagaataaaagcgtaactgagattagagagaattgaaacgatttacatatatatcaacggtataagtatatattatagcagagtgacaatcttgcaggcaacaagaaagagatattcgtaaaacattgctatcactctgctttttcctcgctgcatcattaagctaaaaaggattcgacagaatctctaggctgaacatcggttgaaatggacggcgcgattttaccaactcgctggcataaacttttctgcaaattggtggcgcggctaagctcgattgatcgagtagcttttcttgctctacacccttcaatatgtttctccagtttttcctgatggttcaaactgcctttttagacctttgttgtgacgtccatttttgcgttacatcatatctcactctctgtatggagtcattttctcttaaccactttgatataattcacacctgcaacttgcttttgttctcctctttgtctgtctcttgtacagtcctactgtcatgtcttcattgtcaatttgcctctgcatagtgaagaggaaacagcgcagatttgatgtataatcatgagtatggtaggggtaggacaccttcaccactcgttgtctactatggttttttcacattagtacttgcgtcaaagtagtagacaacccctaatatgtgatttggatcaacctcacaagtcaaaattcgtggcttgtgttatcggtaaccacatgatctagtcacctcgatctatcaattactactggtttaagagacatagtagcacaatatgcttcatgttttattaatgaagcaaggtagccctgaaaactgaaaaatcacgtgtgagggagtacagtgattaaactgttgcaaattaattaagagatagcaacgtttcagcaaagttttttttaagtaaatccgatgtcattagtttcatgtagtcagtctactgtcatggacatgcagatgcatgctgaccaaaatgtacatttctcttcttaattcaagctccatatgtgcatactattattagttcaacttaatcgtcttatctgattacatatcgtacttacacaccaaatgtgcagagtacgcagcgtcgttgccatggtcaacacggttgaagatcgccataggtgccgcgaaagggttggcctttctccatgaagccgagaagccggtcatctaccgagacttcaagacctccaacatcttgctagactcggtacgtccttgaccttaattacgttaccatcgtggcatcgtatatgtgttcttcacctacttccccaaaagattgacctgcttgtcatttgatctctaataaggttattagtagtcagaaaagttatattcttttagataatagtcagaatacatgcatcatgcatgcatggtttggttgcttgtacgttcttaattagtttccagtatgaaactgtcgtgatgccaaatgccaagtactaaacaacaaatcttgactactactcgatcgcctatgtatactgaactaagaattggtcaggtttcagactttcagtttcaactatagcagcgctcccgttttgtcatcaatgcgttaacgtgacaaaggccgcgaatttagttctaaattttttcttcaaacttccaattttttattacatcaaaagttttctacacacacaaacttttaacttttccgtcatatcgttttaatttcaaccaaaggccgtgtttagttcctgaaaaaagttgaaagtttgaggaaagttgggaattaaaaaaaaaagttgaaaatttatgtgtgtaggaaaatttttgatataatgtgatgtgatggaaagttgaaggtttagggtagttgggggtaaactaaacacggtcaaacttctaattttagcgtgaactaaacacacccaaagaaagagcagggtggtatgactatttctccgtggagaaaaaaaactgaaaaaaaaaggtaaaacatggagtgattcatcagtttaaactaaattattacgcgcgtgataaacagagttgttggagttgggtgcatggtgatatttccctctgaacaataatccctagcaggctagcactactgctagtgcatttgctttggttacgctattatttctccatcaactgaatcctgcagttgcagcagaaaggttttcttacacaagtacaattctgtagcaatcttaattttgttttcgttgctgaattgtccgtaggacttcaaagccaagctctcagatttcgggctagcgaaggacgggccagaggatgacgagacgcatgtctcgacacgtgtcatgggcacacagggatacgctgcaccagagtacatcatgacaggtttgacagcagaaaaaactgcaaccttttaccccatcctaaataaacaatataatataaaatgtgatatatcctattcagatttgtaatactaaatctgtcacatttctctttttctaaaaaaaattttgaaatatatggagtaagggtgagtttgaggagagggggatagagaagattgggaagatacgtaaaacgaggtgagctattagcgtatgattaattgattattaattattttaaattttaaaaatggattaatatgattttttaaagcaactttcctataaaaaatttttacaaaaaatacaccgtttagtagtttaggaagcgtgcgcatagaatacgatgtccctttctcacccaatccatcccctagaacgaacgcaccctaagttttactccgacaatctgatcgatggtttgtcagtagattaaaagcaatataattatggtcttgttatcaaattatttttagggcatctgacggcgaagagcgacgtgtacggcttcggcgtggtgctgctggagctgctgtcggggaggaagtcggtggacaagagccggccggcgcgggagcagaacctggtggagtgggcccggccgtacctgaccgacgcgcggcggctgggccgcgtcatggaccgcaacctcgccggccagtacccggccaaggcggcgcagaaggccgccgcgctggcgcaccgctgcgtcagcctcaaccccaagtcccgcccccacatgtccgccgtcgtcgaggcgctcgagccgctcctcgccctcgacgacgactgcctcgtcggcaccttcgtctacgtcgcgccgcccgacgacgtcgccgccaacggcgacggcagcagcaagaggcgagccggccggaggaggtctgacggcgccgcggcggcggcggcggccgatggtgtgcagcgggaatgactcggttttgcttgcgtttgtctgtactcgtcgagctacgtgctgatcaagcgatgccggtaaattaatccggatcagtgagttggctcgtgggtaaaaaatgattgtggatttgaagcatgttattatttgtcttaggcttgaatagcagaataggattagagcgtgtaaatacgagcatgtcagacgtacatgagcaaattgagcatgtaaacagtttgacaaaatatggatggtttatcacttctcatgttgggaggtttctctagtatcttcccagcgccgtgaaatatctctgttgatagacactgtatgctgtacgcgagtatgttattactgtttgctgaaagactgtaggttttctccgtgtgcactgtatttaaattttgagaagctgcaaggatttagtaatggtaatgttggtggtgtacggtgtgggaatgcaatacaactgtaacaattggacagggagaacggaatgattccggattcaggatttctgatgtcaggcagctaccatatgggccaaatatatgttgggccaagagaggagatcacagagataggcccaaaacctctttgtagcccacaaggacacactcctggctagtcgccggcaattggaccaaccgcaccacgttccgatgtgccggtgtaacatgtaccgcgtacgtaataacagatgctaagcagcaaaggcgtaatcgagcccagagatttcccctaatctaccttaggttcatcgcctgtcattccagaagcaccagccgagcgccgccgcggcggccacgtccaccagccatacgcccaacgcggcgaacgccacctggccgcgccccatcagctgtaaatacgccaccgcggcggtgtgcaggagcacgggcgcggccaccaggcaagcgagcgtgcccctgtgcatgtcctcgacgaggcacggccgcagcatcaggcgcatgtacagcgagaacggcgcgaggaagaagagcaccccgacgccggcgctggacagcgccgtcgtcgtcgccgggacgaacatcgcctgcgccgccgccgcgcagagcccaattaccacggagacgcacagcaggacggtcaccgtggtcctcagcttccgtatctgctcgctgctggtgagctcctcccagcggagccagatcgcctcgtcatcccaccatggcgacggctgatccggtgacgaccgtctcgccgccgccgccgccaccgtgaggccagcttcgacgtcgtcgtcgttgtcgtctttattgttgcttaccatcttctcgccgtttttagtttctccctgcagactcccgcgattcgacgcgacgccgtacgtcgccgcgcgcgcgcgtatatatcgcgcatccgactatccgactacggcttgcactccgtaacatatccgactgcggcttgcactccgtaacgtgtcgcaccaggatacggacacactttcaagttgtaggcttgtagttgtagcgcacgtatacatatgtcatagccgaataatcgactgcgaggttgacccaaacaacggaaaaacgatggaacaacgctgggacgagcgcccgcggcggacgttggcggagatcgtccgcggccgcgccgcggggcgcaggtcggcgatccgcttcgccatggcggtctccgcggcgtgcgcggccgtcgccggcgcgacggtggcgtgcctgcccggcgcgcccgcgggcgccgcgttcgggctcggcctcgcggggctcctcttcctgctgccgttctcgtcgctctacgtccccatgctgcggccgccggtggacatgtccaggcccttcctgagcttcacgatcggcaccgcgctcgcgctcgccgcggcctacctcgccctgctgcttctcgccgcgaccgacaagatgctcggcgccgacgccgtcaccggcttcttgtggggggccgacctcaccggcgcggcgagccttggatggtttgtcttgaccacgaaagacactactaggtcttatatcattcgtgaggaaagactggaggtggtcaaaattggctaaccgtgcaactgatctattgcatttttcactccattggacattgttactagttaagcaaaagcaaatttgcctttcatgaagatttgtttgatgaagtatgtgttattactacttctttctgattacatcgaattatcatttttttccaattacattaaaatatacagaaaacctagacaacgatatcccgttggaacgagatacccttctataagacagtacctatacctgtttatagcaccagctgcatggtacccgatacctgtaatacttgttatccggtatctgtgatatctaggacctgatacttgtgtaagagaatagttaatatgcctatcccgttgcaattggatcccgttttgtagcagccctctaaaatataatatacgtgcacacaccattacacgcgtacacatccacgagtgtacacgcagcagcaaaaatatgggccggaatgctgggcctgagccttcaaaaactgggccggaccatactgtaaacctgcttggaacacaaatgaattctgcaaactaggaatggtctatttctagcagagtatggaaaactttgtgtttccacatggagaattcatacagatatttgttttacaaatagaagttttcatctatcagtaaggtctgcaaactaagttacatagatgttatttgtatttaattaagtaaacttctcaccaaaccaatttacaatatttacaacatattgtgtgctgctagtgtatcaacaaaaagttaaaataagttatctagcagcatgattaataacgaactaacgcaattgaaacaaatttgctagttaatacattcttatccaatgattgctattaacaccttgtcgattccccatggatgttgtcaagaatggcaattacaccaaccacaaacgcctggtcataacctggctgcaccaccacatggtagaagtccttaccagccagcatccctttcactccaatctagtgaaataaaatacaacaaatgcttgtaaacattttttaccatatgatataattccattcctgatcaagttcatttcaactccattgccatgaccgaagagtttcattacctgtgctacgacatggcctgctcggctcctgacagtgcaagctctctgagaaaatgacccgatcacctcataatcccagtgcctctttcttccctttggctcaacagcgaccctgacatcgccgttcatgcagagcaccggcttaggatcttgaaagctgaaaaccagcttgctgggttcaccatagtccatgagatatcccttccaccaattgttaatgctcaacacttgaacaactcctccctgaaaaatcaaaagttgatcaagcatgcagtgttctgaacatcatggcatctactcagattgaaaacatttcaggtgaagtctaatcttgagttggtttcaccttcttgtggatgaagaggatggcagtgccatcaccgtccctgacgatcagctggccgctagcaccgatgatcccgcagccgtcgacgctgaagacgaccctctgatcacggtcggtgacgacgaacccgccgccgttcaccgtgggagggcggcggcgcaccatcagcacggcttgcgagctgctgcagaagatcttgctaacaaccggcgtcagagctgcgtacgcacccatctgatacggtagctctttcagttcttggagctacgaatactagttgtgatcaacgatgaattgtttttacaatgtagcttctgctaatgcaggaaaggaataaatagggtcatttgagtgtacgtgtgtcgcatgactcatctgtgcacggatgatgcatctgcctaaccatggtctattgtgagtttgtgagccaagcgatttggatgaagttgcagagctgaagcaacgtatggcaaacgacctggtgatttggtcatggaaaagtatggcaagtgtacaggaggagctcataaagaatctttgaattcgattgctttgggccaccgaactgctttatcatcatcggattaagtgtttacattcaattcatgaaggtttatgcctgattaagagcacaattatgctccagtcaggtcgctttaattttgatgaacgacagatggcaacgctaagtaggaaacttggcaggttttggagataatcagataaaccgacctgagcttatccttgtcacaagtggtagctaatcatgtaatcgtgagagtatccagccagcttttaatcctgatttcctttttccggctctaaacatggtcatgaatcttcagcgctaagcaaaaactcacatgtcacagtcacctaagcaaactctcatagtttcattcacatactatgaatttttatttatatatttattttttataaaaatacaaaaaatatatatttgaaatttgtttttaaaaattatataaatacactcctagttctctttgcgagggtgtcttttaaaaatcgttgttctagaggatgagaaggggcctaaatgtatttttttatttgtatagacactttctgctggttttaattactataaaaactagtaacgcttattcgacactttaaataattttaaatgaaaaggtgataaagacatgaagtttatctctattggagatcgtttgaaatgtagatatgggattttatgaaagtagattttagatttttttttaacggatgtttggattcttaaacaatcttaaatgaaaaggttgtgaactacaatcctcgagctctataatttgatttcatccaacttcatatgacatagtaaattccatgtgtaccctttaaaactcactcaagctgtgttcggaatcatatgtacctagcatgcacagcgcgcacggacaacggagcagtccattagcgcgtaattaattaagtattaactatttttttttaaagatggatcaatatgatttttttaagcaactttcgtatagaaactttttacaaaaaatgcaccgtttagcagtttgaaaaacatgcgcgcggaatacgatggagaggggttggaactcatggttccaaacacagcctcaatccctttcatatccctgaaatttactcgatcatttctatacccctgaaatttcaacttgatctcttccatgccattgccgttacattttccttcatttgaattgtttggttgcaaatgttttttatgcccttgatgatttaggtttgaatataagcttaaaaaacgattgaaaattttgtttgagtgcacaatatgtgcattttataaaactaataagactaaataattagtacagaaatatttgacataaaacaaatgtaataatttcaaatctttatttgaatttttaataggacaatgaatttttttctataaagaacattcattaaaaaaaatatcatgagcatattggtaattctatctttttatgaatgctccttattttttttaattttttttaaaataaaataaatacatattttttatttcattatcgaaaagtaaattgtcataaataatgtatcgcacaacaaactcataactataatagtctcatgtagtaaactttttcattttcaataatgtaattcataaatttctatgttcatccaaaggtaaaatggtcatttttatagaaattagacggtcaactaactgtcaattgacaggaggggcatgaaagagatcaaaatcaaattttgggggtaaaaaataggggcatagaagggatcagctaaaatttcaagtgtatacgagggattttctctatgacatatttgtaattaaaaaaatacaaagttgacaagttatacgggaaaatttgcatttaagcctcttctcatcctcctagagagcgatttttttttaaaaaaataaatatcatcttcccggtattttaaaacaaatatatatttctgtaacttatttaattaataaatatataaacaaaaaattccacctactctcatgtcacaagtagtacaaaaagcaatcaaattctcaagcccatgggctatagcttcaactccaaaggcctcaagactgacgagctactgccatatgggctgggcttttcaggtggccggctcgcattcgcggctggagaacagtcaggtcaaacgagcttggtgcaaccgtgcaacacacaacatgtattataccagattttttttatcgtttcaaagttttacaaaaatatactcctcccgtcctataggaggagtatatttctataaaaatttaaaataataatttattaaatcttataaataaataaataaaattctaccacaccacaagtccactacaccagctacaactttctcctattacaagtgctggtggacatggattggattttgatgcctgtccgagatggcaccgacagacacccgctccaatcagtcccccctctgatcactttctccctttttttttcatcaactccatgatcgatccgtccattttgcccacgtcgtgttcgtgcatgcgacggtacgaataatatatcgctctcctcctttgctggctaatgaatgatttgaggtcactgataaatcgcacatcatgtgtacagtggcttagccaaatgatccatcgcgctggctgaactgagccacaaaaattaacggcaggacgagttgagtttggattgtaattgttgttgcaggtgaatggttacagttgaagaagaagccagcgtcatggggctcttgaattgtgataggagtagcttaccaaaacgaagaatcatcgagcccttaaacacccttttttttttcgggaaagagagaaattgaacactttgaaagtctcacctcgtgaacaatatgtaacacgcagcaacgtttcttggaaggtggcaatggtgtatgggtgaatcgcatcgattcttctctcgtcataccacttacatcataaaagaacatttcctttttgacaaaaaaagggtaatctatccatcccaaaataaatttattttcactcatttcacgcatacctatacaggaaaaaaaagaatactctcactttattaaatgttaatgcaattatttctcactttatatacttcgacttaaatgattactaaaaatacgtttaatttaggacaaactgaagaagcaaaaaataaatttattacgggacaaatgaagaaaaaacactaaattagtggagtgattatagtattatgcacagagcagtgacgaacactgcacttctgacaaatataccctttttagagctcaacagcaaacaatgaaaacaaaagggaacttgccggaatataagttcaccaacccttttgctccacgctataagagtacccgcaatggtaaagtaaggtgctatctataaaacatgtacatctcagcaatagactcgattaatagtaaaccaccttaatagtatgtctacattggtatctatagctctctcatgcattgcctcgtttttctctatagactatctctaagttagtagatagttttgctctctctcttcatttaatacattccaagtaggaaaatatgctgacatagatctcttgtagagagcctatagataaccattgtgggtgccctaattcgccctttttttctgacatttaacactaataaatgatataactaccctaagaccagatctaagaaaatacaatatcctaagacttctctgaaacttcggctgaacagaaaccatgggcaggttcaagttcaactatcatggtcagtcacaggcacgtgggttattgtacatttcgccgtacataatgccaactcataaacacttagaaatcgtctctcctaagatctatgtgaagagtttctaagaactgtagtttttcatggagaaaaatccaagggtctttcagccatttgcacaaggtggtgggctagctgatctaggtttaaagtctctcacattctacttatttgatagatcatttcttaatatttacgttattttaactgtagcttctcatataatctctagtttctcaaactgtttagattgttatctaaattctgaaaatttgtagttgtagaatatagaaaataaactagaaattgaaagctgaaattttcagtttttctaaactcttaaaaactaactaccaattagtaaattattgtaatcttctaactcccggacagggtcctagtctcgtgccgccctgcacaaagacaaacaaaaattcttgagaaacccaagtgtttcagtcatccggtcagccagcgaaaccatccaaaacttccttgtaaaaacgcccatgtcgcccatgacttccacccatagcacgagctgactgcaaaatataaaaatccggcaacactgacacagccacaagacgcgacacctcccctgaatgaatgaatgaatcctactaggccagcactgctgctgcctgctgctcccaactcgacgacgccaaccacctcgcctcgcttagctcccacctaaacagtaagagcacacagcccaaaccggcgggagatccgaagcgcagccaagaacgcatcactgtcctcttcgtcttcgtgcatggagttgaccggcctgacgcgggcggcggcggcggccaccgtgacgccgccggcgccgcgccggggatggggcgagctccggttcgcgccgctgctgcccggcgagcggcatgggaggaggaaggtggtggtggcggccatcagcgaggaggtgccgcggctggcggcgtcgccgtcgtcggggatcaagggcggcggggccggggagaggcggccggcgccggagaaggtggcgctgcgggcggcgctgacggtgcggcggaagcagaaggaggacatcaaggaggcggtggccggacacctcgacgcgctctgggacatggtcggccggaatgtcgtgctcgagctcatcagcaccaagatccacccaagtaagaagaatcaagcaaagcactccattttcttgggagtaagcttttaagctagcacctcgccgagttgacttcaaatctcacctttattcgagctgtttattttagttcttctttttttggataaagtttaagcttgttttgatcgtttttctactttactgggagctggaaatgcaaagttgctagtacctttttttggcttcagctccgtttgctcctcatggtcctgggtaggtagcagatggcagtcaggggattctgattagatgcagatgatcaccagatctttataatttataatggagttagtataatgagagcatggagatggagagcatgtgtccgttgcattaggatattcacactgcatttttttccaactaccttttcatgcttacaaaagagtatccaagcaattggagctactctatatactttttaaacactgacatctttcagaaaactagaaaaatcccaagatttgcaagttggagaaaggaaataaatggaatggttattttaacagagctttctttctacctttaaatccaaagcgcccaccggaatcttcagagtacttcaatgcagagcctccccttttcatgatcacatcagaattttttgcccctttagaaaaaaaaaagcatcagaatatttcgtgactaaatggatcataactgtgcacgcaagtaaatatctttcccttgtctccatgatccgcgaaagttcttgtccctttcttgtcaatttttacatgtctccaaatttgacttgccttgccaactttcccagctctgactgagttgttgctgctgctgatgatgatgatgaatctttcacagggaccaagaagccgatgcagagtggccgtgtgtccatcaaggactggtgccagaagaggggagccaagggcgaccacgtcgtgtacacggccgagttcacggtggacgccgacttcggcgagccgggcgccatcgccgtggccaaccggcacaacagggagttcttcctggagagcatcgtcgtcgagggcggcggcctgccgtgcgggcctgtgcacttcgcctgcaactcctgggtgcagtccaccagagagctgccaacaaagagggtgttcttcagcaacaaggtactctgaacattccgttcaattatttttctttggtccaaggaaaaaaaaaaacgtgttttgaggctgtgatattatcatggctaggtgatccttacagtagtcatgttccagttaatagtgatattagtcactaagctggttgtgcatcattgtctgtgatggtgattggggaaagaaggccattaactacaaaacgaggtggcaggccagcctaaaggcatgatttttagagttactgctagtgtgtcattgtcaaaaacccgattatttggcatgatttttattgagttatgtcatgtccaaatgttgtttaatttctcagcttttagatgggtcataggcctgtcagtagaacgtatctatggcctgtccgagaacgatcttttggcactaggttaaatgaactgagtggggcaccaatgccttatgcatcttcatgtgtataatgcggtgtggtttttccagcactttcaaacaggactgtcaattctttacattttgctccaaaggaagtcaagacaactataaaagaatttaggttaggttgtgatcccacttggctgttttttggccttcaaatggtgacttgatttctttgatgagaaagtgataacaattctaaaaaaaatattcacttgaagattacgtaattcagatttctgataatatatgaatggtctcatgcagccatatttaccttctgaaacacctcccgggcttagagaactaagggagaaggaacttaaagacctaagaggagatggcacaggtgttcggaaattatctgacagaatatatgattatgccacatacaatgatttgggaaatccagataaggggaaggaattcatcaggccgatccttggaggagagaagataccttacccacggcgttgccggactggtcgcccgccaacggataccagtaagttctgtttgcacacgatccttagcggattatagagaagggaattgggtaaaaggcagaaaggtgcgtgttattttccaactataactagcacgaagcttgtgcatgtccaattccattttgatcaaagaccaggtcactttcagatgtgatagcttgccccttcaataaacaatccttcaccacgtggtttgattccttgatggtgccaggatttgacaaaagaatatgtaacttttaacttctgaataacgcttgactttatgcaagacctagaagtcatatctatccataagcaggcaaaaatctatggcgtacactccaatggggaaaaaataccgagaattgcctaattgaaacagaaaagagcagctcaagagtatcagattaggatcatggcaatttcttctgggtgaagagtcttgtcaggtactgagtattgccaatagttaggctgaaagtatatgacatatatgcccattaacaaccgggaccaatagaactatagaccttatggatggccttttctatattgtttagtctttggaatggtgttcttggactctagccacagtaccgaatacaaactggccatgcaagtcctagtgaatattaaactaatcaatataatttgacattatccctagcaattattagactctcaggactccctgtaggattgttgctgtaatgtgtttctggattactcggaacaagtttttttttttttacgagggttctaagtggttaattattacttctatttgtgtcatcaaccatgcacttcactataaagtttaaagtggtccaacgaatgcttccagataaattttggaatttcacctaatcaaacagttaaaatgtagaattaactttatgctttacctgtgtagacatgctagcagagagcagagtagagaagccgcatccaatatatgttccccgcgatgaggcatttgaggagctgaagcagggtgccttctcatcagggaggctccgggcagtacttcacacattgatcccatcgctgattgcatccatctcagctgagacccacaatttccaaggcttccaccacatcgacaacctctataaggagggcctcaggctgaagctgggcctgcaagaacacctattccagaagataccacttgttcagaagattcaagagtcgagcgaagggatgcttcgttacgacactcctagcattctttctagtaagcaatgatcattaattcgttttttacctcaagctgatttgccagcagaaaaagtttcttcgaattcaagaacccttaagaatcaccactaacaatgtctccctcattctgcagaggacaagtttgcatggctccgtgacgatgagtttgctaggcaggctgttgcaggaataaacccagttaacattgagcggctgcaggtaataagatgaaatcatgatcctcagctcagtcacagaaatttgtttttaatgttgatcaacatctgtaatccataacctgatttttggtaaaaacttaactgagataattgcctggaaataggttttcccaccagtgagcaagctggatcctgcaatctatggaccaccagaatcatcaattactgaaacacacatagctggacatctcaacggactcacagtacaacaggtaccatcattttgatgaggtcttaaatcatgtccagtagtgtccccatggttattctttctgatcacatgtcacaattgaaggcaatggacgaagcaaagctgttcatagtggactaccatgacgcatacctgccattcttggaccggatcaatgcgatagatggacggaaagcatatgcgacccgaacaatcttcttcctgacagaagctggcacactgaaaccgatcgctatcgagcttagtcttcctccagccaagccaggggagcctcggccaagcaaggtcctgacgcctccctatgatgctacctcgaattggctctggatgcttgccaaggcccatgtcagctccaacgatgctggtgtccatcagctggtcaatcactggtaaaaaaaaaaaagaacaaacatgccataatgttgtcactgctgccttgacaagaacaccaaattgtcaggtaacttctgaacattgtgactaaccgggtcctctctttcaggcttaggacgcatgcaacaatggagccgttcatcctggcggcgcaccggcatatgagcgcaatgcaccccatcttcaagctcctgcacccgcacatgcggtacacgctcgagatcaacgcgcttgcacggcagagcctcatcaacgccgacggagtgatcgagtcctgcttcacccccggccctgtctccggcgagatcagcgctgcttactaccgtaaccactggcggttcgacctggagggcctcccttccgacctcatccgcaggcaatgccctctcctccccatcaccatccatcatctgattctgaacaaacgacgaagcttttgtactttcatggtcactgacattgcctgattcgtctgcaattctcaggggagttgctgtggaggacgcgacgcagccccatggcgtcaggcttctcatcgaggactacccatacgcgaatgatgggctcctgctctggtcggcaattcgaagctgggtggagtcctacgtgcagctctactacccggacgccgggacggtgcagtgcgatcttgagctgcaggggtggtaccacgagtcgatccatgtcgggcacggcgacctccggcacgcgccgtggtggccgccgctctccacgccggtggacctggcgtccatcctgacgacgctggtctggctcgcgtcggcgcagcacgcggcgctcaacttcgggcagtacccgctgggcgggtacgtcccgaaccggccgccgctgatacggcggctgctgccggacctggagcgcgacgcggcggagtacgccgcgttcctcgccgacccgcaccgcttcttcctgaacgcgatgcccggggtgctggaggcgaccaagttcatggcggtggtggacacgctgtcgacgcactcgcccgacgaggagtacctcggcgaggggcgggacgagggcggcgtgccgtggacggcggacgaggcggccgtggcggcgcacggcatgttcgcggccgatgtgcgacgcgccgaggagaccatcgagaggcggaacgccgaccacggccggaagaaccggtgcggcgccggggtgctgccgtacgaactgctggcgcccagctcgccgccgggggtcacctgccgcggcgtgcccaacagcatctccatctgatctggcgacattgccgatccattcattcctctttgtgttctggatcaataattttagtaaaatgaatatgaaataggagtattaatcagtatccgtacccaaacgaaaccaaaccctccgcttctccaccgctccagtgccgcagccctcgccggagttcggtgactgggggcctccgaactccgggacctgcagacgacgacatcctacgcagccttgtccctgcctctgctcaccggcgacgatcacctcgcgcccattcagggaccatgttagaaaacaacagtgttgtggtgacagacttctcagatgatgatagcaattgtgaatgttctgtaaaaaaggaagaagattgtgagagtgtaagaacgagagcaaaatgggcttttcagcatctattcagtttgcaatgttgaggtgaaggcaatgccttactgatcttgcaattatgctctgcgccactgaactttgcttgctcatagtcatacctcgtagttgctgaacatctcaaggcgtcacggcgtcgaaatcgtttgcaacacctgcaggttgtttggagatcttaccgcatttgacggctccattgtttggcttataatggtatatttgtaaacaataagtaatttgtgaataaaattttttatatatgtattcttagcgacctaaaagtaaaggttgaaaaataaacttcgattaaaaaaggtcaaaatcaccttcaaattataggttgaaagtttaaattttgactgataagcataagcgaaaagatgaggcctgaaaatgtgaaacatggcaaagacctgctgataagaatagagtgagcttgcacgggtacaagttcagaaacgacctgaagatcaatatttccttcagaaaggcctttcccttgtcaagtaggaacaggtgccaagccagaaatgccctgccttttaagactgaactctagaagcagtttccactaaatgatgtgttgagacactgcctgccttgaagacttgaactcttgataacaggttgctaattttcttcacaaagtccatcaatgtacaaagtaaagggacacaaaagtagggcttatagcatgagaaaactaaaaatttagtactacacagaagataagctacctgaacaaagattacacactggaaaagtgtcatatcagcgcattcacaacttgtaacacccaacaacagataagaacacgtgtgattccatttcatttgtataaagacaggcatggataggcaattttatgcatatcaacatctcttcttctttttttacaacaggattatgcaactaactcaagccaggcaatggcaatatccccattgcattgcttaccctaataaaaagaaaaactgagtaaagggcaatgagaccaactccaagtatcttgttaggctgcatgccaccccgtggcagcataacaagagcccagatcaatccaccaacgaggaagctcattgtgtaaatgagagagctgtcttgaggaagaacataagagtttggtgctgttgaccaagctccaagcagcatcgatattcccaatccagcaagtgtattgaacataggtcctgcgtagcatccagacatggcgatctgcacaccatctcctccattcattgccaaggcaacatttgacattaagtcacccatcgaattaccccatgctaacacagttaacccaagaattgaaggattgatccccaatatcactccaaaagcaactaaaagtgcaaccagttcattggcaatgatgtagaaccagataatgctcatcacaaaccctcccaacacccatgggaataaaaatctccgtggaggtcgttcatggtcagtgaacatgaaagcgagagaagcaagtgccatcccagaaataccagctatcacatatgctgctatgtgagccttagtggataccccatcttgactgctccaaagaaatgccagcagaacaggcgccaagccagcactagcaacagcatattctttcgaccaccggtcttcctcaactattggaattgtcaaccttcttggtatcgtcaaggggagctccaaaaacaagaacagcttggagaagctaactgtggaattatccacttcttcatcactccaaccccatagcggcctggaactgtcaggtgaaccacctctgatcccatgatttgagtaaatggccacatgagaagcccacatccactgaggcaaggatgtgtttatttgagccacgtcaccatctgattcctcctcaagaagtgaactgtacacggactcatcatcttctgttccttgtgcaaagatactccctctcacaggcagcagtggtgtgaccacatcaaacttaagcctccgtgcatgcttcctcaatacctcatttgcagccaccacaaacgcataaaccacataaatcgacacaaacataatcgctccccaaacggtcaccttcccaacaatcaaaataatcgacagtgctactagagtcatcagaaagaacccaacatccctcacaaagcatcttctatcaatctgcacattcttctccgccacgcacaatgacacagctccgacaacaacacaagtcacaaagaccgctccgcccaacacactgttcagcccaacatcaccagcgccggtccccataaacgcggcaatactcgaaacacatcaggcgcgccattgccaaaggggacaatgtcactccggcgacggtcggcgggagccgtagcagcgcggacatcttctcaaggctgcagcagaagtaatccgcggccgtgttcccaagcatgtagaacagagccgctaggcacacaccgagcaccgcatagccgagcaccctgaacctctcgcaccggcagtagaagaagcccaagtagtcgacgaacccgccggagctacactgcgggtgcgcccggaggaactcgcactgggacccgaacccctcgtgccgcgctaccccggcgcacgccacggagggatccaccggcggctgctcgccgtttagctccccgatctccgacaggttggacgcggggctgataggatcggcatcggagaggaatctacggtgccccgtatgcgaatcgaagctcaatacccgtggagaccgcaccaagctcccgccggagcggctgtagagcaggaagaggaacagcacgagggaggcggcggcgaggggccgaatccggcgaggatgcggtcccgccgacgagatcatctccggcgaggtcagtgcctagggtttccggggacgggcatgccgaatttgggggtggcagcgagtgattcgggcggaggggaggggtttcgtggggcgcgggtcgtcggggtagggtttgcctgctcggaggattggaaggtgcggtttgggaattgcgagacggagttgacgactcgaggaggaaggaggcgaacgcggctt

SEQ ID NO: 11784 - DNA, 697 bp, Oryza sativa
gaggccgttccatgtatgcgaggagcaaagttgctgggagataaagcacggggcgtgctttgtcttctctgtagaaataaaggaactgtctatatccgttggcagaaaattttacctcttatcttttaaattttaggccacttttatcttttaaattttgtaccatcggatatgctttaagatttgtgcagagacattaaccctagctctcctcccgttcccctcgcatcgctcatttcgccgccaccatcacgcatttctccgctatgcctgatcccctgccgccaccgccccatcgtgccgccgactgcctccccaagccgtcaacgacgagatgccccgccaccaacatcagcccaccgccctcttccaacaccacagctccagcgtcgctgccagcgcctcaccgcccgcccgatccaccgcccaccgtcgggctgtcgtctcccccggccatctctatagagccggcgaactcctccccttcctcctccccctcccaccccaccccgggacactaacctgtagggtcctctaccggagtctaaagtgtcgccagcgtcagagaagaagaggaggtcgccggagttggaggagaaggccaggagcatgaatattgaagctaatccagtgtcccaaaatctgcaagatttggatatgtaatttctgtcgaaagaggttagcaatgggctgcagg

SEQ ID NO: 11785 - DNA, 4641 bp, Oryza sativa
cagatcggtaacggctatgctccagtgctggactgccacacctcccacattgctgtcaagtttgctgagctggtgaccaagattgacagacgatctggcaaggagctggagaaggagcccaagttcttgaagaacggtgatgctggtatggtcaagatgattcctaccaagcccatggttgtggagaccttctctgagtaccctcctcttggtcgttttgcggtgcgtgacatgaggcaaacggtggctgttggcgtcatcaagaacgtggagaagaaggacccaaccggtgccaaggtgaccaaggctgccgccaagaagaagtgagcctcgttcaaatggtggtttgcatgtctgcagttgagatatctagttctagtatttgttaagttttgcccacggccatggctctcgtttcatggaccgttaatatctgctcgcaatgtgcactatgtcagtcgtttaatactcgtttatttctgttcggttaaaactgatgctctgagtccgattattgtccatcggctgttttggaatgcgagtatttacattgctacttcctgtgtcgttattttcgtttgtgctattccctgcttttgctgctattgataactggaaactgtctctgtcattgaatctcagacaagttttctgctattggaaactgaaagcctaatggatttcaattatgatgattgctttttctgcaactgccacctaaattgtttatgttgaagttcgttcggtcccatatttgttagaaaagggtcggggcctcgggggtttgcttgaatgatgaactggtcggaacttgtagtgcttcaattgttgtgattttgtttccaacaggatgtttacagcctttttaaattgagaaattagcctctcaaacaatctaatctgaaaaccttttaaattaagaacttagcctctcaaacaatctaatctgaaaatttgatcctactatgggaggctatatgtcctttcgtaagatgtagattgaacttttgtcatatacagggtatgaagtatcagatggaacaacgtagattgaactcaagtccttgattttaactctaaagatcaattaattcagtccactcaaaatgctgataatggaataaccctcctgggaatagatgttttgttgatgcttcttggaaagatcaattaggatttggaatgtttttgcatgatccacagactcgtaaagcgatttgtgtccaagctagttcaatactttatactaatgctctccaagcagaacttgcaagtatatacttagccattggcgtatgcagaatgcttaacattgcaggtatggttatgctttctgataatttgcctctagtgaagctccttcgtcaaaggaattttgcttcccagccacatcactggagtcttcatcctctgcttctgaaattgcaagattttactcaaggaaaatcaattagcatggtctggaactctggatataaagaaatctaaacaagatggcagatttttagaaaaagggcaagagaagcaaatgctcgtcaatctgtccaactagtttgtcaaaatgtatgacatgtctcgcttcaaagtagctgtgctactacggcagctcttcaatcagcttttatagctgacgatgtacaactgattcatgtactgtgcttctaagtttccaataaactttgttctaaaaaaaacatagattgaacttttgtcagatattgttcttaaaaaaaaaacttctgtcagatattgaggacacacgtctgaagtagtatcagatagcacaccgtttccacttctgttaagccctttcattagctctgaaattagttccattgctgctattacaataataacttttcatgagaaagtaatcaatctatttaaccttagcccccatcttgatgaagtttgggggccgtgagaatccactttccgggtgatttcagctgtatgcgtctgtaagtatatatgaactgtacaatacaacaaatattgttaacagaaaaaaaaaaggggctaacctgcttaaacctatatacgggtggacggttgagccatagttgttggtccctaatatgatcatgtccatacttagactgtgttctttcctaggtgatctaggtgattatgagtgagttttgtttcgttttccgcgcgcacgtttcccgaacttctaaatggtgcgttttttgcaaaaaaaaaatctataggaaagttgctttaaaaaatcatattaatccatttttaaagtttaaaatacttaatagtcaattaatcatgtgctaatgactcatctcgttttacgtatctttcccatctcttctatctcctctcctcaaagccttagagcagttcgctaattcctatcctatgtagttttttcgtctcgtgaaacgatccatgtagtacagctgtcttgtgaaacgatccgtgtagctgtacaagtaaaattgctgacaataaaaatcgagcacacgataataccaccaacaaaggctgcccaagttctcgagcttctcgtgcctcttcgagtcgtcgggatggcaacgaaagcacctctaacttgagatcgcagatgtgatttagttgctggtgctagggtggtgaaaaaacagtatcttattttaactccacctctccacacgaaaaaatgttacccattagtgcgtgattaattaaatattaaaaaaacttaaaaaattattaatataaatttttaaaataactttcctatagaatttttttaaaaaaataaaatgtttagcagtttgagaaacatacgtgtggaaaacgagtagaagttgggaaagtgagggaaaaaacacaaccacgctatacaatgacatttttgtgattaatggaataataactccttcctctacatcgtgggatgcgctcgaatcatacgagagagagagcgcgcgcacgtaacagtataacccttacatttctccctactctttcaactgtctgatgaatcctgatagtattaagtgtagcaatttcttcttggtggatcctgacaattaaccaaaaaggaaaaaaaaatcagtacttagattgtacagataggcatacaacataaactaaagttgatacagtcctttcccgcaaaagaagttgataatagtcctgtccataccgatattttcgggttttttttttacttattttctcctcgaattgttgggctagtttgcaaaaaaaaagtacttagattgttgggctagtttgaaaaaaaatcctcgtatatattcaaaacctttcatagttgtgtttatttttcgaaaaaaaccttgtctataatgcgaagagaaaatctcatttctagtctagaaataacgcaataaacacgaaaagtatataaaattttccgcaaaacaaccatcgttggagatatagggtctgtggtcgtgttgtagatgacatcaatagtgtcccacacacgcagcggcggtgtagccatagctgcctgcctatcgatcaggtccatatttgtgtttctgttgaaaagtttgagaaaataaggttaaataagttagcacggtcacgttaccttcataaaataggtccagcagaccagcttttcgttttttaaaaagaggagcaagtgagctacaactcgaagaggcatctaattcaaaatagggtcgaaagcgtagtgcaagaaaaaaaaaagtttgaattaggtacctacttgcgccctgcgaaacctccagagacgtaaagttaacgcaaacgtttgaacaggctgaccacaggattaaaatcgaacggtcaatactgccacgtaacagcaaccatcagacaaagatcggacggctaggaaggaaccctagcacccgtggctgcctatataagaagcaatcctctcgccccaacccctcccttctcccgtctcatcccagccgccgccgccgcagcctcctcctctcgtcttctccttcgaggtcagcttcagatcttctctcttctccatatttgcgcttgttcatgttcgttcgtagctgcagatctggtttagtaacgtgaggtttcggtgatttcgagctggggcatgttgtgttcgcccattttttgtaacttttttctgtgtattcatctcactgcaatgatcttcgtctgctgttcgttgacgcgacgataaacttgatttgtcagtgaatcatctgcataggttgaaaattatcggcagaatcggacgatgaacttgatttggtgcagaatcatttacataagttgaaaattatcggtggaatcactagaaggatttttatctacaatccgttcgcatagatctctttccgtgtttctgtaattttttttattctactactgctgagtagatgttatcgtctgtacccggtttggttgggtcgattactgcgcctctgtgcaaatcatccgccgattagctgcgttagcacttttatagctgcccaagtttgatctgtgagcttgcctgctatatttatttagagttgtaaattatacacttatctttgtttctaatatttgtttcgttctgtgctgcagttgttagctccctccttattcaaccatgggtaaggagaagacgcacatcaacattgtggtcattgccacgtcgactccggcaagtcgaccaccacgggccat

SEQ ID NO: 11786 - DNA, 3841 bp, Oryza sativa
tggtatggtggtgacctttggtcccagcggtctgaccactgaggtcaagtcggttgagatgcaccacgaggctctccaggaggctcttcctggtgacaacgttgggttcaacgtgaagaacgttgccgtgaaggatctgaagcgtgggtacgtggcctctaactccaaggatgaccctgccaaggaggctgccagcttcacctcccaggtgatcatcatgaaccaccctgggcagatcggcaatggctacgccccagtgctggactgccacacctcacacattgccgtcaagtttgctgagctggtgaccaagatcgacagacgatccggcaaggagctggagaaggagcccaagttcctcaagaacggtgatgctggtatggttaagatgattcccaccaagcccatggttgtggagaccttctctgagtaccctcctcttggtcgttttgccgtgcgtgacatgaggcaaacggtggctgttggcgtcatcaagaacgtggagaagaaggacccaaccggtgccaaggtgaccaaggctgccgccaagaagaaatgagcatcgttgaagtggtggttatgctggctgcatttgagatatcttagcgttcgttaagttttgcccacggccatggcactcgttgcatggaccgttaatatctgctcgcaatgtgcactatgttagtcgtttaaaactcgtttatttctattcggttaaaaacttggatgctctgagtcttattgttgcccttcggttgttgtggaatgcgagtacttacagtgctaaatcctttgctctttattttcgattgtgctatttggtgaaaactgaaagctcttttgcttggtgaaatctgaaaactcttggtacttttgaaatctttaacttggtatttcaattgtagagattgaaaactgatacctaatgctacccaacggtgtttaattgaagctctttttgttccaaattttgtgctgattggaacattatttaggcatatgactggatttcgcttaaatatgaactgactgttagtagtctttatcagatacatcgagtacactcgtgtcggatagcagctatgtaaactgtaccatcgttgctctaataacttttcaatgaaaaaaaatcaagctctaataacttttagtcccccatgataatgttttggggccgtggcaatacaacacttgggtgatttaggctgtatgctatatgaacagttgacaaaaggctaacttgcttaaaatctatacgtatggacgcttgcgccggagttgatggtcactctatgatcctgtacatgtgtgcgatctcaaagcagttcgccaattccatcctacggatgcggcgatatgcaaactggaccaaatttgatgcggtctgcgagcaaatttaattcagcctggagttcagatcttcccgttgtttttccgtactctgaaatgatccatgtagttgtagaagtaaagaattgctgacaacaaaaatcgagctcagggccatcaatccccctacatgataccatcaacaaagacaatattaaagctcataattttaagataatggtgggatgcaaacaaaccatacggatactgaaatggtggagatgcatacaatagcggtatattgtacctgatagagatggtgtcatggcgaaatcaaattgaggcagcaacaccccggcggcaatagggatagctactatgttatatgcgacagcccaggctaaattttggtgaactttggccatagttgctttcgaaagtgataaagcatccattacctaagccgtagggtggttcttgtttattagcacgaatgccacttgaactatgcagttacaatatcatagagaacagaatcctacctgagaaagtctgtttcctaatagaacaactgaagccgcgtcagaggcagcactctcttttgagtttgttcgcatagctactcccacatcagcagctgctaaagatggtgcatcatttattccatccccaacctatgcaacagcaaattccactaagacaataatacagagtagtttcatccaatctaaaactttgagttagtcaaactttaatttttgtttactatgctcaacatttaaacactctccgaaagtcaggacgcggaataattttagtgcaggcaatttcagtatgccatagactagcaacaactgtacgtgctgtcaataatagataaaagcacatcacagagcattaccattgcaacccgacgtccctctccttgcaatgcagttataatgcctgccttttcatgtggagttaaggatgactttatgttttcacttctgatccctacagttctcccaatgctttcaactgcttctttcctgtctcctgatagtagaaatgtcaagatttcttcctgctggagcctgttaattaatcagaaagggaaaatacagtatttaaattatacagacaacataattagtaatagatgaacatttgcataaaaataggaaaaaaaaaacatttgcaatatgcgagattttaggatgcaacatctttttttttgtggatatcactcaaaagggttgcatgtcatatagagagtagatgcagcattcatagcaaatgtccaaaagtataagagaaaactatgaattctgaatatgtcccgttaggaagatatgtttgactgaattatgataaagcaggagacactcgataaatatacagacagatggtatctgcagtaaatacctgtccacggttgctttggcatcatcacgcagaacatctgatacagcgatagcacctattattccttctccctcacggccaacataagcaattgattttgagtgattagatgatgcctcactggaagacacaaactctagatgatttccgagatctgtcagttcagttgacgatgccttggtctcaaatcgattgtggacccagtccaaagtgcctactgcaaccaagcacccatctacttctgccaaacagccaaaaccaggctctgtaagttgaccacttgtggctgggatatctagtttgagaagttcggcctcctccattatagcatttgcgataggatgcaatgctgttttctccactgcagcggcgagacgaagaatctccgcctcctcatatgctaaagaagctatagaagtaactactggtcttccctttgttagcgtccctgtctaagaatcacaatacaaataccaactgtaacacaatacttaattttgaggagactagtttagcatgaaaaattaaatgatgtatgtagtgtgtaccttatcaagtacaatggcatctattccagctaaacgctccaaaacatcaccccctctaataagtagtccccgtttagcacctagtttaagataaaaggtagttccatgagggttagcagctcataaaaagcaaagatcagagaaggatcgcaacaaagtagcacagtcaatatgctgaattgactttagtaatgcaagggcctctttatcgtatttatgatgtatgagcatctccgaccccattgtatcagccaaatatcaggaacaaacgaacccaaacattatgacatagaaagttacccagtgaagttcctatcaaaatagctgtaggggtagctaatccgagtgcacaaggacaggaaacaacctgcagggtgaacattatgagatcagcccaaaaatcataaatgcaggcatatgcaaatagtgcccttcatagcccacaacttttcaaccaccaccgtccatcgaacaggtatcgtattgagaattcaagatgtttggcatgtacatcaatcatgtaggatttcaatgatgattagttagtttgtgcactg

SEQ ID NO: 11787 - DNA, 672 bp, Oryza sativa
ctctataaagtcccacccaattctcgattcccaatccagcgcagcacaaagccctcctccttccaccgcagctgcgctacctacctccaagagggctggtccgctggtcgtggagaaggaagagagatcttccaggctgatccctcctattggtacggaagccctaaactcatcggagctttgccgcggccgcgagcgatcaaatcgaaatctttctttctttgttctttgatgctccaacctagtgtcggatttgattttgactgttgcaatggcagctttctccttcccgagcccgcttgaggatccccgccggagtagggattagggaggggagaacaggaggcggcgattcaccatgaaggcgctcattcttgttggaggcttcggcactcgccttcggcctttgacgctcagtttcccaaagcctcttgttgatttcgcgaacaagcccatgattctgcatcaggtaataagtggtttcgctagtactctgatggagtaataagagtacttatttgcagtgccaatggatgaattgggcacaagttaattatagtacagtattctttaccaacagtccaacaatggcactggcctctccatgaaaggagggagagggtgctaaactggtcagagaacattaatactatttgatttgtttattactcc

SEQ ID NO: 11788 - DNA, 654 bp, Oryza sativa
tggatatagattgggagacatctgcatttcatattttagcttaagggctcatatcagcactcttgcaccagttatatgttaacaacttaacactttgttttttcttccccttaatgaaatgatacgctgttcttctatgtttttgagaaaaaaaaacttaacactcattagataactgacagattttatgctcatatgtgtatttctgtagtcaattcctatgtttgtccactccactagaaatagtgatactcccactagaactgctttttcaaatgattcatgtttgatatgcagttttgcagttacattcaatgagaaagtcacaaggacagtcagacaattttcaccacatttagcagcaaagatgaggccacccttaaggtggggatcctctccccctatttcttctataacattcttctttttttaaagagtctcagaagaacgggctaacaacattgctgatatttgcagacctgtcattcgtggccgaccaagctcaaaaagatcaattcatatttgtggccggcctcgatgggtttttgttgtattattttctgtcgggtagtataaagcactgacctccatacatactattctagaccatagttttttttttataaaaaaaacaactaaataaataatgaactc

SEQ ID NO: 11789 - DNA, 634 bp, Oryza sativa
tgcaagcaccaagaagtgagccccacacttgaggactcggcctaatgtgcattccctgtatgagctcaacggcttcgtccaaatgcccggcacgaccaaggagatctaccatgcaggcatagtgctctgcacgaggggtgacattataatccaccatcgactcaaacagcctcttcccctcatccacgagtccagcatggctacaagccccaaggacactgataaatgtgatgatattgggtgaaacgcccatttgggtcatgtcttcaaacacctgaaccgcttcatggccaaatccatgcatcccatatccagatatgagtgtattccatgacacaacatccttccggtgtcctattaaatcaaagatatgccgcccagcttcaagacatccacatttcatgtacatcgccatcaatgcgttcagaactgaaacaagtgagtcaaaacccctccggaggatatacgcatgcaacaatttgccctgcccgagagcgttaactccagcaaaagcatgcaagatgcatactattgtgactgaattgggtacaaggtcttcatcagaagccaccatctcctggaatagcaaaatggcatcacctcgtctctcgttcttggcatagcacccaatcat

SEQ ID NO: 11790 - DNA, 669 bp, Oryza sativa
ttgggagcttgtgaagaaagagggatatattgctatgtggaggaaaccattaaataactcatgctacatgaaccgtgaccctggggtcaaacctgcactttgtgatcctgatgataatccagatgatgtctggtatgtttcgacctcattttgtcctgtttttattgatgaaacctcaatgtaccattctaaatctatgtctttctggctgcaatcgtattggataaaattttaacagtcacatgtgctattggaccataaaaatacatcaccattcactacagtttgtctatataatattttaatatcattgatttatgatgggctagatggcaataatgttttctttttgcatcatcattggttagatctgttaaaccattcaccattaaaacctcataaatgcaaagcatattatcaacaaaatctgtgataatggctattcatttttctggttatgtagattatactacatcattcagaggccttagctactgtttgattggactgttgtactgctgttatgttttatttggcatgaatcttttttgtgctattctttatgttctatttctctttcaggtatgtcaatctgaaagcatgtatcagccggcttcctgaaaacggtgatgggctgactccctttccatggcctgcacgtttaatgga

SEQ ID NO: 11791 - DNA, 1367 bp, Oryza sativa
ttgctagattctgtactttccatcgtcaaagtcttgctttggaaccattggcatcaatctatacaactatctctacatgctgcagaataagcctcctgacagtcgatgcacattgataaactgttacattatccagcaaaatttctgcgagcttttatggattagccctgagacatccaatcataatcatcatgtgctagactgtagtccattgcacgagaacttccttttatcattcattgggtctgtaggaagatattcctttagtcctgccacgcaaccacaataaataaattaatatagaattatgttgttcatatcagttcaccttctttccttgaattatggtggatttttttttcatcctaaggtttcttctgggatcattacatatacctatatggttaatgactttgataaccttgacaatattattcagacaaatttgcaatagtaacataatatattgaacttgaataagtcttttctccacataaatgggaggatacctatggttaacctttgacttaataggtcccttgttaaaatagtttcaccatgttgtcacactaataataaaaaattctgatcaccattacgtttatgcagattcattggccattcagagtcaagaagggctcaggcattagtaacactgaagactacataccacctgacatcccatctacctggggagcaatggagaagctatatgattctggtaaatctcgtgccattggtgtaagtaacttctcatcaaaaaaactgggtgacctgcttgctgtagcctgtgtacctccagctgttgatcaggtagaatgccatcctggttggcagcaaacgaagctacataacttctgccagtcaactggcgttcatctttctgtaagtctgtggtacttatataattactctgagtcaatgctcttgttaatgagtcccgtggtttttaattttctgaatactgctaatccttttcttcctcttctttttaggcatactcgcctctaggttcacctggttcaacatggatgaacagtaacgtccttaaggaatccgtcatcatctcaattgcagagaagctcggcaaaactcctgcacaagtggcactgcactggaacattcagatgggtcacagtgtactcccaaaaagtgtgaccgaagaaaggataaagcagaacatagatgtttatgactggtctattccagaggacttgcttgttaagttctctgagattaagcaggttagttcaacatcctttgatcacctatatttaattgtcaatgttttcaaacatctctacagactttttcttaacaaccagtgtctgcatatgatttggacaaacttacagggctgcaggaat

SEQ ID NO: 11792 - DNA, 616 bp, Oryza sativa
ttttctgtttgctaagtagaggagatgtcttctgattctgccatcagtatgaagtatgaattcaaattaactagagcatgatgaagcagcatttgaagtacagcattttatttaatgcaaaattaaatactccctccattccaaaattccaaaatataaggcataaccacccttaacccaaagaccaagaaacaattacgatcacctcctagtttggatcaccgtaacaaatgcaatgcatgcacccaatagaattagagatcttgagtgtggaggatttaaatataataattgaatagagaggaggtgctatttaattgcatgcatgcatgcacacctcatattatgaaatatctgaaaaaagtagttgtgccttatattatgaaatggagggagtataaccaactgatttggtttaatttttcaaagacctctgggttcaggtaaaggagtttctataacacactttgatgaattgcaggtatggtttagcaatgtacctcacacgcggttggttgatgacaaaggagggcagaattggattagtaaagctaaggataaatttagatttcctggaggaggaactcagtttatccatggagcacatcaatacctg

SEQ ID NO: 11793 - DNA, 535 bp, Oryza sativa
ccccaccctgcgcgctgccgccaccgcggccctctccacgcgcgccacgtgcctcgccgcgcgggagggcgcgcgcgcggtcagtcgcgcattagcattttcgtcatagggcctgtgaaaaatgtcatccgaaaaatgcctgaaacatgtactacagtctacaattgtgtgcatgagtcgatgaacattgagagtttaggtggtgtttagatccagggacttaactttagtccctgtctttagacactaatttagagtattaaatatagactacttacaaaactaattacataaataaaagctaattcacgagacaaattttttaagcctaattaatctataattagagaatgtttactgtagcatcacataggctaatcatggattaattaggctcattagattcgtctcgcaaattagtccaagattatggatgggttttattaatagtctacgtttaatatttataattaattttcaaacatccgatgtgatagggacttaaaagttttagtcccatctaaacagggcctta

SEQ ID NO: 11794 - DNA, 673 bp, Oryza sativa
atgattcctaacaaattaggataataatcttcaatccgtaccgtcgtaatttacaaggcactatagtataataaactagtaatattattaaaaaaaaccaatatttttttaatgaaagatcaaagtaagagcatgatccactttattgcatcagtgcatagcgtacacaggtaagtgcatcaaagttttgaatcaaatttttagtatttccagaagaactagaacaaacaagcaatcacatcaactaacgaaaaaatgccacagggtaaacatagttttagagctaaaaccagaatgtcggtagcaaatcagaacatgccactaaggctttgtacagaaaatatgagggaagaaaacataatagtaggaccatatgttgtatgctacatatccatgcaaaacagcaatattcgtacttacctttcctttgtctgcacaagctgctcaagtgcttgaaccaggctgtgtttcaccgtgcaacaaacatatccatttgccagctctacccactcttcaacaagcgcgccaccttgccccttattgatcattgctctttcaagtccaatttcctctctgaactcattcaataccactgcaattctcttcccatgttgcgcactcagaatgtagttgactaactgaaaagtgatgcgcgggagataagctatcccat

SEQ ID NO: 11795 - DNA, 2812 bp, Oryza sativa
aactctatggtgtttccattctgaaacatgatcataataatcacctgtctctaggtcatgtgcattgtgaaatggaacacctggagtctgtatccgaatctgactgtgtgtgcttctgaattttcatcacagaggcttctggccaactgctgctgtttacctgcaaaagagccccaccttcggttggatattccaccaccctcttgtgacttcggtacggctataagtcaccaccggatgtgcttaaactccctgcttgtcgtcgtagattcatagtctctgttcttatggttgttcctgtttacaaatttgcagctgatcactaggttcaggggaagacgagtcccggtgtgatcgtcgctttgctgctggagctggatcactccaagggatgccgggtcacctccaaagaaacttgagcgatacatgcggttttttctggttagcttgtgattcgttggtgctgctggtatgtgaatcttgtgtctctgctaccagtaccctgcctcaaagacctcgttactacgctcgccagttgcccagttgttcgtagaaactagaaagactttcttgcttgttaatgggtagagagggtagtcatcgtacatatggctatgctcattgcacgattggttgattgctagtaattgatttgtaggtcatcctacgggaatattactgagtagcaaaagctttcagttccggtgctacgtatgacgttcatgtttttaccttatgacgttcatatttttactgttcatgtttttaccaaatgacttttagtagaatcatatttttaccatatgactttcagtagaatcaatctgacttaccgttcatttttttactgtatgacgttctagaatccttcgagtttctatttttctacgcaaataattcgatcttttctgcatgaatcttttgtcgcacagaacaactataatagtataattgagaaacaatagagtgaaatatcacaaaatgaacaaggtaaactaagaaatcaaaaatcaactaatccatcagcaccacaacgtatataggataataggatactgacatcagtggaaagcagaatgtatcagtttcagaaagacctgagttcctacgtgttcaggcttctgaatgctaaaccaatcttcctcgaccagttccttggccataccgtgctaaaaaatgattcccttggccataccaatttgctccttattacaccaatatcaactatagttggtaaagaagagtaaaatgccacaaaatgaacaaggtaaactacgaaaccaaagtcagctaaaccatcagcgtcgctggggaatttgaatgacgcatacagaattgaggaaaaaaaatattaaaatatacctttctcctatgattttataggaatatacttatttttgaaggtgattattttgcatcctaatagtaatatatagagaaaaacgtgcattgcacgtatatgtactagtatactcatgattttacagcctgacttgaaaaccgtgccatgaaccaaaaataactagcaaacaacagtgcaacacatgttgacacgagatagattatcactttcaaccacatatgactcgttcttccagcacacgtcgcgcctatggcttctcctgcaaacataaaaggaacatagacgagtaggaaataccaccactcctacaaacagacaaaaaaaaataatgtcatgaagtttggccacgcataaattagataacctttgtgtatttgtaatttgtaaattaaagattcggaaaatttattttatttattttgtaaaggatgtgcagtaatggcgtttattagctgtaaaggttcataaatttcatttatttatcgtatattttgtataacaagaccacaaatcgaagtgattaacttttccatattattagttagcagaagtgctaaacaaagattaattagtgattaatctttcattaattactatctcaacaacaatttaaaggacgtaccttgggcttataaaaggactttttaacgcaagcaatcctcgccaccttgaattgctgctcatcggcgaagtaggccgccgtgtcgacgttgaaccagaagttgtccactctaccctgtctagttatcatggacggtgatgatggcagctcagcgaggatatcggcgccgttgatgcagtgccccttgatgacgacgacgagaggacagggggctctgcacacgtgacagcgcctgtcctcgctgacgaagcggacctggacaatgcatctcgcgcaaacacagcggtggccgcatggcccgatcgccacccactctaatggctccacacacaccgcgcagcagttggtagtagtagcagcagtgccgccgcgggctacgtcttggagctcgatgtcgacgacgacatggcacactgccttggtgctcatagtattgggtggttgtttcacgtggtatatgttggatcgaacacaagtaaccaagtctatgagagagatgttgaatggtagattacatcagcggaagtcaaataattgaatcttaatagatcaaaacacaccccaaccttaaaaccaatggaacacacgtaatccagtctatctgtggagattatgggtaccccatacccacacggcatggttatccgactagttataggggataacttatatatatgaaatatgtaacagatcatgacttgggtattacgtttccttgtatattacggaacggcctaaagtcctggtttgataagattgtaaagtagagttaggaaaccgataccgtattggataaggtttctatcttgtaatcctgccccccattc

SEQ ID NO: 11796 - DNA, 7440 bp, Oryza sativa
atcgttagattcgtctcgcaaaatagcctagaggttatggaatgagttttgtcagtaatctacgtttaatactcctaaatagcaagatttcggagagatatttaatagcccgaaggatccaaacaaaccctataaatgatttgaaattaggagttagctattctattaaacttgctcttacagagcctgaatggagatgggaaagaaacggtcaaaccaagaaatcggtagacatttttctttttacaagacactttggtacaattacacatataaaaagagccactgcattaagccatgtcattgtcattttatcatccattggatttcattttaacgttttagcagtttatttcagaattcagattcagttacttatttacttcctatctacacgtacttagcacgtttgttgagaaataagcacaacatttagcgtgttctcatattccaacagaaatactattctatttgttatatttctgaaaaacaactttataacatgttttatgctaacaaacttaaccctgagaaaagcccgacagaaagttttactttagagtattacctagaaattccatagtaacgtacagaaaatcacctagtatatataaagtggagaaacaaaatcattttttaatcaaattcatgaccaatactatatctagttttttttagaggaagtactatcttgttaatatggctgcacgcattaaaaaaaaaactctaagacatactttgagatctttgccacggtggtttgcagtattaaaggaagcattggttgccgtctcggtagaaaagtggtacgtacgtacatgcagcaacatatcataggtgtttggtgatgctttgatggaaagcagtcaaagcacttagaggttgacgtcaccttctttttctacagagtttccaagccaaatatttttctaaaaaaatttattgcagcaaatataccgatgccattttcgtataatcaatctgctcgtttttctgtatgctattggatggatcatagcattccaatccaatgctaggatctaatccaaatggaggcatgaacagctatgctaatgagcagctaaattacaagataagcaacagggaatgttctaaaaaaaacagaaggaaaactgaatcggtggacacagaactggtccatggatgcaatgcaatagcagctaaaaaggagactttggatgctggcttggcttatctcctctctctctctctctctctattcccaccatgcctggaatggaaactgcgtcgtgtctgcgcttctgtttgggtggggccccactttccaacgctttgcttgctttccatagtgttaacattaactaggatcctgacacttgcatctttctccgagcttttgatgcccaatcttttttttttttgctgtcaacatgatcatctctttactgtgcaatttgatttcgcgaacagtttctgcgtgtgtgttgctgaacatgtggtacttgtcccagttaatcagtacggctcaacttgattttggtgtgactacaggattgttgattttggttaattactagtcgagatggtaaaaggatgcaggatctccgcccggccaacgcacatgcgtagttgcttgcacgaatcatttttgcgtcatattgaaaaggcaatgtcaaaaatggtcctgtctgttttttttttgagctactgaaaaacttccaaatttttagcattggttcttgattggtactagaagatatcatatgcatgcatgtgttcagtccaatgatgctaatagccgtgttcggaagaaattttttggcagcggcagcagcagtttaaaacggctataagctgcagtgattttcaaccgctgtagtcacagcggctgcaacaaaactggctgccgaccaaggccaatactcccaaaagtccaaaccaaagagtaccaagctagaaatcgacatctcattttgaattttagaaattttggttctaaggtcaattttaggggaggtttccttctactccatccgtccaaaaaaaaaaagacaaaccctggtttccgtgtccaatgtttgactatccgtcttatatgaatttttttataattagtattttcattattgttagatgataaaatatgattaatactttatgcgtgacttatctttttattttttttataattttttcaaataagacggatggtcaaacttcgacatggaaacccatgatttacttttttttttttggacggagggagtacaccgtttctattgcaatgttttcatcttcatgattgataccatgatgagtaaaaagaaatctatctaaaattgcatttaaatttatgttccaaaaaatttgggtctttttagactggtccatggaccccatacgggagtagagagggttacccattctccctcttttgggggcggaaaccgtgacgtgtctgtctcactgcacggtgggccccacctttcccctcctgggttcgcttgctgtagttaccatccatcctgacacgcaggcacagtagtacagtacagtaaaaaaaaatatggcaccacctttttacacccaccacctcccctctcaattcactcctcgtctcctcctcctcctccttcacatcgaagcatattctcgtgaagccctcgaggaggaacaagaacaaccaagaaacactcctccttctcctcctcatcctagttcagtgcagcgcgatcgtctcctcctcttcttcttcttctccatggaacagtagcggtggtggccgggtgggttttgtttttgtttttgttttgttttttggcagccgcgccgatcgaatcttcctcccaaggtacgtggccgtaccactgttcccaaaccgcattgttctttcatttctttctccccctctttcttttgtttctttgtgtgcgcgtgtgtatgtttgtttttttgaggcttgattatgtgctttaatctaagcaagaaaaggaactggatggtaatgagctagtgcttcttgtggattttgggtgaacgcgtatttgattggttcatccgttcatgtttgggtgaacgcgtatgtgtgtaagcagggcaacgattcgtgaacagattaggtttttttttcttttttgtgatttggtgatgttttttttttcctctcaagcaaactgtggtccgttcttgaatcgacttcaagttggtcccgtcgctgcttcattaatcttgcatgtgtagtggtctttgccctgtcactagattgatgtactttgtttgattccatcattgattttgccctgtagccccacaagaagtgtgggctttgtacggattccatttactgagacattgatcgaactggagttcatgttgatactccttttgagttcactaactcgtgattcatttcttgtttttttctttgttctgcatatgagtcgtcaaggaatagggctcagttgcttttgttctacattgcgcttcagtaatgtgatttgattgcgcgagttctgaaaaaatcatgatttattccattaacacccaaaagaactcatctcttgaaaataatgttggtgattcctaaagagttttacttcttgttgctttccgtaaaacaagaatcaacgatacagttcagtctatttatgtgtattttcttttggttctccatcttctagagtcaaaatgatggtgaagaaaaaaacctcttggagccagattgtgaaaaatggcaggccagcaaacacgtctgttaccacaagaaacctccgaccacaagatcttggggctgtgatatttggctgcacaaacaataccatcgcagagtgtcactcacggcaacttttcggtacgttcttgtctttcttaattcaaactctttgcataagatatctatttgcaaaacttagccatataaaattgacacattcatttcttcctgtgagtaagataaatatctccacctttcaaaggattgcaacttgctaggtaatccaccaacttagtagctatatttgtgccatgtttcaggcttgccaagaacacatctctcctatgtacaaaatatcaaggaaggcctacctctgttcctgttcaattacgatgaccgcaaactatatggtatttatgaagctgcgagcaatggcaagttctgtcctgaatcaaatgcatggttacaagatggcaagggaaagaccagctatcctgctcaggtacaatccctgatctttgtatctttggaagctgccttcttgctaaatctcaatgaaacgactccaacatgaatgtccttttttgccggtttaggttgccatgcggatcaaagtgtggtgtgttccactagcagaaagtcagtttagaggtgctattctagccaactactaccagaggatgcctggcgctcctggccagaagcttcattttttccagtttgaattggatcatgcacaaacacgtgctttgatggatatgtttaccccttcaccttctaccaacaatggctggtcgcctcctgttgcacaacctgctgatgagcatgtgagatcgtcatgggcaccagtgtatgcggggaataatggtctcaaatctgagaagattgtaaagtcatatgcggatgtggtaaacaataacaaatttgagcaagttagaacaggagatgtggtccatgtggatgcagagcatgctagctcaggtaatgaacatgtcaatggttttgatgatctggattgtggagacacaaccccagagagtgaggagtatgcactatcgggtaaggaggttgaagtgcaacaacaacagcagcagcagcaacaagaacagtctggtcagcaggataagcttagctttaaaggggtactagaaaagctcaagatgttgtctgtccagcagaggaagtctactttttatgccaatgctactgaaactgaaagtattgatgcgtatagctgtaaggatgtacaagatgatttgccagaaaacttagattctgaagtagatcagttctcctgggggcattctaagttgctgatgcactcattggactcagagtcctgtacagaagtcaaggttataactttgcacatagtggcatctctcattatcatccttgtttttttgtgtgtattcattcaatcttgttaacatgttcagcttttgcctatctattccaaatttctcacattagttttgtttgtgcagttggtagatatagtcaaagagttatatgagcggatagcgatcatggagaagaagcaggtctcttttgaaatgccattaacccatcatactaagattgcaatcttaaagttatgaattgtgtaccatatgcataaaataagtgagaagtctaaggaaattgtagagttgtgttaatataatatacctttagcacaaaaaagggaaaaaaaggtaggaatgaatagaataaaacatgaactgtcaagttgagtaaatcattgtatattactttacatatgctaaacttggttgcatgtgtttaagatttgctttcatcgacaatagctaatttttgcagcctagaatgactaaatttgttatgtgtactaaaagggaaaatctaaaatatgtttgcagtgctttttacctaccagcttgctagaaatcaaagtagtctatgattttgctattatgcttataaaatcggtctcacatctagttaatttatacctaataattatattttaaattaactttgctgtagtcagttgatgaatataatatattctcaactaaaacttggaagtcctagagaattaatcttccttggtggttgaatttatgttatgttaaaaatgcaggcttggtccaataaagaactcaaatacttacaaggtgtgaacgagaggttactaaaaagagttgtggagctcaagggcacggtgaagacattgaattcaaagatagatcctttaacccttgatgattcccttagccagtttgttgaacaatgtttgggttcagaagatgtcatttatctagttggtggttttgatggcttctcacatttgccatcactagactctttttccccttcattggacgtactaacacctctcaaatcaatggctgttggaaagtcatatgcctcaactgttgcattagatggcaagatatttgttcttggtggtggtgatggagtctgctggtttgatacaggttacttactgaattctttgttctgtttcctcacaagctctccgatttatgttctttcctaatcctgcatttgactttttcatgaagtcgactgttatgaccgaagacgtgatgattggaccacatgcccatcatttactcatgataaagggagccttgctgcagttagcttcaatggaaaaatctatgcatatggtggtggagatggaaatgagtgtttctctgacgttgaagtatttgatcctgcttatggaaagtggattaaaaatcagtctatgctggataaggtattagtcactctctactccactcattttgtttaaacctaaaagatttgtgctcatggagtagtgaagctcttaatagaattaatggaaatttatttaggaaacaaaaaattataggaaaaaatcaatcatttacttcaggaaaagtcatacttgtgtaatgagacaacaatttctccatgaaaattcgtacttctgtaatgaggcaacaagttattcatttttgtgtactaattaagaattgtacttcagttttctataatattgtcttcggaaaatatttgcttctgagccttaaatctccatactgtgtgatgaattcttttgtttgattgacatctcctgcttggtttatcagcgctttgctctagcaggcgtggaacttaacggtgcaatttatgcagttggaggcttcaacggtgttcaatatcttaggtgatgtccttttgtgcttgtacttagtacttgatttgttccgttttgaattggtgcagatacaataaacgaacgagtagtacttgttttctaaaagacacttacaaatgtcttagagctgatgcagtggcctatggcttagtgtaaaactgtaaatgtggactatcattagcctattcttatgcaagggaaattattgtttcattaaaatgagaagcatctcagaatttctttttatgctaacaaatgctgtgttaccagctctgctgagagacttgatcctcgggagcctagctggaaaagactcccaaagttgagtacaggaaaaggttgtcatacactggcagtgcttgatgacaagatgtaagtttttagttctttctttatacttcaaaataaccaactaaaggttgcagaatgttctcttaaaaaaggttgtcttttctttttaagataatggaaccatttataaaactcctgacctctacaacaaaagattgtagaatgtgtaccttgaagattgaatccctctggtgtatattaccttctgttcttttga

SEQ ID NO: 11797 - DNA, 659 bp, Oryza sativa
aattgtgctcacattttgcatacatagtttgaaagatccgatgacccacttgatcggattatgacttcggaggccatcagaaggctgatcacctactacaagaactcacagtactactttgctgcgcagcagaaagtcaatgagatggcacgggttgtaagtaactagattactacagcaacttccccaaacattcaaccacagctagaccattgtaatgcaagctaagaggactcacatggtatttttgttgcagaaagggacagtgctggatgcaggagggagccaggctagcttttggatgcaggctttcacactcacgaagcgatcgttcatcaacatgtcgcgggacttcgggtactactggctgaggcttatcatctacattgttgtgacagtctgcatcgggacaatctacctcaatgttggcaccagatacagctcaattctggtaaaaatttccttcttcagttgtcacttctatttggatgcaaacttacactgaaaagtatctagctaccctgaactgaatacttgatgttaagcttggtgatctgataaaactgtgaaaacaattaggcaagaggtgcatgtgcttctttcgtcttcggctttgtcacgttcatgtcgattggaggattcccgtcttttgtggaaga

SEQ ID NO: 11798 - DNA, 656 bp, Oryza sativa
cctgcagcccgtgatacctgaagttatgtgcatatattatcttacttcgtctgatgcagtaataatctcaaggtaacaaaagaagttacctccaggctccagcttactgaaagtttcagtaaaatatgtaatttcaggcctatgtgacccaagatgacaacttgatcggcacattgacggtgagggagaccatctcatactcggcgcggcttcgccttcccgacaagatgcccatggaagagaagcgcgcccttgtcgagggcacaatcgtcgagatggggctgcaggactgcgccgacacggtggtcggcaattggcacctgaggggaatcagtggtggtgagaagaggagggtcagcattgcccttgagatactgatgaggcccaggctgctcttcctggatgaaccaaccagtggccttgacaggtaggtactgctattatatttatggcaaatcatttgttattcattaattaatggatcatgcaagcatgccgggtcggccaaaggctggccgaccaatttcattaagattgggagaaaataaagtaaacatttagttacatccaggcccagcatgatagcaatctagctatctagcaagcatgatagcaatctagctgaacttgagatgtggagatttgatttgcacagc

SEQ ID NO: 11799 - DNA, 2747 bp, Oryza sativa
attcctgcagccctcttatatatatttttctattgtattatttaaatgaggtctaattctaaaattagcctagataattttggaggctttgagggttctaaaatatcctagtgtggccctttttattacaatagcacattgaacgaacttatagcaatatattttacacggataggttgaatctatttattctataaatagtatattaagactcggtacaacattaatctaattttaaacactcacatattcttgtttatatataaggactaatttatttatatgaccattattttatatgagtgattttcatgtcatgagtaactcggcgacatgttgcaagtatcaatctatatattccggtgaattacttatttataaacatgatcactatagttgtgatcatcatttcatgtgttcttatatttcatgtgagattcgattcaaatgaattagatttaatcttactatttctttagctaattgtgacatcaagctatcaatcatggttcgaatatttaatacatgatttgtaatttgtaatagaaattaatatttgacttaactatcttgtgcataattatttgtaggattaacaatattatattctcgtaaatttatctattacttaaattttagatccttactttactttctttgtgatcacttacggtttggcaagcaatagcaatcataacaaccagcataatgcaaaagttttaaaaagttcaaaattttagtgatttttattgtcttgaattttcaggatgttacagggaggcgagaagcctttgggtggaagtggataaggatgaatgggtgtcagttcggctctgttcgattttgtacgggtacccattttttcaaaaccggcaactataatatatgtgtcgatttttttaataaccatcacctattgccaactataagtgtcgttttttaaatagtcccacattggttgtggaagggtaaaaaacctaatatataaatgggggagcccctcacctcattggctagcttttggggtgggaaagaccatttacgattctacaattggtatcagagcctaactagtttaacatctcttgcccaagggacagagaaattttaggagttgagggagctacttttgaagagaagtacctagaagacttcctaccccagagggtaaaatgaagagtgaacccttccaacctgtcaaggaaagatttgcaaaaaggctatgtgattatagatggccatttggcccgcccggcctaggcacggctcaagaagaatcgggccggcatggcatagtcgacactttgttttatcggccttttgcaggaggtgcgttttgctcatattggaagagggtgtaatcaggggcgaacgtaaaacaaaagtgacgatatgaatcagcagctgctgcagctagcgccaccgaacaggccctaaatatataccaaagggtaaaaaaaactcttatctgcacttgatcctaagctctatctaattaattaaggtatagcatgcagcctacaaccttatgcaaggtttaaaagaaaacgagtgtagcaagtagcagtatatttaaggagtgtttagatctatgggtataaagtagttttgacgtgtcacatcggaacacatttaaagtattaaacatagactaataacaaaacaaattacagatttcgcctgtaaattgcgagacgaaattatgaagtctaattaatccatcattagcaaatatttattgtagcaccacattgtcaaatcatgacacaaataggcttaaaatattcgtctcgcaatttacccgtaatctgtgtaattaattattttttttgtttatatttaatacttcatatatgtttccaaacattcgatgtgacgaggtgaaaaattttactaagagatctaaacacaccctaaattacatacggttccaagcaaggaaggaatttatgaaccgtggaatataattctactaaccatcattgagataaagaagcatctgtaatctttgagactatgaaaagcaaaaaagaaaaaaagaagaaaagaaaagagaaggaggcacacgggcacacggcacagcattccaggccactgtgccccactctactagttaggcactgctggtttgaagcttcgctaccgttgctgcctcagaaacttcagactttcagagcatcgccctttgtgggcttgtggcagcgccactagggattaaaatggcttagaaacaaacagaaactacctgtggatattatgggtaccccatacccatacggcatggttatccgactagtcataggggataacttatatctatggaatatgtaatagatcatgactcgggtattacgtttccttatatattacggaacagcctaaagtcctggtttgataatattgtaaagtagatttaggaaaccgataccgtattggttaaggtttctatcttgtaatcctgccccccaccctatataaggtgggcaggaggccctctagggggcatgagacaacctgatcgtcagatcaatacatactcggcggattcaaatccccaaacaggagtagggtattacctctcattgagagggcctgaacctgtctaaatcatttgtctccgcatccatccacttttaggtctcgtgcgctacccccttttattattgccgaattcatgtttcgacactaccctaaccatattttttttcaaattagaatagtaaacgataatttcagataaaattaag

SEQ ID NO: 11800 - DNA, 646 bp, Oryza sativa
attcctgcagccccaaaataggaatataattcctagttccacttagactctaacctcaattaccaaatcacctaaaacctgcggccacacctgccgctatagatggccatatggcccgaggcccacggcccggcacgaagcccgcaattttggcccggcccaagcacggctcggcccgactagggtcgtgcccgtgccggcccggcccgacagccgggccgtgcctgggctgcaccctcggcacggtgggccggcccggcacggcccgatcaaataaaaaaaatatagggacaaaaaatagacttatataatcgtataaggcatggcccaagaaaataggtatacaaaatagacttattttccagccatttaaacacaacccacagagttgagggaccaaaaatagacttatttccagccatttaaacacagcccacagagttgagggatcaaaaatagacttatttccagccatttaaacacagcccacagagttgagggaccaaatataaactctttctgtgaggcagcacaatagcccatcgtgccttcgggccggcccggcacggcccgactagtattgggccgtgcctgggccgtgtatgccgcccgtgggctggcacggcacggcccggtgcatcagtcg

SEQ ID NO: 11801 - DNA, 654 bp, Oryza sativa
gccgcccgcgccgccgccgcgtacgcggtcgcggccgtctacgcgggcaagccgctcctcgccggcgcggagctctccctcctcgcgcgccgcgcgtggccgcgcctcgccgccacgtacgcgctcgcgtgcgccgccgtcatcgcctgcctctcctccttcctcgctctcctcgtcaccgcgtgttccacgctcaagttcatgctctacccgcccgacatcgtcgtctgcgccggcctcctcaccgttcttgccttctccgtggcgtacgcgcacaccatcatagtgtgcaacctcggcggtgtcatcgccgttcttgaggacatcgccggagtcagcgcgctgcgccggtcagtgcagctgatgcgcgggcagacgcatgtcggcttgctcatctttcttggatccaccattggcctcgccttcgtggaggggctgtttgagcacagggtgaagacactgagctatggtgatggctcatcaaggctctgggaggggccattgcttgtcctcatgtactccttcgtgatgctcatcgactcgatgatagtgtcgtgttctacttcacttgccgatcatcgagcatggagatcttggatgatgagggcggctcgattgaggagcttgagatgatggtgggtagcaattcagggg

SEQ ID NO: 11802 - DNA, 641 bp, Oryza sativa
ccttatcaccgagttgacgtacgagctcaacgggtaaggcctgaagccggccatggtcagcctcgacttccacttgccagcagctcatgcctctccaccctgtccttcccctcgcaggcgatgatgttgacgatgtccttggcgaggcagtgctgctccacgctgatcctctccttgttgtcccgcggcaggttggcgtcgatcgactcgaacatggcggagtagtactccatggtctccccaaacctcatcaagaaaggcgttgtgttggtgtgtgactcctgctctaccaaagtagtcaccttcggggacagccctttcaccatccggagcagaccatcgcgtgggttgttgacatccacgctctcgtccggggtgtggtgtagctggagtgtgaagtttacagacagtgcttcacctggcctgatctcaagcatctctttcgtgacttgtgtggcatagacagacagaggcgtaaactccagaggtattttgaattcttcagacatgcttttcaacattttccccacaatgtcaagaccttcaccacgagcatactctgacactgggtcatctatcccggtgatccgcacacgaggaggaccaccaggccttgcagctaatgcttgtatcagtgtgat

SEQ ID NO: 11803 - DNA, 5475 bp, Oryza sativa
tgagtctagggctgtgtttagatccaaaatttggatccaaacttcagtccttttccatcacatcaacctgtcatacacacaacttttcagtcatatcatctttaatttcaaccaaaatccaaacttccccctcaactaaggttgcgtttagtttagcgaaaagtttggattttggttgaaattggagatgatatgacttaaaagttatgtgtgtattgatgtgatggaaaagaactgaagtttggatccaaactttgaatctagttgagggggaagtttgtattttggttgaaattgaagatgatatgactgaaaagttgtatatgtataataggttgatgtgatggaaaaagactgaagtttggatctaaacacagcctagatgcatttgatgcatctgctactgcactgcagctgcacagttggtaatctgtccttaacttgactggatgacaaggaatttcctcgtaataatatcgcttgcactgtaatcaatccatcgccatctcttcaacgacaagatatgagtaccatacgagctgagaagcctgagatagaggagctgatgtgacagcactcttgaaaggcagaaaaaaaaaagccagcagcatcctccccttttttgtgccatatttttcaaaaattaatgattctcactttctttagcagcgcaaacagatttagtaaagaatttataacttaaagtttgtactgacaaatattctgagtataataaataatttagtaaagtaaaatataaaaccttttcccactgttttggctacagttaattatatactataacacttattaaaggtaaaaaattatgagtaagacttttagatgtgtattacgatgaaaaggcatcaaaaattcaaaatcaaatttctttcttagcaaacaaaagtattctctttgctacttaaaataataagtagtactatactattactttaaaaccaataaaaaaaataaactacaatgaaaagcataaacaatccaatatcaatactgaaattaaggtttgacattcacttttttactgtgaccaagttgaaaagcaaacgccaattaaaatttttcggagcacattcgttccagaaaaagaaaagtttgcgctttgcagagcactcgagccagtaccactcctcccttttgttctccagcgtccaatccgcatcggcgacgacgtcatcggctaaccgatgggccccacgaagcggaactcaggattcaggaagtgggtgggggcccactgggcagctgctcgtcggggatccaagtcatccgtaacgcgtacggacgtggcaatccgagttgcacacgtggccttctagaagcccgagttccagcccccgttcacacctcaggcctggctgtcttccccaattctcccttttccttccccaattcttctggtcatctcatctggtcatatggggtctcgtttggttcacggaggcattgatgcgtgtgtgagtgtgagatgcggtcaagttaccagtttttgccgctcgtggttttgaaaaaaaaaaaaaactgcaaaatccgctgcatcagaaaacggcatttgagtgcatatgaattccaaattttgttctaaatttgaggagaattcgaaatttcgaaccaacggaggagaggagagagagagagagaggcatcgcattctctcgtcgaaatggagggccacccaggcaaagcaaagcaaaaatcaccctccctatcggcctatcgctcgcctcacgccctcaccctcttttgtcggcttccccgtggtgggtcccacctcccaccatccttactatcccccgcgcctcatcggacggtcgaggaagcgagcaccggcgacggccgtccgatcccgatccgacggacagcatcgccgttcaaaccccccatccacgtcaggtcaaaggcgcgaccgcgtacgtgtccctgggccgcgccgcgcgagtcacgcgtgccgtggcgctcccctcccctcccctcccctccccgcgcgccgcacgtgagagggcctctgcaccgtcggatcgcgatcggacggccccggatccgccgtcagtggcacgggcccacggcgtcacgacgcggcagcgctgaccgccgcggcgggggagacggggccgtgacggcgtcaggatcacggcgaggggaaggggagagagagagagagagagagagagagggggggggggtataaaatgcgtggcacctccggctcgggtataattatcgcagcacacgaaaagagaaccagagagagagagagagagagagagagagagagaggagtggaagtggatcggggcatcgctgcggcgtcggggctgtgcagatcggaggaggtgagagctctcgtcctcgtaccatccatctcatcggattccgtgctgccgtggttgctaattttggcttggtttgtcgaattctttttgggctttttttggggtgctttttttggttggtattacccggggtttgcttcttgagggtgaaggcggcgtctccgagcggtttccggtggaagtctagtggtttttcggcgaggagatgggtttcagttgggtgagctaggtttattggacgaatttgttggggatttctgttggtttgagccgattcgatcgcgtccgagagcattttgctgttggggacgagagggcgcctccattttcgggattactgagtttatcctgtgcaaattttgcaaaaaaaattctactaattttggtccgtttcataggtgaatcgtcgcttattgagtggttcgttaggttagctcttaactgcgccgcttgcatttgttgccggaatttattattatctactccacgggtaactcgagggcgtgaagtgaaagctaattatgtcgcccaaagttactgatccctttttttttttgttgaaactgagctagcttaatttgcctctgttggcttgtggagacatgatgcagtacaaccaagtagcagcaacagtttttgccctgtgaaacactggaaccatgatcccccttttttgtgtgtgtttgattaggacataacttacaaaattctatgtttcacctgattagtcaattggcttacctctcctcccgatgacaaatccatcaaagaaattttcttgctggggggtaaagtgccactggagaagaacaaatcgaggttgttctgtgacttggttgtgtagttttatatagtttttagcattgtcaaccaggctccaggatcccagaaatttcactcctttgcttactgcatagactatacaagttgccctcttgtttgagcgatgaaggcgacgttgattccacacggttgattggtcaaacctcttgttggcggaggtaccttcttcagaattcagaggggtgatagaccaatagtcaaacaactaggttggtcaatgatcaatcgtcttcatccaactagagaatcttatagcctgcttgtgagtagtcctaattgtgtattttggaaggatcaaagaacagtccacgtcaattgtcttcaaccaactagagaatgtttgagtctgcttatcttaattgcaagggaagtcgatgaatattttgatgggggatgtataactttttttccttatcttttctcctgttgtttgctctccaaacctcattgttaggctggttctcctcggtagtacttagaatagcttcatttctccagagcttgttgtcctctagttgtatgctatgtggctgagcttgacattctggctagattaattggagttatgtgggagtgattgggatatttcatagataatgttcttcttttggagttgcgagcacacggtatgtgatgcaatgatggacttaagtaagagaatcgctatcagtttgtcttgatctatgttaaataagattagaatgaagatctaatactctttagtctttaacagaatagtataacatggtagtgtgtaagatcataacgtgatgggattctagtcaattggcatgttgactctggaaggcgaactcttgtcatgttggttgtttgcaatctttcttcctatatgatggtacatgctggaaattttggatcttaagctttgacccactcatgaattcatgattgacgatcacttcttttggccgaaatgttcgattttgacttctgtggttctcctttaagcttgaggaaagaaggatagagtgatgacggggacaccttgacagagaaacattgcggtttatgcataactctagagagctactttacaaattgtgctctatttatagatgaatgccaagcagaaaattcactaaattgttttaagtttgttttgataaaataaaaaaaagtgctcgagtcatgaatgtttaattttggtatttaagaaatcacggatgctgttgccgagaattctttttaccttgttagcattaatttcatcatgatctgaagtagctctagcttaatttggtattctttgttagctaagacatgatatttcctcttttggtgcatatgcaaattcctatcttttccccctaaaatctgcaaatgtttaatcagatttttatatgccatctcaattaacatttatatactgttatggattcatctgggtaaacttttttagtcttatctcagtctggttgattcatcttgttccacatgtgacatgtcttgataatgtagtgacagacaagccatttatgctaatttcatacatcctcatgataaccgggctgcgtttgtgtgcaatgttggctgtctgtttgatgtgcttttctttctttctatgatttatatgtttgtaatttgcactgatagagcaaaatgttctgttctgcttgtttgtttttaccacctcccatggaataaatggtttatagtttccttcttttgctatgtacaggtcatgaacgactaatctccgttcatttattatggacttgcaccagttattaaagtacagattgactggcgctaacgttgtgtacgaaattcctacagagaacaacttgcaaaactctccctggcaagctaacccactgaagtacgagttcagcgattccccatacacccctctctcttcccaatttgagtgtgacaatttgtctgctcttaccaacactccagataaccagagctctacagaaaccatttcagcccaaccaatctccccattggaagcagacagctcatatagacaggcgggtattcttctccaggagaacattcaagtgggagctgatccgttgtatgctacatcaagacataatatgcaacacgccttacgggagattgagactgttctgatggcacctgatacagatgatgcaacaactagcaccaagcatgagtttgaggaaatcaagcctgctcagcttgtgaggcagcggtcgagaacatggagtcatgaatcacggcagccgttacctggagttggtcggtcacagtttgcatctggtggataccccacagcaagctatgaatt

SEQ ID NO: 11804 - DNA, 13115 bp, Oryza sativa
taattttgatttttacatatgcttttacctttattttatccaagtttaaatatatttgtgtattttttatgaattgtaaatttatttcatgttttggatagaataatttattctttaaccttttgtattaaaataatatataatttttgaataagtagtaagcgagtgacaagaaccattggattttatccatgtttaaatattttttgcgtatagttttgtattttatttatgaattgtaaatgtatttcatgtttaggctagaataatttatcgtttaaacctttttttcttaaaagaagatataatttattttgaataagtagtaagggaatgacaagaaccattagattatcactaaatggatttttaaaaagaaaaattgtaaaagcttcaagcatttttttaaacacagaacaaatgcaagtgctcacagcgtgtgcacaccctacccttatgagcatatttgaaaggctgggtcggtatatattgagattggtaaactcatcactggtatctcgctgtcaatgggtatgttacctatcactgaaagaataattagccgtaaatacgagcacccgtgttaagtgtacgacttgagccgaagtgggttagttccatcataagaaacctaatcaattgagttacgctcaccttgcaaaagttgagtatcgagatcacactctattgcctaccggagatgtgtagtggaagtaccactagtcgagatggctgacgagcacgcatggaagtacggaaaaatagaaagtggttttcattaaaaaaacataaaactctttttcttcagacaaatttcataggaatataagtgcaacatcaatttaaatagacatatataagtttaactgtttaagaggagggcatgtggtctatataaatgttctacttactccatcttataacaaatcaacttacttacatgaatttagatataaatgtgaccagattcgtttaaaaaagttaatttgttttggagtggaggaagaagtaggtgatcagtatgtgtccacgtacatacacatatgtgccccacggccacattggcagctaattaaatgtaattatggcgaacgaccaggaagtagctaggaacagcaatatgcaaagctttgccctaggaagcagctagcctatctcaaaataaaaagggaagcagatagccgacgatgcatggcacggcacggagcatgatgtttgtagcgtgtatgggcgcccaccgattcatttcatctgtatcgtccgcacttgttggtcgttgccctcgtgataagcaactaacctagctcgtgataatgatgaatcacaccaccgtccaccccacacccacagtcacacgttcacgtgaataaatgaaaacacaaaacagaacatgtactatgctaaaactagtactaatctactactataccccacgtcccaaaatataataaattttaccccctccatttactttttgatagttatattttcaaatctaaaaaaaatatttttgataggtatattttaattcttaatgactttttcggatttaatgcgtgactctccattcttccacacaagattggctatatggacatcgagaaatgtaaatattaatgaatcgtttgtttacgagaaatgactagtagtatgtttaaatagatgataagtagaattacttatccttgatctgtgtgccaagatgaaatatgactattaaaaatagatggagtgagtagcatttaagatttatcacaaaatataagaactttttcattaacattttttccccaaccaatcacaatcttctaccattcaatttattcacctttcctcacttctaaaccaatcataatatttctctattaaattacaagggcatctttgaatcgcagggttgaaaaaacggtggaataagaaaaacacagaattctgacaggaattgaagtgtaaaacaaaggtttgcaaaacacaaaaatgagattgtaccgcataaaaaacgtaggaatcagatgaaaaagattgactcaaaggaaatctacacggaatgtgttattccatatgaatttcatcggatttgaaaaactacaatattttaaattaaatggtcaaatagaaaacaatttataggatttaaatcctatgaaatttctaaataaatcctttgatttcatggagccataactttttcttcgcacctatatatattttgttggacagagatagtactattagctcgttgatcgatgccgttatccatgcatcttactcctgttcatccgtcgtcacacccaactctttgtgtcccaccagatcgggtgtatcgatcgatctatccgtgtagaaggggccggatatgtactactctgatcctgtaatctacttgagtatagttcaacgcacatcgcctcgtgcggatcaaatctgtgggcatgatcgatcttatgggcaatttggcaccctccgaatcccctgttctacacgtatctggtatacatccatccaaggcatcaattttagcgcacgttcccagtttcgccagtgcggcgccaagttgccagttgccctcgtcaaatcgccgaaaggctgcccatccgccacgtcccgatccaattttatccaaacaccccatgatatccgagagtccacgagagcgaggcataggtgtcgcatctaattttatccacgtaagataaaagacgacatgcatattatattacatctacactatctttaacatactaacccaatgattttattttatttgtttgatcactatactctttcttttttaagtttgtatgtatgctacttctttcaatctactcatatgctctttccttacttctcttcgtcacctcatcatccaatccaatcactataaaaattgattttcctatatgagcccctggttagattccagacagtccataacagaccgcgtctggaaaaaaatcatcctcccatttttgcatacggacccttataaggaccgcacatgaaaatcgattttcgcgtgcgggcctctttaagggtccgcacgcaaaaataagactattttttgcatgtggacctcttaaaagactgcacgcgaaaatattcgcatgcggacatctttaagagcaccgcacgcgaaaatacgggcctcttaagggtccgcacgcaaaaataagactattttttttgcatgtggacctcttaaaagactgcatgcgaaaatattcgcatgcggacatctttaagagcaccgcacgcgaaaatactctccctcctcggtcaaattttcctctcaaccacttcaaaaatttctatattatcctcttcacctactcatccttatcctcatttcttctatctctctcgtcactcgtctctcacgggtggcggcgggctcggcgggcgacgggtgcggggcagccgagagcagcggctggcagcggcagcgtggcctcccatgcgggctgtggccaggaccagcggcgggtggcggcaaagcggcctcgcgcacgctccccggcagtggcgcccctcgcccgcctggacatggaggcagcgcccctctcccacccggatccggtagtgggcggtggcgacatgaccgggagcggcggagggctcggtagccgcccgcggcggccggtcgtggcggaaggcagcgacaccgacaacggcggacgacgacgacgacaacgacgaccacgaggagggcggtggctaggtttaaggtttggatttttttttttttttttgcgtgcgagtgatataagccacccgcacgcaaaaatcagattttcgcgtgcggatgcgtcaccggcatgaaaaaatcggatttttgcatacacttcggtgtagatgggcgggagatccgcacgcgaaaacccttttcgatcgcacggaaaaaatgttttcgtagtagtgaatgtagcacttttagagcaacacgtcaaacaatcttataatacgaatttcatgcaaaaactccaaagaagaattgtgccacgtggcaacaccggtttcacagaacggctcgatcctgcttgcgcgcgtgcagcgtgaaacgctcgtgtgcgtgcgtgcaacgattgtccagaaggtcgtccagaagtttctatcgatggagcaattaggtccatgggggcacagcagaggctatgtgatttctcgcgtagtcgtgttgcgccgtacagctattgcttcctcctaccaccggatattgaggattaaagaagtaatgatacatactttggttagggactaaaagaggattaacatgatgcaatcaaatcacccactaaaattactacgttgcaaacatccatccttttacagtgcttgtgtttccttattttgtatccgtgttcatgtgatttatattatttctttcgtgtgttttcctctaccgaaatcataggaccttttctctttggggcaattttattctttctcctactttaatgtttaatattgatgttgcccagtattttagggttttgtttttgcccatggttttttaaataaagataaattttgcccctacttttgatggacagattaacgatgttaaatctttagcgagaaggcattcaatacccttgctcatgttgcaaacttcccctgtttttatttatgattgagaatttgcctacatttagcacatgaaccttacaattttgataaacttttaccaatataataattttgataaaaatatcaacaaatgtattgcctacatgtgccaagctgtcatcgtcacctcctctcacgaactgccaccaccgttgttgcctcctcttctcaccaagctgccgctgcctcctccgcacgtcgagccgccaccaatatcatctccccgtgctaagctgccattgtcgcctcctcttctcatcgagccaccgccactcctattgacccgttgtcctcctccctgtcgcctccttgacacgtcgagcagccgcgccttctccctgcgctgagctacagcagccgccattgtcctcctccctaccacggcctcttgcgcaatgcctagccccctcctgcacgctgtaattgggttgggtggcctacacctggccgggtcgtccccgttgcctggccggcccacggacactgccatcactatttcacaacggggattcgggttcgggaagggaatagttgatgccaagtgcccaagcctggaggtacaccaagcggtacttgggtatttttaggggtaaaagggtcgatcaataatttaaaatatcgttatctctttctttctctaattctttaccgcattaagtccaatcccactcatttccgtcaaactcattcgtttaaaaaagggcaaaaaacaacaaccctaaaatatagggtaaaatcggtattggatatcaaagtaggggtacaaacaaaattgtccctttctcttttctccctcagtcaaatgcaacctatatatgtcttgtaagggctactttgaaacgaagattgtgggatgaataggaaaaacatagaattctgacaaaaaatcaagcacaaaacaaataattataaaacacataaaaatatatgaaatcatcatttgattggaccgtacgaaaaatgcaagaatttggatgatatagataaactcataagagtctttgcatgatattggacctcacgttaaaaatactccaaaacttatatgaatttgggcattccttagaaatttgataagattcaatagtattcaataatcctttggttcaaataatcatatagaaaaaaatattgtttctatacagaataaaagttcctatatttttctatatttttctttcaaataaaagggccctaattagttactccactaaagttgaatgagctgggttcactttaccatgcgtggcaaagccacgcggtttttctagtatagtacttattttgatgcgtcgtagccttgccaacgaatacacacgataggtcccattattttctaataacacgtggattctactttagttttcattagtatattttttaaactactaaacagtatgcttttatgaaaaatttctatagagaagatgctctaaagtatcaaataaattagttttttaagtttataataattaagagttaattaattatgtgataattataatacaattaattatgtgataattataatacctttctcattttcatcttgtacttactcgtgaatccgcgatcccaaagcggggcacggcagccatatctattaggtcacttccaatgagagttccggtgcgacgttagcaatttgaataatgtgctaaggattaatgaagtgagagataaaataaatttcatctgaatgaaattacgactatattgtttccaatataacttgtctttttttaatacacaaaagaattgtgcatatttgtactaagattttgaaagacgtaaaatgtttacaaaattatattcctgagagtgcccacacaaccaccacaccctgaggaaacacaaccacggccaagaacctcaaaaaacggtgcatccaataagattccaacactaaaaacacctccaacgcccagcccaaaaagatatgtttttcacctagaggattctattaaagaggggaaaggaggcacctcgacaacactctcaagagtgttgcggcgctcaaatgcatcatcattgctggtccaaagttgcactggcttttgtctggaacctgtttgcacctctcttatagcttgtctattgcatgtattgtccataaagacaacaaaattgaaatagttcattatggaagatattttgatcatcaattaaacacattcgccctgtttagagaacttagtattttttagcacaaggaaatagtcctttaataaaatatccctaagttgtttagatccaagagtattttgagagctatttggcctttaatacattttcccatggagagagggggagagaaaaaacacttttcagtgagccccacccgaaatagctctcattaatactcttgatggggatagttttttttaaatagccgtgaaatagcttaactgtttaaaacatgtgagctttttcaggactatttaagaaagaataaaaaataacccataaatccgaacagaatcattgttgctcatatatgatgccttgggaatggaccttatccaaattggaagcacgcaagcacctggctggctcctggctgtggttggctgggtcgatgtggaccaacgttgttcgcgtcgaaccgtgcgctgttccaaccgctgcgcatacgtggcggcccgagttcctaggtgggtccgcgtggcgcggcgtttgttggtgacgtgcgcgctcgcgtgtccgaccgtggagcggctggcagcgcgtgaggaagatgcagtatatgtgaagttgtgaacaggtgtgagcgcctgctaatttcaccgatgagccttttgaccgcggtcaaacaccgtcgtggtattgtgatgatactagtactatacgtgtggtaatgtggtcggcatcctgttaattttgaagtggtcggtactaggtcggtaatatggtcggctaacgcatacactaagtatatactacctccgtttgtttaataaataacgccgttaactttttcttacatagtcatatatttgaccattcgttttattcaaaatatttatgtaaatatattttcttttatcgtggtttgatttatcactaaatgaactttaagcatgactaatatttttaagatttgtgcaaaatttttgaataagacgaacggtcaaaggttgtaacaaaagttaacggcgccatgtattagaaaatggagggagtaatttagtttgtacaagtatatttgcttggaagtcatttcaatggaaagactaatccaacatgtaagtagctttttccttggaacgaatatatacaattaagcaacttgtaactgcagattagtagtattttttttatagtggtagcagtaataaagatttatgaagtctctaaagatactcatggtagcgagcaccatccgtacatgtgcggaccgtggacaagtaatgcaccatccgtacaactgacatggtactccctacgtaaaaaaaaaaggagataatgaatttggataaagagtagaccagattcgttatgaccccttataagttgatttttttttgacgggggagtacaccagaagtagcttcacggtaggctgcgttcgttcacgtaggctggaaactcattccctccgcacggaaaacggagcagtctattagcgtgtgattaattaagtattagctaaattttttcatggatcaatatgatcttttaaaacgactttgatatagaaaattttgacaaaaaacacactgtttagcagtttaaaaagtgtgcgcaagaaacacaagggagatgggttaggaaccctgtgcaaagaacacgacctaagggcccctttgatttgtaggaaaagtgtaggaaatttgaaggatttcaatcctatgaaaaaaattcctatgaaagcctttaaattcctatgaaaaacaaaggattgaatcctatactatcctttaaaattcctatggaatggctaaccctatagagattttggaggaaagttagcaagaggtccaacctcttgaaaaaattcctttgagtctatctctctcatccgattcctgcggttttcctgtggtccaatcaaacggtcattcctgtgtttttcctgtattttccaatcctctgttttacacctgtattcctgtcagaatcctacgtttttcctattcctccattttttccattcctgcgattcaaaggggcactaagtagtacttcttccgttctagaaaaaaaaatcaacttctagagtttgaattttatcttacaaaaaaccagtttctaccatcctactcctcagcacgtaaaacgagatgttttatcccttcaataccctttacctacctaccaacttctattttaataattctccacctatactaagggtctgtttggatcttccaaaatggtaaaagttttgtcattttgaagcactttttgccattttagatctaaacactagtagcaaaagttggcaatttggcatttggcatttgctagtccatggtagcaaattttgccaaaaagtgctccgggaccacaccctctctctttagtgctaaaatagcaaaattttaagatgcatataaacaccaattagtacttttgcaatgttaaatcttttgctaccaaaacttttgttatttgccatttgccatttcaaatggatctgaacatgccctaattccaccttaggatgctaggaatggatatttttgagacggagggagtatgttcaaatttattatacgaagaaatatcgtcacattttgggttgatttttcatgtaaagaaaggagtagttcttgctttggcctcgtcaacaaatttcacaggtcctctccgtctgctgagaacaagctattagagcaggtacaatagcaggctataagccagctgcaaacatattttaagaagataaatcaggagagaaaagagcagcgggctatagatttgtagccagctatagcacggaccccaagacgcagtgtgtctatgacaggtaggactaggtattaatagtgtagtacgtaactattgtatgaatgagttattagattggccatagatgaattggagctagtagttggctatactattgaacttgctcttagcagatcagatcagactgagcaaaagcagattagggggtgtttagatggggctaaaattttttagcccatgtcacatcggatgtttggacgctaatttagagtattaaacatggactaataaaaaaactaatttcataaataagagctaatccgcgagataaattttttaagcctaattaatccataattatcaaaagtttacggtagcatcacattgtcaaaatcatggcgtaattagactcaaaagattcgtctcgcgaattagtccaagcttatagaatggattttgtaattagtgtatatttaatactccaaattagtgtctaaatatccgatatgacagggatttagaataagtcgctggaaatcatacagccctgtcccaatgtcactgcacacgtgtgctggcaaatgtctggtcagtgtcagacacccacagaccaacgctcccgcgtctgttcggcccgcctaaccatgagcatcaattcagcccaaaagtgcgcctcgattcggcccaaacgttcggcccatatatgggcctgaattcggccgtatgggccaaatgtcagcccatccccgagttcccgacgagactcgtcatcctcgacctcgactccgccgaccgccgactccgagttcactctcaccgaggccgccgccgccgccgccgagccatggaacccggggtgggggggtgggggggtggcgcagctggtacgagagggagaggtggacgacggtggcggccggccttgatccggccggtggcagcgggaaaggggggagccggggaggtggcggcgtgctagatatggaaacacttcggagatggcgatggccgtcgaggcgcgcggattcagggtgggggtggtcgagctcaccggcggcaagggactcgccgggtggtcgaggtctccgatcatccgacgcggagagttgcttgggttttctgtttctccatggttggtaaataatagcaattccatcctggaattctcctcctcccattcccgagtttccgacgagacgctttggcaatggcggtggcgccagatcacgcgcccgtattcgtggcgctgccgccgcggattccgcgggatggacatggggaggaatttcccgggcttggacttgcctgtccttctcttttcctcccttgttcttggggtggggttggcggattggggaatcggcttcgagctgattggttttgactgcgccatccgatttcttcgcttttgtggaggggggcagcacggctgtgcatttcgttctcttgtcgtggatgcccccggaatttatccccaattctcgctatacttgctcgtctacatcggtgtgtttcttggagcatttcaagcacttctcgtcttcatcgatgcatttcttggagcatttcaagtgtccagcgtctaaatcgctcaggcgaatttggaggagcctttaggcgcattccgctcaaaatcaagtggaattgttgcatgaatcttcagattgttttggctggattgccaggtttcttcgatcatttttctctacggggctgaggaatttttcgccccatgcccggaaagctccaaaggggatgtttgccacaattttcagagtatctgtgttgagatgatcggtgtggtgtagaaggaagcacgcaaatgatgaggcattgtaggagagaatggctcctcgccctgtgcctcatctctgtgcagctcctcattccaacaggctgcgagggggttctcgtcgcggcaagcaacatgtcgccacctgctttgacaccactcctcatcaatcaagtagaccaattggtaagcacatttccatatattttgatgcatacgtaagcttcaatttgtgtgaaaataccatacaagagatggcagtagcagcttttgtaaggagatgtaggcatagtcgtgtttgcattcagtttcgaaccaagaattaggaccaagtcctttccaagtggatgtgggttgcaagacattaatcgggactcgggagtatgctctcaggagcacagaagcccatggcattccctcctatacttattacggtgtgtgtcgctaggcattaaacgggaatttgctctcaagagcacagaaacacatggcattcacctcctaacggcactgatgtttttgggtaatgcaggactcagggaatcaggattgattcatgaataggtccacatttacttatttgttgtgggacatgcagagtattcttgtactcttgtagtctcgtgtttcccaaattgcatgaaagacagacgaataaggttgctgaagtctgtaggtgattcccaaaggcaaccatgattttatttgtgttgtgtcttatagttttttttttttttttttttggctttggatgacagatcacataaggttaacctttctgtgaacagagttttgaatcattttcttcttgtgttttatggctgaggtagtctgtttgtttttttagaaaatggcagcctctacatccaaaccagtctgataggtgtgcaccattgcattgattgtgatggtgttgtgatttaaacactggcttaacagaatcaaactgttaaatttggcttgcctccttctctcccctccccctcctggcctcctctctcctttaacagcaggtgctagattcctccttgttatgacatgacaaatgaagactcggagagaggaatgtgactagtagtgaatataattattttcgatccaactagtagaacctaacattttgtggcatcaatggctgtttaattcctaactggtgaatgttgccttttgttggatatgactacaaatgttgggtatatccttttttttaaaagaaaaaacattcgtactgattagagtgactgttaattacatttcatacaggtagaacatgcatgggtcaagtgtggattggacaagagaactcttgaagatgttagacgccacttcaactacaaccatgtattggcaattctccgtagaatgtctgggcaagacattaaggacacctctcctgacattgatggagggaccagtgtattatcactagaaaggagggacgctatactgaactgtttaagcaagcagaatttcatgagtatcgctggacaggatggtttaaaaatcttgtccgctgattatatcaaagcacttattgcctcacttagaacagaccttgctcaggaatcttcaactacaaagtcaatacctgaacaagcaggaaaacctgtcccagggaaaacttctacaccaaaacctgtaaacaaaccaaccgacagtgtatcatctccaccagatcgttcatataaatcagctcctacagaaaaggaaaaccctcctactaaatcagtagcggaaaagaaaaaggacagcagtggcatgccaaatgctttcattggtttgt

SEQ ID NO: 11805 - DNA, 6807 bp, Oryza sativa
  unsure (1)..(6807): unsure at all n locations
gcgccccacgcctgcgccggccgccgccaactcccccagccgctcccttgtgccttcctcgctgccgcggcctcctcgccccaccgcgtccccgcgtccccgacatgtcgtccccactgtcgatgcggccggcagctacggccgtccctccccccggcacgcgacatccctgcccgcgccgacagacgccgccttcccccagccgctccctcgtgccttcctcgccgccacggcctcctcgccccaccgcgcccccgcgtccccgatgccggcaccaccgtccccgcccttcaccggcactaccgtccgatggggaagagaaaaagggagagaaaagatagagaagggagagaaagggaggaggaagaagggttgaagagaaaggatgatacgtgggccccacaatatattgtgtgtgtgaatgacagatgggtcccacatatatttttttaattgtaatgctacttaagcgccacgtgggacaaagactgggtcagcgctgccacgtcagtaaaaccgccctccaaaaccgctggaggagtcaaattgcacttgtttcaatagttcggggagtcgtcatatccggttttttggttgaggggtacgaattagattcggcgcacaattaagggagtcaaagtggactgttcctatacttattccatccattaaggcccactctaaagaggtgagagaggtaatatagacttattagccacgtaggcacgacacaagaaagcgaggacaaaaaatggacttattcccaggacgagcatggtgggcctgtcgccggccccagtgttattggactctgtatgggccgtaggtgcagcccgtgggctgacacggcacggctcggcgtgtcggtcggcccgactgatatcttgccttggtcgtgcccagaccgggccgtgtatagcggcccatttgatcatctgtagcctgaagcccacattgccacggcccaataaatcgcgcgatgacgactcgaccaccggaaaccccctctccgcatcccacagccacaagcggcgccgcaccacttcgtcctcaaccaaaacctccgccgccgccgccgccggagaaggaggaggaggaggagtagggagagtaagcggggagaggaagatgtcgttccgtgcgcgggagatgtacaagaaggtggtgcggcgcgtgggcggcgaggggaagctgccggcggagctgatggcgtcggtgaagaacttgctgcctgacagcaaggtcgtcatggggagggccaagcgcggcatctacgccggacgccacatccagttcggcaacaaggtctccgaggacggtggcaacaagtaagccatctcgcccgtgcaaatcttcactactctactcgtcgtcggatctatgcgcgtagatactgtagggttgagttcgtggggtggaataaagctgtgtgatgcaacgaggtattccgaatccagatttggttggtttggattggagagaacacgattgcgaggacagtggttgagggtagtggtcaggagagaaaactgccctttgcactgtattggtttgattgcatgtctaattgatttgctcctagttactgacttagaaatggatgtgttgaggattaaattgggtttcatcctccattctggtttaccttagtagtttttaccaagattgatagagttattcatgtttgaaatgttcaaacctacacaatttgctagttattttttaatgatgtgcaaattgttagattaccaaaatagaataggtagcttgtttgcactcttttttgctagtgtaaatgcttgactagtatgttgcttacttgcttcatccattcactattgtacaatttggttctttgatcataatatttgaaacttcaactatcagtttcttttggaacgagggaaatgataatccacacaatcttgttaaatcccactgttcacttcctgaactgccaccaccatggcaaactgtcagaatggtttcatgagtcatgatcaacatgtgtaacctcaagacatgcaaagctgcttacttaacgattcctctaggcttgcaagttgcatcctttgatcaatgtagcacatctttaagtatctggagctgcattctggatctctttaagaagaaatgatttttttttcttactactgtaaatgtgtaattgtgcatttggcacacttaaaaatctccttgaaatttgtgtattcaagatacttccttttaaatttccatagttcatgagcctttcattaaaaaaatattgctcttgatttccccctaaacgtatttgtgtccgtggtagtttttgagcaatgtcttattttgttcaggtcaaggcgaacatggaagccaaatgttcaggagaagcgtctttttagctatattcacgaccggcacattagggtcaaggtaaccacccatgctcttcggtgcattgacaaagctggtgggatagacgaatacctcctgaagacaccttacaacaaaatggatactgagatgggggtagcctggaaggcaaagattgagaagatgtattcacagctagctcaaatggaggtaggcttcttctctcctgaggaagagactaagatcgaacagggttttgaggaggctcgagctgccaagagagagcaccgcagggaagcaagaagagctttggctaagcagactcagctagaagctggtaacgctggtggtgacaaaacagctgaagctgcttctaatgttgcagtgaagtcctagcttggacctatctgctcgtcatgattggtaaaatgtgatcatatatcctcattttcatgaatcggcatcacctgtgtgctatatgttgaaagtctatttatatggcaatgccactttttaataaatcaacttcttttggaaccttggtgatattgctaccgcaaagttctactttttacgcctgatgatttaaaatgcgatgtgtggatatggtaatttatctttagtttacatcattgatgatcaatgtgaaacctctttatgactccatagtccatattagtaaaaaccacagtatcattttcggcatcatctcatcaaaggtgttacctttctttgtgatatcaaatcagtgaaggataaaagtttgtatgcacaacaacttcccttgctaaataccatatactttttttgcattttggattgtactattacctgaatatactccctctgtccagtatttgttgtcatggagaacaataaaactactctctgttgataaatacaagtcatggtgtctccaacattaaactttaaccattattttcttttgaaatgtattgtcaacaactgtacaacttgtatgccaatgaacatatacaccctccattcctaaatacttgtcactgaatactattttagcaacaaacttgtatatattaaaaaacatactatgctattgaaaaatatgtttcatgctaaacataacaattcaattttcgtccataaaaatatgataatttagaagctatcaatggtcaaagatgaaacagcactagtccatatgtcaggtaaaagcacactagtcaatggtcaaagatgaagcagcatgttactaggccaatttttagtccaaaatcacagagtttgcacattttgagttcatgcttgtcttatattaatcaataggggataaaattagatttcaaacccactgtatgcatgcagggggccttttgtactccaaataactcgacatactcctcttgcaggtcaaaaggagaatcattgagtgccactgaccaaataatggaggattttcgtttcatataaagcagggatcatatgctgagtcagtaacccctgtttactggcagcagcagcagtgtatggtaagctggagtctaatactatcagcatgtgggtgttgtaagcagttgctgaacaaaatcagttaggtggaaattttgtacacttactgaatactcgtgtcagagttcagataactttcttgtagaattttgtatcttctactactgcccattcaacttaaacgtcgaaataatctatgcttgccaggatacgtggtaatgtgctacggagctatgccgtttttatgctgatttctgtttcgctgctatattttgttaccaattcaggctacaattcttacaaccaagaagaatgcttgacaagttacagatggcaacaccccaattaaattgttagtttggaccagcgatgtgcatatgcaagcgaatgctgctgggctagcatcgccccgatgaaattgtttctttggtttgacagtttttccttctctaaacttgtgatgtgaaatgatgcttctgaatatgaatgaattatgcgatgattttgttcagaacttttggatttctcccttgttttctgataatcgcgcctgcttggagatttagccgtcaacaacaactcaagattgaatcatacgtaagtgcttgctgatacaatatcaacatggagggtacattgccggttccatatgaacaaacataaaaacaccgaaaccccatatggccattatgccgatcctagcctagcttggcgaggacatcgccaagagcagatttggtcaacgtgtagtacttctccgcctcttcggggctcttgatcttggctgcatggtcaagctgcacaaatcacaaagggggattcttgtcaacaactcagctgagcaacagtaatactttttccgtttcatttcatattataaattgtttgtctattttcttaatcaaagtttttagctttgactaagtttatagaaaaaaatagtaacatatgggatataaattaattttattaaatttaacattgaatatattttaataatatgtttattttgtattgaaaatattagtatatttttaaaaaaacttgataaaacttgaagaagtttgacgaagaaaaaaaatcaaacgatttataatataaaatgaaatagagggaataataaattttaagagaagactctgtagtgaagtgaagctaaattagtttttttttgaaactaagtgaagctaaatttagttaccccgtcaatggtggcgaagagcttgccggtgaggtccttgaggcccttcttctcgtccttgggcttggagttgatgacggttttgaggtcgtagcgcaggtaggaggccctgaggcggaggtcgtccctgacgaacggccactgcttcttctcgatgagcggcttgagttgatgatgtcctgngccgactccttcgccctcgccgccgcctccgccggcggcagcggctgcaggtagaacctttccctcagcggcaggtccgtgtccctcgcctggtccgagttcagcgtcccagctatcaccacacaaatcaaatcaaatttgtaagtttcagtgagatattcgtgcgaaatttgtcaaacttaattaacggagaaattctacggttcttcaaaatatatcatgacacactaaaaatttaatataaaatttaatactttatagtatctcgataccaaatttacaataatacctcatgactctttcaaaattgctcaagttaataatactacacttacggagtccaccggagggcggtggcggggggccgagcttgatgggcttggcggcctcggcgagcgccgcctgcgcgagggcgccgccggcgatcccggtggcgacgaggccgagcacggcgcggcggccggtctggacgtcggcggcggcggcgtcggccctgacgacggcgagcctggacctgccgccggcgcgcctgggcccggccggcagctgcacgccctgcgacagcccggtcatggacgccattgcctgtgccatctctcaacctcagctcagacctcacctgactataagctgagaatttctctcttcagatgaaagaagcaaagtctcgagcgcgtggcggaaaaaaatatattgaggaggacgtgttggtgtgcaaccttatctgactggataagttgggggccagtggggaagcgccacgtggaccggcgagccgcgcgatggcctccgtccggattgcgccacggccaatggggaggcgacgcgtgtccgggagcgctcgtgtcctccactctcctttggcctccgttgatttcgatcggcggccgccgcgttggcgtggcagttggcaccgtggcggcagcggtaactcttcggatgatcgtgtggctttatccgatatattgctttcgttcgcacatggaggttcgccccggttgacgggtattttttagttttttttatttttattaatataacttttcaaaaaaatacttttaaaaactgaaccttttgttcacgctagtttggcaacgccagtcacggtgacgtaccttggtgtggcgtgacagagttatttggccacgccagacgggctggtggccaaaagatttagatttaaaaatattttcttggaaatgtttactaataaaacttttaaaaaataaaaggtctaaataataataatattaataagttctctgacggcgcctctacacttggatatgtattgggagcatttttttttacaaaatttgctatataacattaaagaaaatgtacgtaaatagataatggataccgtaagatcgtaaaaattctctcttctcagctaggtgtatatattattttaatctccatagtgtccactattaaattacatgtgttttgaagtgtctttcaaccgtttcacgatcttgcgatgcagctcagctaattacacgttttttcaatgttctatagtaaattttgcctttttttttctaataagagtaatggaaatatagtgactggacaca

SEQ ID NO: 11806 - DNA, 6310 bp, Oryza sativa
ggccttctaggagtctccgggttgtcctccactcgccatacttttccggaagatcccaatatcgactcggaacctcctagttgagaaataaagccctataaaaaggtcataactacatcgactcgggtaacaatgatatgaataagcattaatccgaaggttcaaacatagatcggctggagatccgatgtcataaaatataaacgcttagataaacaatgaaacctttgttgcgatcggctaaaaccaacttgtatgtaatccttataagccaatgtaacatccagataactcatcggctgaaacctcgatgaaacccttattggcaatcaaaaagcaggctagatgttatggttctaagcatgaccaaggctgatgcagcgcaaagtatgaaaaaaaacataatatctagacaatcaagcccttgactgattttcagggtggtggataccttagctaatctaatctggtaaagcaatttagccgatactagcataaaccctaaaatgaatcttagctgatacaagtaaattgaattaccaaacaagattaactaagatataagatagataggtgcttacattgacaagatcagagtatcgaagccctagccccgccgatgcaaacatccttgacaagtataaaatcgtcaaaaaattataaaggtaaaatagggtggtaatgtgccgaatttgtattgattgtggagataaattacaatacccccaggtgtacatatttatacccatgggtagatacgagtccttattggacaagaaagaaactttactaaagataaaaggaaaacataaagtccttatcggacactaaacactctttcctaaagataaagaaaactaacaaactctttttaattaatagataaactgtcatgtcgcatcctccttgaactcggtctcttgtgtataaacttcctttaattgattaatttccttaaccgaatatagcaaaaatccgactattggcgacttgataattcccatcggccgattcgagtactctaaaaccgatattaactctaagccgatgatgacttcggggcttaccaaatttcactgttaacaaaaggttccagcggctactcaaaccccctctcctctcctagatccgacagtcgatggatctggggctaggcagtggatccaagggctcggggtggtagggttgccacatgcgatggaggcgggaaacttggtcacgggaggcgggcggtggatcggggcgatggctcggggggcacgggcggtggagctcagccatgggcggcggatttggagatttcttttgctcaaaaatcatttttttatggtggtcaacttaacctagccacttgtgaaaatgaaaatcatttttcacaagcggtgtagttccgcttgtgaagatggctgattttcacaggcctttagttgctgatggtagtgccaaccgttgtagaaaacgtaaactggccgccaggaaaaatctattttgtagtagtggaaaaatggtgcgaagatggtgtgaactttactaggaaagaggttaaaattgttagatattatgtttatgtactcaatacaacatcaagtcataatataactagcaaacaatagaacatatggtttgagaacctgatttccactctcggatataggaatgagtcaacggaccgtcataataactatgtgcttaaatgcgtaacaatatgaatacacgatttccataacataataacttagcaagacttaaaagtgcaacatgacattaacaagtccaaaacaagcatccaatcagcataagataacatacatcacatgatacttatcatgtccaaatatgatttccataaagtattgttgttaataagttacaaatgtaaaataacaacacataggaaatgttattggtctgtggcgacgactaccacactggtatgagttgagatgatgacagtcttagatcaaagagtctagattaaatgatgaattgagttgttcgatgtgccgactcatgttgcatagaacaaatagagtggttacatgagctgataactttggataattcaacgtttaatctatcggttaatccacgtctgcaaaattttatggataccacatccttatttgtatttgtagggtactaaatgataaggtgaagatagagaaattaccacctctcatacaagtggcaacccccataggcggatcttggggtggtcccgatagttctggaacaaaaaaaaaatcctagtccaatgcatatatatacacatatgtgaaaaaaataacttttgaaaaagaaaaaaaacttgtttttaatatattatgatgcaaatttgatccttcatatttagggtatttaaaacaaatatatatgttacctatataaaaaattagatacaccactggtaacccctacataaactccaataaaaatgtgatttgagagtgttagagttgttgggaattatgtgttagaggtaatctataatataatacatgtatactcagatcaaattagagatagtatccacctttactattggaattgctattatgcatgtatactcagatcagagtagcgactgtttgccagagtgtcactgaagaaaaagaaagaacacccacactaaagacaatgatataattcatcctccccaaagacaaaccgacggcttttttgcacgacgcatcaaactgtgtcgaccggaagcgatccatcatcctgaatgagaaaggtgaacaatcttaccgctcacattattgccttttgattttgtcgacgcaaacctttaagtaaccctgatagtactgaaaccaacctctgcatttcctacaagattttccttccactgcaagcacactgacgctagcttaccagtacattacatgcacattgatataattttacatgctctaatcactaataattagcatctaatcgttcccatcacctcacgcacatcaagcaaaaatcacaccacctacattcgtcttcatcccatttctgcaggagaaatggatgagaagcaacgaatcgatcaagggtggcggccgccctcctcccgcttggcggcgttggcggaggcgtagtagacgaggcagaagaggccgtggacgaagcagaggatgccgccgatggagaggaagtggtggcgcgggaggctgcacttggccgccttcctctcggcgttcggcagcgcccccaggatcagcagcgccaaccccaccaccagcacgatcctgatcgaattcgaatcaaacacacacacaaaaaccactcaaatctcacctcaaaatccgtaaacaatttgctcctgcacgagcatgcgagaatcttgtactaggtgcatgcaggagaaagaagaagaagaagagaaagaaggtggtgtactgtaccacgagatgacgagggcgaaggacgccatctgccggttgggcgtggcgcggcggtcgcgggagcacgcgcaggagcacccgccgacgacgttggcgatggcgtgcgacgccgccagaacggcggccgccgcgacgccgagctcgtaggcgcgccggaccggctgcctgcactcgatgaacagtatcctcagccgcctcccctgcaaatttaaacctctcgatgtgccataaaccctagtactttggatcctgcttcttgatgtgatgatgcacgaactgaagaacatcttgacgtacgtacctggtgctgggctttctccgcgtggatgccgaggacgccggcgacgacgtccatggcaatgatcaggaggcagaccaccacggcctccactctcgccatggccgttgattcgtcgagcaacttcgcttgcttcgatctcttgggacttggggaggaggtggcctgtcacggaggtgcaaagatgggcgatgtcggcacagttcactgcttttcaccttcatttattcggctattttgcttttgggggtgttatcccaccccaaaattttacactatgtctaatcgaacgtttgaatactagtatattgtatgaagtattaaatatatattaaaaataactaattacatactccctccgtcccaaaaaaaggcaaaccgcaggtttgcgtgccaacgtttgactgtccgtcttatatgaaatttttttataattagtattttcattgttgttagatgataaaacatgataaatactttatgtgtgacttatttttttaattttttataattttttcaaataagacggacggtcaaacattggacacggaaaccagggtttgtcttttttttgggacggaaggagtagatcgctattaatttgtgagacggatcttttaagcctaattgcttcatgatttaataatgtggtgctgtaataaatatttactaataatgaattaattagatttaataaattcatatcgcgttttactgacagagtttgtatttaatttttttattagtatcaaacgtctcatacaacaccctatatcaaaactctacgatcctgatttaaacaccctctgtacgtccttgttttttcttctttttctttactgcacacctcacgaggacgacaggaaaagctaccgatgcaggcaggcctgtggctctgtgcttgattgagcttatcaaggagaaaaaaaatggtttgtttaagtggcaagcgacagatgccatggcttggcaacatccagcgctttggcaagcttgcaaatctttttatcttccttttttcgctttggaaggcttgagctttacatgatttacgcgctaattgcattgagggtaacattgccgatataaagtcgcgaaatctaatttgggttaggcccctttgatacctaggataacctttctctttttttttccgcgggtgcttaggaaagaaaatgtagaaaaggaatcacatgacgacgcgaaattaagaagaaatttagagaaagttggtagtttaaaaaaaacttaagaatttatgtgagtaggaaagttttagtgtgatgtgatggaaagttgggagtctgagggaagtttggtgtgagagaacatagtaagttgacgtgtatgattacattaacccatttcacttccctctcttactacaccgggtcacaaataaataatattttggataccaatagagtcatcaagttagtactatcagaaccaaaatatagcaactcgtaaatttaaactgtataaaaaaatagcaatatagtattacttttaaatgtgacatttttttaccactaaatcaaccatactaccactttgctttattataggcgcaactagtttaggcctaaaccttacaaataggttgaatgttgtttggaaagtttttggattccgaatctatttttaaggcataaagcgctgatcattttttttgaaacttttataaaaataacgaatttatttttttcaaagaaacgaaaatgaatacggagataaaataggcaaaatagacttattccttacagtagggcctaaccatcaccaaaaggcctgaagcccgacggccaggcccacgacatagagatttggcccgtaccgaccattgggccgtgcctgggcctttttctcggcataatgtgctggcccagcacagcctaacccaacgatcacgatcagcgggccgtagactgtaagcggccggcccaaatagacgagagaggcataatatacttatggaaaaagtccacattaactcccttaattgtacgccgattctaattcgtacccctcaaccagaaaaccggatagaacgactcctcgaactattgaaaccggtgcaatttgactccctcagcggtattggagggcgtttttgctgacgtggcgctgttgacccggtcttcgtcccacgtggcgcttaagtggcattagaattaaaaatttttgtgggacccatctgtcattcacaaaaaaaatatatattgtggggcccacatgtcatcctctctctccaacctttcttcctcttcccttcctctctctctcccctttctctcccccttccccatctgcggccgaggaggccggagacgagagcggtggcggcgggcgggcgagggcgtagacaatgaggaaggcagataggaggttggcggcgacgcccgcggagacgacgaggaggcgatcggggacggggtggttgcgaaggaggtccaggttgtcgggcgcgaagccggagttcgggtcgtcatcggggaggtggcggcaaggaaatggcccgactcgtgacgaggacaatggtggcgaggacggaggcggtggaggcgacaaactcgacgctagcgaggaggtcggacggggcggcggagatgga

SEQ ID NO: 11807 - DNA, 10963 bp, Oryza sativa
  unsure (1)..(10963): unsure at all n locations
aacttgtccggtataaaatcgcccactctgctgcaagataatgtaaaaatttcatctagtggtggtattaactctctcttttgcagctgcttttaaatcgtcccaaggaaatccaattgatgtcaataagcttggggtagtgtcgttgaaatcagaggctggtcaaaatggaaatgtgaaactaatttcgaaggaaggcacaaacaatgtgaatgtggtgcacccagtgagttctgtgtcagaatcaacattgatgccacctccggaaggcgcaaacaacgtgaatatggtgcacccggaaggcgcaaacaacatgaatgtggtgcacccggaaggcgcaaacaacgtgaatatggtgcacccggaaggcgcaaacaacgtgaatgtgaatatggtgcacccagtgggttctctgtcagaatcaacaccgatgcagcctcctgtgatgccacctccaattccgaagcttctttctccaccagcaccccaagctcccatgccaccattaaaggcttctcctgttcctcccccagaaccttcaccacctcctgctccaaaagctgcacctccaccgccaccaccaaaatctactggccctggcccacctcgcccgccaccgccagccatgcctggttcttcgaaaacacgcccaccgccacctcttaagccaggcgctaaggtgggtgctgttgaaaattctaatgaagctaaaacaaagctcaaaccattcttttgggataaagtaactgccaatcctgcacgatcgatggtgtgggaccaccttaaatcaggatcattccagtaagtcttcagattaaattgaagctgtgcctgaacttactattgcaagaacacactagtttaaagtatctgaactgtttcacaggtttaatgagcagttgatggaaaacctttttggttataattcaactgacaagagcagtgacaccaagaaagatttatcatcgaaagatgccactcaactcataaggatacttgaccccaaaaaggcgcagaacctagctatatcattgagggcgcttggtgtttcacctcaggaagtatgtagtgcagttaaggaaggtaaagttcatcctgtatggaactcgtcttttttattcttagcacacactcacagtgctttctagcttcatatttatcatacatacagtatctttgtaaaagttggagaactcagctatgatggaatgctgatgctctgaattattatcagacttctagtttactttgcttgcaataatgtatatggcatacattgtagatatgtgcctatttcaatttagttttcaaagtgacgagatgagggttgctctcttctgagctaagggtgacaagattaactttttttcaccaaagcgaattgtgcaaaagatatgataagtgaaatgattcatttcatctacttcaaccgctactattgagaaatgatttacaggattatactgcaaatagatgcatgttactagccattagaagttagattggtttctggtatacacaaatagtgcctccaaccattttgtttcaagaatttgatgttggatttcaccttaaccatttttcttgccaatttgtaggaagtgaacttccatctgatttgatacagaccttaataagatggtccccaagtaatgatgaggagctcaggcttcgattatacagtggggaactctttcaacttggtcctgcagagcaattcttaagagtaatcatagatattccttatattttccagcgcttagatgcattgcttttcatggccaatttaccagaagaagcttcaaatgtgaagcaatcctttgccactttggaggtaatgaaagattcattgtgaactctcaacttctagattatctcacattgttgtgccagttttgttcagttggcgatgtctagtattctattgatctaacatttccatgaagggttatatccaagtagttagttctgttacaataaatgcacttttactgcacagtttatgcctagcgatcggattcttaaaatatgagcctctgatcagttatgcttttaatgaattttgttccatattgattactattcttatctctgttggcatttcaatcccaatcaggtggcttgccaggagcttagaaacagccgtctttttatgaagttactagaagctgtcctcaaaaccggaaatcggatgaatgttggcactttccgtggtggagctcaggcttttagactcgacacgctcctcaagttgtctgatgtcaaaggaactgacggaaagacaacactattgcattttgttgttcaggaaatcattcgttccgaaggtgtccgtgctgaacgggctgcaaaggagcagaacagtggcgtttccagtgtgaagactgatgatctaggtgacaaaagtgagcaaactgaagacggttacaaacaactggggctgaaagttatctccagcttaggagatgaacttcaagatgttagaaaggcagctatcctagacgcggatcaattgactatgtcggtagcaagtcttggccacaagctcatgaaaaccaatgaattcttgaacatggacatgaaaagtttggacgaagacagtgggtttcaccgcaagcttacgcacttcgtacagcagtctcagactgatattactttcttgctggaggaagagaagaaaatgcggttattggttaaagacaccgtcgactatttccatggaagtgcaggaaaggatgagggcctccggttatttgtgatagtaagagatttccttgcaatgctggacaaggtgtgcaaggaggtgaaggaagcatcaaaagttgctccagtaaaagcaaaagccaaacagccctcccaatcattgcagtcattccgtgatccacgggttaatctttttccggcgattcaacacctgagggcagatagctctagctcaagttctgatgatgaaagttagatcaacatacctatgttttaccgtgcacactcagtgagaaaaattcatcaggaaatgataacgccaaaacaggttaaaactgaatcgatcttctatcgttgggttgttatctgttccgaccctgcattcttcacttttgaatttctgattctatcaagcaaaagagttgcacaaaactgaggctacacataattggaagggatgctatggaaagtaaaatttagcaggaaatggaaggaaactgacctcctagttctatgttagggcagggataaccggctgactgatagtctgacacttttttttcttttacacatttgtacaaccacagaaaggaagatgtatagacattagacagagatagaaaaagcaccacatgaactggcaaaacgggcaaatgtaacctttaaactgaaacatcatgtgttcctatcctgcgtgaactctcctgaaatgcttgttgcatggagaacaattttcaaaagaaaaggaaatatactaaatgtattcaatggtgaactgaatgaaactaatttgatgtcgtagatattgctacatttttatattaaaaaaggtcaagtttgactttagacaaaactcaacaaaattacttatgaaacggaggaagtacataatttcttttttgaatctataccaagtatgcatcattttgttggtcagacaataacccaattactctgacaagattttatttttcttccattcatctctcctgccgttaagccgtttctcctgcagctagttggtcaggcaatagcccagctaatggtcaggcaatagcccagctaagccgtttcttcacacgccaattttcatcttcccgccctggcactgtttcaaatcacaaaaatttcgccactgcccgcgcaaagctttaattttgtagaatctcctaaacctgcaccagatccaagaacagctatacactttgaacacgatgcaaagctttaactaaacataacaaattattcaggaacaccagccaagtcacaactttctatgccaggctccacatgctcgaataatgcatgttacattggaactcccaaaatcagatatacgaatttcacgaccgaagccagcatcaggctaaaaaacgaaaccacacatgaattatggccaagaacatttgccacgattcaaagacaacccgctcaaaatcaaattgaaaatttgagcaaccgaaagattttgagaaaatcatcaaagcaatgatacttaaatagatcatagcgacgatttagagagaagaacccgttcaaatcaaatcaaatcaaaaactggagcagcagttaacatttcaagaaaatcatcgaaaggatgatacttttatatagaacacaggtaacgaattacagagcaactaatccccctgtccatcatacacaagtgcaccttcttagttttagcatcggtacaagcacaattaagcatctaattcagatcctactagagatcaacgcaacacctaggcatcctagaacactactactactacacaacatatcatccatccatccactgcatccacatccaccgccgccgccatcgccgggaagcgtcagaatctagttgtcatcgtcgccggccgccgccttggcgctgccgccggccttcttggggaggagcaggttgtggatgttgggcatgacgcctccgctggcgattgtgaccgtgccgagcaggcgggatagctcctcgtcgttgcggacggcgagctggatgtggcggggcactatgcgggtcttcttgttgtccctcgccgcgttcccggcgagctcaagaacctacacagtagacacagattccaccgattagccccaaatcctcgctaattcgagcgaacaaagcgaaccaatccacgcaaacacacccgaattcgaatcttccgactaacccccaaatttcccccattggaaaccctaaaattctacccccaattctgtaaccgcgaaccccccgcccaaatttcaccgcgcaaaaaccaaaatcaagaaataggaggaacagaatcgaacatacctcagcggcgaggtactcgaggacggcggcgaggtagaccggggcgccggcgccgaccctctcggcgtacttgccggccttcaagaaccgggcgatcctgcccacggggaactggagcccggccttggagctccgcgacatggccttcttggcggcgcccgagccgatcgccttccctctcccggccatggctaaaccaaaccaaatcaaccaaccaaaccctccggtagtagtacggaatccgcgggcgaggcgacgaagcaacagcagcagaaaaatctgtggagaaagtgcggcgacgcagcgagcgagcgagcgagcaatcagtatacggcttggtaggttggaggtgggggtggggagcagaggggattatataggagggcgcggccaatgagacgcgagtacgcggatcggtgacgtggcgttggagggcgtgggggctggggatccatcctggccgtcggatcgggagagagccgtgcagcggttgggtttttggtttttttttttttttttttgccgcgcacagcgtttcgggcgccagcggtgggccccacccgcagggccgtatcgatcgtgggcccggattctcggcctgtgggctgcgggatccatggaaatgtaggagtattcgcccggaagtcaagttacgactagtttggaatttttcaaatatttcgtcgaaaactgtcgattttttgcaaagactgccttcttttagaatttgatttagtagtaaaataattttatttttcacccatcgcataaatcttaacgcaactataaatcactttatctatttctaatataattattttttactttgacaaactccaatacaataattatttaaagataaatttattttgagaagctaaaaatgaatatggaacggaggaagtataaaaacgaatctagaaccgaatgtaacatactaatattataaatctgaacatatgtatatttaaatttaaaatattaagatatgtcacatccgatattaattcgattttttatatgacgggggagtagtgcagtgctagcagacttgctctgctgttcatactcttcggccgtatcacgaccgaatggattggtaaagataccgtcagttcgtagccatcaatcagtccagaaccctagatgcgcgagtactaggtgacacgtggagcggggagggggcaagtgtcaagagcgtggtaatctgagccgtcggttcggtttactcgaccatgacgccagcagaggtggctcgtctccaagaaccacgaattcgcactaaacctgcagctagtggtaaacagtcaggatcaaacgagcgattgcactagtagtgtcaaccggcgactctgatccaggagtgaggagagagcacccggtgaaaattactccctccgtcccaaaataaatatagttttacacggttcatgttcaacttttgaccgttcgttttatttgaaattattttatgattagtatttttgttgttattagatgataaaacatgaatagtactttacgtgtgactaattttttttaatttttttataaatttttcaaataagataaatggtcaaacgtcggacacagttccccatgactacacttattttgggacggaggtagtacaaggattgcagcgaatggatacattgttgacaatgaacaatgaaaatccatcttcggtcagttcagtgagaaccgcataaatttcgttagttcatcgcctggaggactgaccaaattagtacaaaacaattgcgtatcgggaattcgagaccgagcaggcaaacacgataaattgtttctaatattacacaaacaaagcagtaatcttgcattgcgaaaacagtttgttcagcgcaacgcaacgagaatgcatcaacgaccaaaatgatgaggcagagacaaatagtggctcaaagtttcagtttgttcctcatttcttcaaccattaaacaaaccaacccaacatgatcatcagttcatcacaggcttacatctttagataaatacccacaaaaatttcgccgtattcacatcctgatcaggccaccaaaccaccaaccaagaacttctctctctctttttccccttcctactgctcagcgcaacaacacaatgcaaatccagacgaacagctagcaaaagatcctactaatgcagaaggcgcccgggcggcctagttgtcgtcgtcgtcgacggtggatgccttggatgacccggccttcttggggaggaggtgctggtggatgttgggcatcacgccgccgctggcgatggtggcgccgccgagcagcttggtcaactcctcgtcgttgcgcaccgcgagctggatgtggcgcggcacgatgcgggtcttcttgttgtccctcgccgcgttcccggcgagctcgagcacctgatgtcgaacaggagaagacccaacgagttagcaaaagagaacaatgcacagttctttctttcaatctacaagatgcgagcaattgaacccagcaaatgcaaatctagaatacccaaacatttgttccccgataacctcaaatccgtatggatttttttcaagcgaggcaaacctaatcgacgaaccaaactgaaacaaatctaacaacacccgaaataacatcgcctagatcggacgaacagaaaaaaatccccaaatcacaccgacgcatacctcagcggcgaggtactcgaggacggcggcgaggtagacgggggccccggcgccgacgcgctcggcgtacttcccggccttgaggaacctcgcgatcctgccaacggggaactgcagcccggccttggagctcctcgacgtcgccttcttcgcggcccccgcgccgatcgccttcccacgtcccgccatatcactcgccgacgagaggagaggagaggcgcacgcgctacacaaggaagaagaagaagaagccggcggcgagaaggggcagcggcagcggcggcggcgctaggtcaagaggcggcggcggcgtggattcgcgtggcgcgagaagactagggaagggaagagctgagatgctgggatatataggggtcgggggggttcggggcggcagccaatgggaggcgatcacgcggatcgcggacgtggaccgtcggatgcgtttggacggacggcggatgcgaggggggttttcgatccggaagcggcgggagtaggaggaggcggtttcgtttggatttttttgggagcgcgccaagtggaaattgacccccggatcggtgacgtggttctctcttgtgggtcccggcggtcagtctctctctcgtggtttgagttctttgttcctcgtgggttgaacacgggcttgggcctcttttttcttcttcgcggggttggttacttgggcctcgaggtaatttggggataagtccaatttacacccccgaacttttatgtttgtctaaattacaccccaaaactataaaaccgggtataatacaccctctaactatcaataccagctatttcatcccctggagcggttttaaagactggttttgatttaattggacgccacgccagcattgtctcaccaagtcaaagcaacgccagcatgcatctcactgtggagatgggcaaccgagcaaggaggaggccaggagggagtggcgacgaggaaaacgagcagcggaaggtcggaggcagccggcgtgctccctccctctgtccnngggcatcctccctcctccactccccacgagcccatccatggcgaggtgcatgcagcagcgcgggagaaactacgacgagcggcggcgcggcatcagatagggcagcgcgggagaagctgtgacgagcacgagacaagctgttggatcttgaactcgtgctcgccggcgacgaattcaccggtgctcgggagtgcggctacagagggggacctgggggaggggggaggggggatctggaggtcaccagttcttggaagggcgatgcagagggggagatcaagctcaccggcgctcgggggtgcggcaatagaggaggagctcaagctcaccaccggtcactcggggacgagagaaaggaaagaaagagctcaccgccggctgcactgtgtggggtaagagagaaggaggagaggaagagaggaggaagaagaagatgacgtggaattatttgacaggtgtcatcctacgatacgtcctcgtgtagcaaaaccacggtaaaacagcttgaggggataaaatgtccggtattgatagttagggggtgtattatatccggttttgtagttcgagggtttattttagacgaatataagaattcgggggtgtaaaatggacttatcccgtctgcaaagctagcctataaaaccgggggctcctagctagcgcgtgctcggctgctcgctgctatcgagcactcctcccatattaactacctctattaaaactattagttaatatacttaactacctttattagtatttagtaatgatagtaattaggaaagattgtggagatttttttactaacaaattgaaaaaattttaagttaaatttgaaaactttcgatttaaattttaaattagattaaaaaactttcgatttaaattttaaagtcaaattttgaaaactttcaacttaaatttgaaaactttcaacttagattcgaaaacttttaactcgagattcgaaactttcaagtccagatttgaaaaatttgaaaagtttcaatttgagatttgaaaactttcaactcgagatttgaaaactttcaactcgagattaaaaaactttcaagtccatatttgaaaattttgaaaacattcaactcgatatttgaaaactttcaagtccagatttgaaaactttcaagttcaaatttgaaaattttcaactcaaaatttaaaaactttcaaactcaaaacatgctaaagattacaaaaaataatcagaaaaaagtggaaaaaatgaaaaaaaatgggtaaagaaaaacgaaaaaaaaccgtgggagggggcgcgcaccggcgctgggccttatggcccggaaacgcgcgccgattagcgatcgcgtataaaagcacaaaataaattggatgtgagtatttataaatttttgaattcataatataataactataatagcaataataaagtcaaagtcatctttgagaagtgctggtttctctagaacttatgaggacgtggatttgttttcatggatgaagttacgaggttttttacttagatattcaacttgtttgtacatgatatcattgttctgttttaaattcattatataatgaatttatagtttgaataccttattaaaacagtttacctgatgtgatttatcctcacacccatataatagttttttcaggcgcctgatgtaacatgctcgcttgtgcgatgagagtatctacacttctacatgtcatgatcacactaaatatatggagtacatgtttatgatggggttatagttgagtttgttatcctagtgtattagtttaacactagatatgttcatcattattaaatgacttgtttgccaaagttttggttctccactacgaatcatacgtttccgttgcggaagttaccaaagaagttagagtctctttcaaccatttttctccttttcgctatcttgcttcttcccttgcagagacaaagtcgggtcttcacaaattcctcgtggcataccacaagcttgggtgctcgccgatgactcctatccatctaggaacctatatctctaagagtaacaaacacgatcgagtatttacatgctatgaactcaatggctcaaacaatacagtgaggctcgctagctctcaaccttacaacctctcaatccaacccttctcttttcttctcatatcactctcacaaagagctaacactaagataaggtatttgggagggctacaggctttggataggtcttctcttgcctgcccaagaacaacaaggggctgcaggaa

SEQ ID NO: 11808 - DNA, 821 bp, Oryza sativa
gccgccgactggtgtctccgcctgcacggctggcatattatgccacgcgttgttgggcgtctacgtcttcactgaccggccgcctcgtccgccgccgactggtgtttccgcctgcacggctggcctattatgccgccgttgttgggcgtctacgtcttcaccgaccggccgcctcgtcagccgccgactggtgtttccgcctgcacggctggcctattatgccaccgttgttgggcgtctacatcttcactgaccggccgcctcgtccgccgccgactggtgtctccgcctgcacggctggcctattatgccaccgttgttgggcgtctacgtcttcactgaccggccgcctcgtccgccgccgactggtgtttccgcctgcacggctggcctattatgccgccgttgttgggcgtctacgtcttcaccgaccggccgcctcgtcagccgccgactggtgtttccgcctgcacggctggcctattatgccaccgttgttgggcgtctacgtcttcactgaccggccgcctcgtccgccgccgactggtgtttccgcctgcacggctggcctattatgccgccgttgttgggcgtctatgtcttcaccgaccggccgcctcgtcagccgccgactggtgtttccgcctgcacggctggcctgttatgacgccgactgatgctatcttcttcacggttggctacgtcgccgtcaccgctaatatgcgtcatcatcttcaccgaccggccgcctcgtccaccgccgactggtgtttccgcctgcatagctggcctgttatgacgccgactgatgctatcttctt

SEQ ID NO: 11809 - DNA, 5457 bp, Oryza sativa
aagatggttgattcggtttgattgtgactatatagtatagttgcctaaactggcaggtaacattggaatgttgccattcaaacaataactggtgctgggttcttagaattcatggtagatagcttggatccttatattagtattggcaattggctgatgggtattatctattagattactcttgaaatcatttggccattttggtgaggcacatattcttaaaatcattattatatactaagtcttagggggctgtaaatattatattatggattgtattttgatgcatatagattgtgttttagattcacatgtgagggaagaaaatatcatctgctggaacaaaatgttctttcagcatgctaattaaagttgaagcactgtgcttttattttacgtgcgtcactgcttatcacctaacaatggcaacaaaaacagcaatagtaacaagaagatgacgaaagagacatgagaatctcatctgaacacaattttcccacaatgcagttgcgtgctgcagtttggcttgagtcttgaggtcaacagatagggaaatatcaacttagggagctgccaatgttggtgccaggggaaatgttacatgcagggtatcaccataaacgcattatgcatctttgaggtggcgatgattaagttatggcaaactaactcctgctaggtttcaaacccctctagcttttcttcttcatggaaaacaatggttccctgcaaaagaaagagagaatgggaaatttggtggtatgcctgatatatgtttgtctatttgactggtttgctacattaattctgtgtacatttggcgcactgtgaaaattaccccataagggagacatgccacgttcaaccccatggaggatataaccctgcaaaggaaaaacaaagaatccctagccacatttaagaagtaatattagccacatgtacaattaaattcagaaacttccttaacaatgaccaaattgatgagaaaaccaaccacaacattgaaaaaaaccaacaaatgccagagataattcactataacaaccccccaatactaggcaagcaagaatgagaagctatgctcatctgaatcatcatccacacctacctaatctgcccatgggaaaaggtggatcctgcgctgtttgggcaaacaagcctaagctggccagctgtgtttttagggtccataagttgggatttatgataatctatttggtaggtttcagtacctaaactaccacaaagcatttagtgttattggaatgattttcttagatgatttatcctctgttgcataaagaagtttaagccttttccttctggttagaaattattttttcttctaccacttctctcaactagtgagtcaatgtggcccatctgttcagtaattatccatgcctgttcttttgctccattcttgaatttttttctgaagttgactcggttgtctgctgaccatgttattttataggaaaatcggaacctgctgttgaggttcagatatgcagggttggaatagcgccaatgttttatcggtcttagcaaggtatatatatatatcctgaaattgggattctgttaaacttctttcagtatctgatgcacacctgtgattgctatgaatgttagttaggttattcccaatttaggttctagttcattatctttgagtttttcactgagacacttatttgtgactggctacttttgttacagtaactgaaccatgcttacgatatctatattttacgttgactaatttctggtatgtactgcactgactatctactttttcatagttcagtgggttttgcaaagtttgtccatctagggttgtaacttctatatttgttactggtagccagggtttcccttaccgcctttaaccgcgcggttaccatggtaaccggtcttaccacgggtgtacagtaatggttaccggcggtagggtttggggaattttgaccaaattcaaaatttccaacaaaactgaaaaaaatccaaaagaatcatggatgtagttcttgctttttagtggcggatggtgaagaattttttttgaaaaagagtaagataacacatttgagggcaaaaccgaaagtagtttagaaaatgggaaaaaaagaaataaagtaatgggcctgaagttgcaatgtttatcggacccattaaggcccaatagtggagaacatatctcccgtgtggctagggctctcctctcgttctctctgtcggcatgaggtgagggggcagagtttcccttaccttttggagaggggttatcgcatccccgtggtaaggcagttacagcggtaaccgccaaaaaccatgtgaaatacgtcgtaaaacatttgaattcaaaaattcggcggtttcacggtttggtcacggtttggcgcggtaaccgcaatatttgcgtgataaccgtgatttgtatagtagaacataataatgctaaaaaaattgaaaaaacactaagatgtgtagaaattagagataattataagattatatatgatactttaaaacctaacttttcgatgaaaaatgcaaaaaatcggcctgaccttttctatattatggactttgaagcaattcaacgattcatagcatgataattaaacaacaacaattcaacaaccatttcaaagcataatgatgtccacatgtagctcaaacaatagagttcacaatataatgtccatgactacatatatgatagttcattatgacaagcaacacgaatataaaaatagtttgaaacgaaggatataaataaggacatactaacatagtgcatagctaggtgttccactgattgtatgccatgttgtacttctctgtggacatgagcaacaagttgtgtgagtgtagcaacctcgccttgtattcctactaactttgacctgtccatgatgctgttgattgccactgaccgtacaattgagcataccacttgggctcttgccactcatacacccatgtaggaggataatcagaagcttgaggacggttgtacacgtacattggatatcaacatttcaatgctaaaggcactgaatgagctatagctatgctatggtgtgtcaagctgctgttgttgttggcctctcagagtaacggtagttcattgagagcttggagcaccatgatcttggtcccgagcatcgtgagtgaagtcagtctcacttgcaaatcaaatagtaggaagaagattaatcggtcgtgaattgcaaggtgaaggttgaaataataagtaaagaattgaattaggttgtggtcatctaacactgttgtgtgacccctagaagtcacattagtggcaccttggccttcttgaccatcgtcgtctccgttatctgtatcagttcttgagctactttcatcggactcttgatagtctgggctcccttgagtctcttcatcgctatcaacactccttgaccgtgtagctaatctgattgttagtgtcgtagaatgataggtccgctggcctttgaaggggatcgtcatcgtccttcctaacttgggtatttgtttgctgaatttgaaggcgaaggttgtagttgacatagacaagtttgttgagcttgttgtgtgtaagtttgttacggatcattgtatgtatggatgcaagtgtgctccaattccattcacatccacttgaagagcaacactgatcaatcaaacgcaacacaagtttcttcaaattcggcatgcccgatgtaaacatagaccgccattgtgctgcaaatgccgagtaacatgtcattttaattttgaatacgtcgaaagcattcggacttttgatagttgcattatctgaaacataccaagccaacttttcccatccatcaccatctttcttgcaagcggcctcccaaattcgctactcttacatcgatacatctcaacctccagcaaagtggcagcaaccatttcaatgttcgtcatccgctcgaaggcctgacggaggtcttggaagacggtcgcacttgcaatgtacgcgtagtgcatccgagggtttagtgctgcagctacaaaacatggcacaagttaggtaaagggttatttactatgaatacaagattatgttaagaacataagtgctagctacttgctaacattgatgagtgtatcattggtcaggtcgtgcaaacttctgtcaacaatatccatgtaagctgcgtactagtccctttcactcgcgaatagactgacatactccattttaatcaattgatatctcagaagaacctcactcaaattggggttcttgtcctcgtcagcaaagcggagggagtacattgcttgggtcgttattgcctctatgttttcccaccaccccttgctagataggtaggtgtgtgcatatctaccttccgctgtgccactgaattcgctttgcatgaagctagaggaagccatgcacttcatgaactgatctcgcttcctaaggaaactctgaaggaacatgtagtttgtgccgaaccgtgtagcattccacttaaccaattcaccacctatagttgttgtcaccatagcatgaagcttcgaatgattgtataaccatctgcaaattttcctagcactctgaatcaccatgtcatgatctggcatttttccaacctccttaagaatcaagttaattgtgtgagctacacaaggttgccacacaatagttgggtactcttgccgcagtagcctgcaaacctttttatagtttgacctattgtcagtgataatttgcacgacatgttgagggcctacttcacgtaccaccttccttatctcttgcattagaaaattacaaaataaacataagtccattaccctaaacttgataacatatggggtaaatttactgcatcaatgtcgtcaccttctatatgaagttagcattctggctttggcccgttgcatcaatggacttgtgaaaaaacattattccattgcaatatatcaaaaagttgatgacaaccatacccgttggtcgagttgaggaatcacacattagagtaacaccatactcagcaaaatcacgcttaaacctcttgaattgcttctttacgtaccttctctgtagcatcaaggtacttgccatctatctccctaccagttggagaagttatgttttcacttttcacctataattaacataccaaataattagtctctaatctgttagaaaaatgtaaatccatattaaatgcatatgtaccccacttctgtgtctctcatacggtgctgacgaagtttggattatcggcatttcttgcaaggataccggagataaaaaaagaaacttatcttggactcaccaatcacctccctaccttggtttccctctttgtgaagaatcctatgtcaatgcatagtagggatgtgtgggagcatggggagaacataccaccatgctttcgttgtaagtattggggctgcaggaat

SEQ ID NO: 11810 - DNA, 694 bp, Oryza sativa
cctgcagcccttggttggtcagtataactcttcaagttaatatgatcggaattgtagcatatttgcattcgtacagacaaagattcgttacaaagttacacacagcaagctcaacaagcttgtctatgtaaatataaccttcgcagtcgaaatcaacaaacaaatgccaagttaggaaggacgatgatgatccctttcaaagtccagcggacctatcattctacgacactaacaattaaattagagaccgaatggacaatgtttggtccaattcttgccctgaactagatgaagactcaactgagagtgaatcccccatacctagtccacctgtagccaacctagtggacttgactgaccttcgcaagaccacaagggcgtctattattgctgagtaggctgatatgaatatgtgacagtcatattggaaaaagaaagactcaatagcggccaaaaccacctcatctaaaaaagtgaaggccaaaggttcatcaacacggccgaggagcattgatagcaacgaagagactcaagggagcccagactaccaatagtccaatgatagtagcttaagaattgatacaaatgacggagacaatggtggtcaaggaggccaaggcgccactgatgcgccttctagtggtcacacaacaatgtcaggtgaccacaccctgatttaattctttacttatta

SEQ ID NO: 11811 - DNA, 608 bp, Oryza sativa
cataaatttagcatattcttttgataaaagatctagtttatatattgattttggaagcacagtataagtggttttcatgtttcgataaatatttgtggttgtattcattccgatttatatttgctatatatgtatctttattcagtaatattcaatcaagtttcttaattttatctgaaattatcgtttactattctaatttgaaaaaaaatatggttagggtagtgtcgaaacatgaattcggcaataataaaagggggtagcgcacgagacctaaaagtggatggatgcggagacaaatgatttagacaggttcaggccctctcaatgagaggtaataccctactcctgtttggggatttgaatccgccgagtatgtattgatctgacgatcaggttgtctcatgccccctagagggcctcctgcccaccttatatagggtggggggcaggattacaagatagaaaccttaaccaatacggtatcggtttcctaaatctactttacaatattatcaaaccaggactttaggctgttccgtaatatataaggaaacgtaatacccgagtcatgatctattacatattccatagatataagttatccc

SEQ ID NO: 11812 - DNA, 542 bp, Oryza sativa
tatttattgacgacataatatatctagccacatttaaagtttggaaaaaagctagcataacaacattgactcaatatgcatctacatgcatggctacaaaacattttagaatgggattattgtcaacatgttcgcacgcatagccgcacatactaggaccccaaccagcaaaatcgttgagcttgcctcggatgtagaaggtggagcatgacctcggcatcgtagagcacgacgagctcgtacgccttcttgaccagaccattcttgtgcttggaaaaggtcacctgtctgttgatcttgttctcgatccgcttcagctccaccctccccgtcacaatgcctacctcatccacaacctcctcaccctcacgctactcctctacaacctagaaacctttctcctgcagctaacatctagctcaatcgattgatctcacgaaacgaagctatggaatgtacctagacagagaaaaaaaaaggtgaggaggaggaagggaagaggagagtagagttttaaataggaaggggggatcggtgcctgt

SEQ ID NO: 11813 - DNA, 507 bp, Oryza sativa
atgtatagacaaggatcggatgggatgtttttatttcttatatgtatgggcttcatataaggatgtattgaggattctatggatgtaaggaatgatgttgggattgatggagggatgtatgttttgtatggttctcaggatatagcactgcctgtaatttctgtcatttgatgtttgcctgtgttgtgtgcaaagttttgctgaagttttagcagggctggcacgtcagcgccatgctaaatggcgctgacatgtccaaactcagcgccagtgcacctggcgctgaggtcccagcccagccatccagaaggcttgctgggctgggccacggccgaaacggccaagtcccacctcagcgccagatggactggcgctgagtttcccacagtcagcgccattatggctggcgctgaggtcctagcccgcaagccatccagaaggcttgatgggctgggccaaggccgaaacgcccaagttccacatcagcgccaggttgcctggcgctga

SEQ ID NO: 11814 - DNA, 20364 bp, Oryza sativa
aggatcattcaccgagacctgaaatcaaacaacatcctacttggggaggacatggaaccaaaaattgcagattttggattggcaaggctactagaagaaggtcatactaatactcggacaactagaattgttggaacattgtaagctcatgtgcataataaaaccttcactcatagagatattgaatgtgcaagcctaatgcttatcctctgcagcggttatatggcacctgagtacgcaatacacggaaatgtgtcaaccaagatcgatgttttaagttttggtgtgttggtccttgaaattgtaacagggagaaggaacctcaattctgacgatcatgatcgcgggaatctccttagtgatgtaagtgctcaataaggttgagcttgctcctgtacatatatacttttagtgcatttacatactgcaatattcatgatatcatacccgaaagtactctatatcaagttttagataacaaactaatttcaaatcgtctaacaggtctggaattgctggacaaaagggacggttacacaactaattgaccaatcacttgaagagcaattccgaagacaagcactgcgatgcattcatatcgggctgctgtgtgtccagtcagatcctgatgacaggcctcacatgtcatctgtcattttcatgttgagtagggaaaacatgaatcttcagccaccggcacaacctgcattcttctttgatggagactcaaactcatgttctcaaccctttgagcaacccgtgtataatcggcctaatgcaatctatgaagaggatatctccgtgaataggatgacagttactgacatataccccagataacccttccccctccccattcctaatcccccctttcccagtggcgcaattgtcaccattgtttgtcaacttcattgaaccatctgcgtatggtttgatctgcaccttagaaggcacatttaaatattctagttgttgtcattacattatattcttatatggccagttatcttatgttctttgcacactctgaactaatgttcctaaacatggcatatcatcaaacaccttgtctgcagtctgcagtaggtagagttctagatttgtagcatataaatgaacaactaaccatcgaaacaggtaatttggacacattaacaatataatgtatagcagtgtaaggccttgtttgggagagggagcaattattagaaatcgttgtttttccaacttttggcttagttaattttctaaagtatgtagtcgctggttctcatagtttgagcacagaatatggactatttaggcagctaagtgtatttgcattcccaaattttccattgcactctaggagtttgatggagtttattgtacattttattctgcattgtgtagaaaggaattttattcaacaagagcgaacggaatacacttaaaattcttaaccagaatctaaatacaatatcatccttattttctcagcacagtaatacggggctattcttcaatcccactttcattattgagcttctggtaagctaccttcggtcttcagtaaaatatgttcattgaagaagtcttgcttggtgggagtacgcagtttccaattcctatgaatgattgaacaaacgctaataagataacaattaacaacacgaaataaaagtatgcataagcgtgtgaactcactcggtgcctggttgacgatggaagcagcaccaccaaagtcacacgagccacttgccctgccggcagtctggtaatagtcattgaatgcataggtcgcatgcgccaccttggtgttaggatcaaagcaccgtccaccaggctggatggcactgcagtctgcgcagctactgcatgcatagtctagtgctgcctgtaaccgcatgtccccgacctctgcgttcgccacgcaccaactcgggttcgggtcacagatgcctaaatcccaacaaacaattcatatatagaacatgtaaaacataataagatggatatcacaatatgaattgaatgcacaattgcaaaagcttattgatcttaaaagatggccattgaatggaaactaacttggtgatggcttgtagacgatgtaagcagcaccggcaaagttgcacgcgctacttgccttgccattacgctggtagtagtcattgaatgcataagatgcatgtgcaaccatggtgtttggctcatagcacacttttccctgttggatagcactgcagtccgcgccgttactacacgcccagtccagtgctccctgtagccgtgcattcccaatagctgcatttgccacacaccagctctcctttgtgggacatgtaccaccaccatgaaagtcaacatcgtacaccttcgtcccatccggatagaacaggccgaagttgctctctatagatggcccacccttcttgttctcgttgaacaaagcgaatatgtacgcagaaacatcctccatattggaggccccgaacaagactcgcttggcaaggccattgttgtatgcttgagcgttagctttagttgccaccgagtccccatcagcattggcttctgtgacccctgagcggattctaccaccagaggggtggcctgattctgaaactctgatgggcacccgtcctcctgcttgggctaacgaggccctctcgttactaccagaaaccttgtttattgcatagtaaactgcatctagctcggcatcaaagagactgtaatatgtgacgccgctcaccggatcgaacacaccagcattgggacggaacgtggcgtactcgagggagattccggtagaaggatccgcatatgcaaagaatgggtagagatttaccataaagtacgagtcagtctgctgcaagaagtcgatcatggggctcatcaccgactgcgcgatgtcatcccggaaagcgcctgcggacggcgggaatgacacctcgactgagctgaacgtgatcggggtggacacccttatggcatcggcgaggcccagcctcgccagcgccgcgtgcacgttcctcatggccggcaccagctgctgggtcaggtgaggcgcctgatcgaacacctcgttccccacggccacgccgttgatcagcgtggccgggtagtagggcaccacgctgctctccacccacctctgtgcgtagctcggatcccagccggcggagcccagatcggtgttgggtagcgccaccatcaccttgatgccggtgttcgccagcgccctcagcaccgccgggtcggcgtcgaagatcctcaccatcgtgatgccgttcgccctgagaaggctcaccacggattgcgggtccatcagattgtccgcgtccctcccgtagcacacgcccaactcgcccgcatctgctgtgtgcaaattaagaacaaacaaacgacgtcgttgtgattgttaattacgaaagtgagattaattacctttcagccttaatttgtagtttgtacatctctgatcgagttaattacctgcatgggagagaaagagcaacggtaatgcggtggctaagagaacgcggaggaggtgatgagtgagcgccatctctagtcctgtttggcgccgtggcagactgaggatagtcgaattccactgtgtgactgtgtgagcagtaaatttataacgagcagtatatatggccgtcgtttaggagctagcgcgatacaaggaaaataatagtacctcccttccaaattagttgtcgctttaactttttacttgtaatactattcatcttatttaaaaaactagtgcaaatataaaaaatataagtcttacttaaaaagtactattgagcaagtcataaacaaaataaataataatttcatactttttttaataaaacgaatgatcaaaatgttacaaacaaaaactcacaacgataagtattttgggacgaaggtagtacaattttgatatacatgtgttgccacattttcacgtaaaataagttgaatttgtcattgttcgatcaatcatctatgttcgtgtatcccggcatatgctttgatatgccgccttcattgatttttctcggttgactatcttgtgccgcactgccgcctacgaccctgcgtctagcctgtctggttgcacgtgcaccacttgagattttcttcttgatgataagaatgccagagtactgggttttttttggtgaatatattaatgtatggttgtgagtttggttgcattttattaataacttcatcagtttcaatatataagtatatctaggatttcagttttgttcaataatataagcatttgtaccactatttacactacattttatcacataaattattttccattcaatatttttccccatcttaatcccaaccatcctcccacacctaagtctctaaccctctcttttttgttgagaggcaccaaaatcttttctcctcaattttaatctctgtgaaataatttagaaatacttatattttagactagaaagagtatagcatctagcgtatcatagtattagcattccaggtcacggatcccaatgcctgaaaatctaaagtcttgtgtgtaatgggcctcttttcatccaaggggatatttctagccgaacaaatattgattatggcccatcgaacagaaaatcccatgtataaggtgagtaatcttagagatatgttggcctgcattgagcggaataagttcacttaaggtcccttaacttgtcaacgaatgccgaatcggcggaggccggtgagaggggatggggtggggagggaggagcgtcaccggccaggcctcttcgcgcactggccaccgctgctgagcccgcgggtgtcacggtccgctagtgagcgcacgcaaagggggacgagcaatggtgggtgcgtgatggaaaggcggcagaggtagaggtagcggcgcttgttggtggcagtatcccggaagccgacctcgccttcctcaacctccacggtcacccgtcgccaccaccaccttcctccgccgtcacccacactgattcccgcctcccctcggcctccccgcaatcctcttagcacctcccgttggtctcccccccgcccctaacgccatcgtcatctgatttccgtcaccgggaaaggacgagcgcccggtgccacggtcctccactactccaccagcctcgtcggtgtgccgctcgctagcctcctccacatatgttgtcgtggatgcttgacttgccaattgggacaaggactggtgcggtgaacgtggttgtggctggcggggaaggaacacggcggtggctctcggccgctcctacgcccacaagctcgccgaggttgaacgcttccccgaatgcctccaccgacgctcagatcctttccgccggccgccactcctccccaatgccgccgaccgtcgctcttccccaacgcttgagactggcgcggatcttcttccaccctctctatctcttccctcaaattctccccactgctaccaccgacagcattccttggaaccacccgtgctccaaccccagcgccgctacagccaatgccacttcccagcgcccctattggggaaggattgcgaccttgcaccattcaacccctattggctccggaggaggtagggcctctaggggcctgccgccaacgccctgcggagcccatctccacagggagggccctgatcgaacgcctaggaagctgaccgagcctgaagagggcagtcggctccgagaagttcggagccaaccaaagggcctcggggatctcggagcccagtcaaggcccccggagccccagagccggttcaagggcctcggaggtccaggagccagctcaagtgttccggggctcttgccatggctccgggcccggagcctagggaggacaccgggaatgagtatggggtgccataaaagcgcactactcatctcccatccaccaccgatgttacggcacgactagcgatgtgaaggccgatgctagctattacccgagtaaaggctagcatcatgctagcgccataccgctccccttgatgggcaccgccaactctcggcctggtgaatggaccctcggaccattcgtcggcccacctctcagccacctcggggtagctacggagataggggtagggttgtaatttcctttacatacaacctagtataaatatgtaaatgttaccctcggaaggggggatagaagctagacagacacttattgcacacttgtgagttctgttccaacagccccctcctcttccgcccatagccagtggagccatgccccctcatgtcacccataggctatagctgccagagccgcgccctcgaagccaccctcccccctccccctacctaaccaggctgagatagagaaggagaaggggatgatatagagaaaaggggatgaggtggaggaagttggggcccactgacacgtgggtcccactatttttagtatgtattatttgactgacatgtgggcccatatattttattttatctttaaaattgttaaatttcacttcatatatgccatgtcatacgaagactaagtcaaattagccatgtaggcgtcacgtcaactaaaatcgccatctaaaccatcatgggacctatattacaccggttttaatagttaagagacccgctgtatttggttttttggttgaaggatgaaaatcgaattcattgacaaattaagtaacctcaaatgtacttattccttcattccgatgctccatgtaatgcacgtgggcttgtacaaaaattgtgcaaacttttcatgattcttacattgtccgtacagtagcacaatcctcctttcagagtgggagccactaatcagcagcgcaagaagttccatatcctggaccgatcgaagctctctctatgacaggttctacactgacgcggtcgactcgtcggacgcgacgccgggtttagcgccgccgttcctggcgaagaacgccggcttggagggcacctggagggagaccgtctcgctgtcgagcatcatcaccaccgacgacatcaccggccgatccgcggggttttcctgcacgcacaggagcgctacgtggacgcacttccgcacgtcgctcgccgagacgtacctgctcatggccgggtctaccatctcatccacggttccggccatccaacgctcccatatctgcatcatttttgtagtgcagcatcacacatagatcagccaaactgcactgtaatctgcagagtgcaggttatcagatgttcagagatatgaactactatgttgtatgttcaccgtgttcaggagatcttcagattggtgagagttgttgtagaagtcgttgttcttccttcccgtcacgatctccagcaccatgacgccgaagctgaacgcgtctgacttgacggagtagttgccacgcatcatgtactcaggtgccatgtacccactgcaacagcaaagataatttgaagtcatgattagtcactacttaattactggatgactgaacaactactacagtttatgttgttactaactatgtgtcgacgacacggttcgtgacagcctgggtctgatcttgaccgaaaattctcgcgaggccaaagtttgagatcttggggttcatgttcgcgtctagcaagatgttgctcgccttcagatcacggtggactaccttgagctgagagtcttcgtggaggtattgcaggcctcgagcgacgccgtttatgatcctgtacctcttttcccagtcaagcttctcgcgtttctcagtgtctgacaatgatcaaagagaaggtgttaattaatagatcaatgcgatgatatgacatcaatctttgcagagaaaacagaggagagaattggtaatgtagactcaattagtagtagtattgttaccaaagaggatcaggtcaaggctccggttaggaacgaactcgtagacaagcagcctctcgtgttgatccaggcagacgcctacaaagcttacgaggttcttgtgcctcagcttggcgaccagagcaagctcattcttcagctcttgaactccctgtgttgagctctttgacagcctcttcactgcgatttcgttgccgtctggaagaacaccctgtgaaaagattcaaaatatgctaattaaattagttttggtttgtaattcagagacttgttttttttttccctttttcagtaccttgtacaccgctccaaatccaccttcaccaagcttgttgctctctgcaaaatccccagttgcagctcgcagagtagaaatgtccatgagcatggagtctacgctgtcaacgtcatctgcttcagcgtaatagttggcatctgcataaacgtcagcatcacaacaattggataagttttttttttttgcattgtcagctgaaatgattaaaatggagaattttgtaggacgtacttgtctgctttgcttttgttattactggacgcttcctcctccagacacagaagcaaacgacaaggtttacggctgctattatagggagcagtattataagaaccaggcgcggaaccttgtactttgtctctgcgaattgaccaattcacaaatttccaaggttatcatgttaaaacatgtcgaattgtatggacagattccgtactactgtactgtactactccccttatttcatgctgcaagtcgtttaattttttcttagtcaaattcctttaaatttaacaaaatatataaaaaaaatatattaatattttcaatatagaacaaacatattactaaaatatattcaatgttaatgttgctaaatttttctacaaacgtgatcaaacctaaataatcattttagataatagaaatgacttacaacctacaagtactcagaaaaaaattaaatgacttaaaatatagctttttcttggaaataatttttgccgggttttcttggaaataataaacgtgtagttgactaattgtgcaataatgtcagtaatgccgcccgaaagtaatacacacttcgactcacctcgtcccggcgtggccgctgaaggcgtcgcgttgaccggcggcgccggagacggcgccgatgtcgccggtagccgcaccatcgtcgtgccattgaggaaaggcttggtctcgatccggaagctgcacctgacggagagggtcctccctccgatgtcgtccttgtacgaccaaagctcctgcgccacgatcttggcgaggcagctccggcacctcgccggcgacaggtccggcgtgcactgcgccaggctgtacaccttggggagcgccgcgtcgaagtcggcctcgccggccgcgtaccgccgcgtcgagttgtacgccgcgtagtcggcggtggcgttgacgagcgccgccacgaggcggttgtaccgcccctgctccgacgtgaccttgttctcgttgttcaccgtgtacgcgtcgatcctcgccgggtcttcgccgccggcgccgccggagaggaagttgatggcggagtagctgaccatgcaccggtcgtagtaggtggcggcctccctggagttgccgcacgcgttgggcaggtcggcgaaggcctgggtgaggcagccgaggcaggagctggcgctgacgtcgccgcggcagagcgcggcggcggtgacctgctccgggacggcgccaacgtccacggcggtggcgtagaggtccggcgacgacgaggcgttaccggggagcgtggcggcgatgagctggaggttggcgaagaacctgctcttgggcgtgaaggtgccgaagtcctgcccgcacaccggccatggctcgccggcagcgcggggcgcgagcagcgcgacggcgacggcgacggacaggatgagacggcgatccatcggggtatttccggcgtgcgcaaagaggagctcaatccatgttcgttcccacggggatggactatagtagtgagtaatctccgtccaacacggcagagagacagagacgaccatacaagtcgtccctgattcttgaaccaactttgtcgcttaacaatggatacgattgcatccagctagtcgagatatagaaaatccatgtctccttgcacacactagtacaaccaagataccggtttagcagtgaatttgaatatagcgtagggagtatctctgctcaaagtttttgaattgagcaaattttatagtttttaagaggtgccatgagatacccaaacttttaagtacaaatttagtatctagtcgtaccagagataccaaattttgggtcttccgaatggacgcgtgagttctagctgcctaactggtgcagccgcgcatgccccctatctcgcctctcctcagcgctaacaacgctgattagtgttgatgtcattaattagcgatactgataattgttagtattagttttttatttaactctgatttggaaaacttttaaccagatttgaaactttcaacccagatttgaaaactttcaattcagataaaaaaatttcgacccagatttgaaaactttcaattcagatttaaaaactttcaacttagatttgaaaactttcaagtcaagattttttaaaaacttttaactcagataatgaaaaaattcaagtcaagatttgaacaccttcaatttatttttttcaaaaaaaacaacttagattttgaaactttcaaatctagatttgaaaaaattcaagtcaagatttgaaaactttcaactcggatttaaaaacttttaactaaagatttgaaaattttcaattcaaatttaaaaccttttgtctaaaaattcaaaacatttaactcaaatttgaaaactttcatatctaaattaaaaaaaattcaactcaattttttacctttaataatttttaactcaaattcaaaattttcaactaaaattgaagatgaaagatttcaacttctaaaattaaaaaatcacgaaaaaggaaaaaataaaaaaaaagcggacgttagattttttatgggaaaaatatacggatgtggacactgtccgcacgcatacgcgccagcgctaggccttataggcctgaaacgcgcgccgccaacgcgcaagcgcgaattagctatcgcgccaaattttatattagaaaacgagatttgctccggtccaacaaaaagtatctcgagatgccggtacctcactgtaccaaattatttccgatcgttggatctaactggacaggatggatattgttagatccaacgatcagaaacgatttggtatcacgaggtatcggtacctcgagatactttctgttagaccggagcaaatcttttagaaaacatagtgtctcccgatactttcataaaaactgtataatcactcttttgaatttgtttgaaattagcaattaattgttgaaatcagggaaaacgtattcaaatttcaaggtgaacacgcttcattcgggccaccaactgaccaacctcctctatcatcgattcatcgtagcggaaagaagtgacagtagtgcgcaggcggctatggaaaaggaggcgatggagtcgcaaaagccaaagaccaaagactagtcgatgacttcaccggccttgggattcacaggcttccagttgcaacttgcatggcagcgataatcacgcccaatgtgcaatgcaattcgcaataatccaagtattgcaacttgtaatcaagtggcaatgttgcatcgcatcagtagcgaattaattatccacaaatttgcaaactttgcaagtttgtaggcgactggccaagtggccaggcatgctaattggactcgtcaaggtattcggctcaccagtggtcatccaagaccgtgacatgaatgggcatatggccatgaaaaagaaaagaaaaatcaagctccaaacttaccactagcaaattagcaatatggagctatatggagtctgtttagcatagctctaactctaactttaacttttctgaaattgaagcccagtcaaacagtttcacctccattcaaaaataagagtggagtcagctgaagcgcttttacaaaacgaactagacgggtgaagccggcttcatcctgtttcacaactccacttcagaatcaatttttagagttacatttagttgttgtagccctatcgaacaagtccatagaggataaaaatggattgcttccatttattcagttttaagaaaggattttaaacatatgctcaaagctcgtgttttacattcgtttgagaattccagggcaacatatatataattattttacagttgactaaaaataattcgaattttcagtacaaaattatagtagaaaaaagtatatgataaataataaaacaagcaaaaaactacacttcacaatttatttgaaatcccatgatgacttttatgatccaaactagctagaaaaaaatgaatgtttatactaaaaattctttcagaactatttgccgggcgaatcacatgttaatgactagatttagctaaaccagatcaatcacagttatagccgtgttgcccacaggatggaggagaggaagctgattctctacccaaaaagaatgcaggttctgctggtggttgaagcttcatattttccttggtcaacatgaaaataatagatgacatgtgtggcctgtcatcggggtctggctggacacaaagtagtccaatgtggatgcatcgtaatgcttggctttcagagtacccattgagcgactggtaaatcatttttgtagcagtcccttttgtccagcaattccaaacctgttaggcatgttgacaaacttaagagattattactttcacgtaaaaatcatcaatatagcagtgttcacaatacactaaaagtagaaccatattggtgtgagctaaggttattaagcacttacatcactaacgagatcatgatcgtcagaatgccagttccttctcctcgtgataatttcgaggaccagcacaccaaagctaaaaatgtcgatcttggttgacacatttccatctattgcgtactctggtgccatataaccactgcagagggtaagcattacacttggaaacgtacatccaattaatatgtgctattaatgaaggtattattatacttatgagcttacaatgttccaacaactctagttgtcttagaatgagtatgaccttcgcctagcagccttgctaatccaaagtccgcaatctttggttccatatcatctccaactagaatgttgtttgattttagatcccggtgaatgatcctcaagcttgaatcctcgtgaagatacaatattcctttggcaattcccagaatgatgttgtactgttgatcccagtttagggcattccctctactgggatctattgggacaaatcttcaacttaatcataattacccacattcaatagaattcagaaagtggcaaagtgcaaattctggtcttagttatgtgatttgtttgctggaaatgctacagaacatatttagtgatactgaggatatttacttattgagtatatatgtttgtcatttgtgaacagatgaatgagaaggcaaaattaccaaatagaaagttgtccaggctcctgttcttgaggtattcgtaaacaagcagagtctgctcctgatgcaagcaaaatccctgtagcctaacaaggttcttgtgctgaagctcagccaacaacttgatctcattgtatagctggtccaatccatgaccagttcctaaaagtttcttcactgctacttcttgtccatctgagagcactccctgaacatattgtttttcacagggagcaagcaatataatccatcttttggaaagtaatgcacaatccatttgaaaattttctctttgtatttttgcgtgctaacttaccttgtatacagcaccaaaaccaccctcgccaagcttattattcggcgagaaattctcggttgcctcttgcagtgcagaaagatcaaaaatcatgcattgtgctctcgttattttcttcaatgctgttgccatatgacaagaattatgtgagggaacagtacatttttcagctactgaacggagattatatatgctactcacggtggacagcgtctgtaaccttggtcctcctcctgaagcgaacaaatgcgaaaactgaaagtatcaacaataccacaaccgacgaagcgacgccagcagcgattcctgctgtactaattttcttccctgcacacaccaaaacatggatttcaatttgcaaaaccttgatttcattgttaagtaggaaaaatgaagaacagcaggtcatacctgacccaggctctggagaaagaacaggagcttcggctgttggtggtggcgccgagacctgcagcatcgcccggcctcggtagaatggctgcacactatacatcagtctgcaccacaccgaattgacacgaacccagctaaggcttttgccgaggtacgcttgttttgcatagaagaggaggtccttaaggcaatcgttgcactgcgcgggcgtcaggtccggcacgcactgcgcgaacccgtagatgttggggtcgaactcctcctcacccgtcacgaaatacttcttggtggtcgagttccccgtcgtcgaggtcacggcgtggtcgaccatggcggcgaggatcttcgtgacggcggcgttgaaccagccaaccgccggcacatcgacgctcgccgaggcttgctcgggataccaactgttcgtcacgagctattagtttatctgatttttgcgagaaaagaatggaaggatggattgtgcgtacatcatctgtgagacctgccactgatccggactgaggaaatccatgaacctatagcgggagaagcgagctacgcaagcgtcctcgtacatggcgacgccgctgtttccaggacaatctttcttcccgtcgacgaacgctgccgcgacgcacgcgctgcaagcggaggcgttcacgtcgccgcggcatagcgccatcgcaaagaccttgtcgggatccgcgccgacggtggcgacagcgaagccggccggagccacggagacattgggggagagcgccgcggcgaggacgttcaggttcgcctcgaaagtgctgttggccacgtacgtgttgccgactccttcgtcgcagtcagcgatcccagccggcgtggccgacggcggcaagaggacgaggacaacggcgacgatgccatagccgacgtgcatcgccgcagcagagaggggagatgctcacacaaaagatgtggacttgcgccaggcaacggatctgctctgctcgcccactcggtgcgacgcatcattaggcacgttgtgctgagtttgagcgcgcaattggagtcaaaaatggctgccgcatgcacaatttcttgatttttttttccagcgttcaacatttgccagtgttctaagtcgaacataatgcgtggaataaagcaacagcttgtatcgccagcggcacgttcttgtcacactctttgactactgagacatgatcctctactcccagtatattaaaagaaagatatctgctccggtccaataaacaatggatctcctcgtatacctttttcttccaaattcgatgcaaatagttgtgaaaaaatctgaaaaaaattgacaatgtagagtataatgatacctactagtccaccaaaattcatgttcaaattcgatctacaaatcgagaaacaaaaaagacaaatttagatataaacagtacgctactattcatacgctgaatttgtcttttttatatctcgacgtgtgagttgagtttggtcttaagattttgtgaagttttatatatgtgttgtatgaatgttgtcaaatttttccagaatttttcataaccgtttagatggtttttgagcaaacgagggaacatcccctcgagggattagaatagtttcccctgacaatgtctatcctgtccaatctaacgatttggtaccgtgagataccgatacttcaagatactttttactggaccgaagcaaatctctaatagaaattaatctagtaacttattttccagatggagggaatactttcatctcatcctcttatgcatgtactgcatggaaaatcaagttgacagaccaagtctgcttggggagtttaagattttaagaaacagctggtaagaagctagctagtgagaatctggagaagcaagaaaacatatctagagaagctaggaaacatagcttctgacttctattttattttctgaattctacaactacggattctcagaatctgggtgaaaatataaactgtttgagggagtttctagcagctggagattctacgagaagctgcagttgccagaagctcccctaaataggcatgttctaaactaggattggcttagctatttcctcgattttcattagcattttttcatctgctgcgaaaactttcttttatagaagttgctttgaaaaaaaatcaaataaattagtttgcttaaattttaataatcaatatttagtttggctaaaggattggcttggctatttcctcgtttccaatgccattcctctagacccgatgatctcccccgacccttttctcctagacataaacctttattgaacgagcaattttacggtctttgagaaggtaccatgaagtaccactttttctattgtaaatttggtacctcttagtacctaggtactatgaggtatcaaaggtactatgagatattaaattttacactaaatttttgatacctgatggtacctcttcaagaaccgtagaattgtttctgttgacgactctgaatccgatttcataataggctgtgtttagttctcctccaactacccctaacttccaactttccattacatcacatcacatccaaaactttctaacacacataaagcttccaacttttcccaaacttttaactttttttagtaactaaacacagcgatagtttctctggaattcaaaaagtaattaatgtgattgatggttttgtcgtcgccgcctttcagacctcaccccgcgcgcgcgtgcgcacttacgggctacgtacggcggccgatggtgccaactgaacggtgcaaatggaaaacacaccatctccaagcaccaagctagccatcgtaatgcgaataccttcatggtttacgcacaaaccggtccaacccgtcaaccaaaccatcccgatcccctttttgcggctgtacagttgtacgtggggaggccatatgtgtggatcctgtgcataatcaccccgttgaatccacccccttcgtttctcgaaagaaatttgaaaatatactttattttttcatatattgcatttatatacctggctgtgactaatttacaagaatagacccaatccacggaacggttgcgcgggagcgaggacgagcagccggtcccgcaggccggggatgcggtaccacgccggtcccgcgggcgtggtgagcgcggcaacgctcccgcatgccagatgtgtgggaccggcgctcccacatgccgcccccatctcggtttcccgaattggatccgatatcctctgcacgaaaaacggagcagactattaacatataattaattaagtattagttattttttttttcaaaaatgaattaatatgatttttttaaacaactttcgtatagaaactttttataaaaaatacaccgtttaggagtttgaaaagcgtgcgcgcggatgagttggaaaaattaggggaagaacacatctctaagaacacgcgacctgttcggttccgcgcgttggaaccgcgcgacagcgtcggtcccgcgccgccattctgcggcaccgccgcgttcactcatcctaccatgggctccatggctcccgtgcatcggctccgcggtaccgactcggtcccgcaggccagttgtgcgggaccggctcggtcgcgcatctcggttccgcgcgaccggctcgggttccgctcccgcatccccagtctgcggttcgtcctcgctcccgcgcatccgttcagcggattgggtatatttttgtaaattaatcgcagccaggtatataaatgcaaaatatgaaaaaataaagtatattttcaaatttctttcttcgtttctctccctcttccttcacggctgcgcgtgacgtgcggcgtatagtacgagtctccgccgttagaggccgtgattcccattccccgcacgcgccgccacgcgacgagtccactcgtggcccgcgcgcgtccctgtcaccccctgtgcgctcgacgagccgcatccataacccgtcggttcaatctgatggaggccggcgtcccgcgcacttgcgttttcccgcaaacgcgatcgctctgttcgtttgctccagtatggctgcgttgctgctcctatgctctgcttctctctcgtgtacagaggagcaaagcggtaaacggtctaatccgtgaagtcagtggtacgtctacggccgtcgactccaataagcaccgaatagtgagtaaacaacaatcttagctgcgagaaacagccaacgacttgaatggtcggacgaccaaaagtttactctcattaacaaaaccgagctcgatacaagtacaagtgtacagaccacccgttcatccgttccaccgtgcagtcacgatggcggctagccgtgtcgccctgtccgtgccagtcgccgccgccgtcgcgctgctgctgctcgcgctcccccgcgccgcggtgtcgtacccgtgggggttgtgcaacgacacggccggcgaattcccggcgaggaggagcagctaccttgccagtatcaacctcatcgccgccaccctccccggcaacgcctcggcctcgccggacctgttcgccaccgccgagggcgtcggcgcgccgccggaccaggtctccgccctcgcgctctgccgcggcgacgccaacgcctccacctgcctcgcctgcctcacccaggccttcctcgacctccccaacgcctgcgcctaccacaaggtcgccgccatcttctacgactcctgcctgctcgcctactccaacgccaccatcgccgccggcgacttctcctccgagaagatcccgatttacgggttctacagcaacgcgaacgccacgacggagcaggcacggttcaaccgcctcgtggcagcgctggtgaacgccaccgccgactacgcggcgcgcaactccacgcggcggcggtacgcgtccggggaggccgacttcaacgcggagttccccaaggtgtacagctgggcgcagtgcactccggacctgacgccggcgagctgccggagttgcctcgcgcagatcatagggacatatattgggttttttgagaacagggtcggaggattcgtccgcgcggtctggtgcagcttccagtacagtaccacgccctttctcgacggaccgatgcttgtaaggttacaaggaacgtcaggtgcctcgccggcgccgtcgccggcggccgtggtgcccgcagttaaccagacgccgccggcggcgacgccgacgcttgaaggaggtgagtcaaagcgccttggccttaaatggtacttactccattttatattacaagttgctttcactttttttctagaaaaacttagtaatgtctacaactctaaattagtttgattaaatctaacatgaatatattttgatgatatgtttgttttgtgttaaaaatattattattttttccgtataaacttaatcaaactttaaaaatttcaatagaaaaaatcaaaataacttataaaattaaacggagagagtagattataattgagttacttttcttgaaaaatttagattaaggccctgtttgtttcagtttaagattattgtaatctaaattattgagtcagatattataagctggattataataagcagacatagaataagttgatagctgtttatttctctggattattagctggttgttaggtggtagccatctaataatctaaaaaaagcacctttaaagtagattactagattatagattgtaataatctatcataataagttatctgtttaataattcaaattataataatcttaagctgaaacaaacattgcctaaatataattttgtgacactacttagcctgacattttacttctaaaaaaaaataatccagggaggaagtacagcgtccctggattggttcttataattctgctgcctacaatagcagcaataaacgttgtggttggcctctgtttctggaggaggaggaggcgaccagtaacagaagcaaagcgaacatgtatgttctgcaaaattctccagtttactatacacttcaagcgaccttagatgaacaatagcttatccatttttttttttgtctttggtagatgccaattactccactgaagcagaggacattgagaatttagattcgatgctcatcgacatctccattttgcgatctgcaactgggg

SEQ ID NO: 11815 - DNA, 12480 bp, Oryza sativa
ctcattattaagcttactgttttgtttcatgttcatagggtgtgctcccggacggctacgagatagcagtgaagagactgtcgaagagctcaacgcaaggggtggaagaactgaagaacgagctggctctggttgcgaagctgaagcacaagaaccttgtcagcctcgtcggcgtctgcttggagcaacaggagcggctgctcgtatacgagtttgttccaaaccggagcctcgacctgatccttttcggtacaaactaagccatgtttaacctcagttttcctctgtttcttatgcaaagattggtaccatccattaacctgatcttttctgtgtgatcaatgtcagatactgagaaaagtgagcagctggactgggagaagaggtacaagatcataaacgggatcgctagaggtctgcaatacctccacgaagattctcagctcaaggtagtccaccgcgatctcaaggcgagcaacatcttgctagacgtgaatatgaaccccaagatttcagactttggcctcgcgagaattttcggtcgagatcagacccaggctgtcaccaagaatgtcatcggcacatagtaagtctatctaaactagcacatataatataattcatatttctagctatcatctagtagcaatttgctgactgtaaaattaccgtgctgttccagtggatacatggctcctgagtacctgacacgtgggaactactctgtcaagtcagacgtattcagcttcggcgtcatggtccttgaaatcgtgacaggtaggaagaacaaccacagctacaactcccaacaatctgaagatctcttgaccatggtgagttatctgaatatcttatcaccatcatccttgatccttctcgagagaagcacatcgagttgcattttgactcatgggttttactgcaaaaatggtgcagatctgggagcaatgggtggccgggacggtgctggagatggtcgatccgagcatgaacagcttcttctcggagagcgacgtgatgagatgcatccacattgggctcctctgcgtgcagggtgacccggcgaaccggccggtgatgtcgtcggtggtgctgatgctcggcacggacaccgtcgaactccatgcccccgcgaagccgacgctcttcgccaggaaaggcggcggcgacgaatccggcgtcgcgtccggcggcatgtcaatcgtgtcattggaggagcagtcgtagagacggtagtccagtgttgcttattatcagagcggtagagccagaggcctgaagaggccagtgcagaatcctacgagagaagattgtgctacactgtgctaccgtacccatgtgtagcggcaatttagaaatggctgccagatcttcatcggagtgatcatgaaaagatcaagcgataatgaaattgtgtcaaattacgatcaatatgagagtaaactttagatctttttcaactgatggcgaaatgataaacgaaattgtgtcttttcgctttaactgaaactacatctacttattacataagttattggctaaaaaaaccaagtacgacataatgaaagaaaaatgatgatgagcatatgacataacgacaccaataaaaggaaataattaacttattcaaagtttaagtctattgctaaatcttcatctaaaattgagacgattgactctaaattttggaatgcagcgggtaaaacttccgtgttctcgtcacacatttatagttggcccacaacagacggtaaattaattccagaagtttaaattgaagcaagcaaaaactttgagcttattcatattaaacttgcaatcttctatgttatacaagtttacactacacctacacttggatattttttaagacaatactacatacattttgctagtgtgtagttgagttcttatagaaagtcaagcccattggtttcttttggttttgcgcaagcgggttgtgggcattatctccttatcctggctccatggaagatgtgattggagcttcttccggtgttagcttccagtggcttcgtctttcatgctggtgactaaggagtactccagatccacttgtgaggaggtcgtgccgatcgtcatctacatctccggtgagtaaagttgtaagattagttaggttgcgcctgttgccattctttttttcgaacggtcaggccgttgccaacgttttatattaagaagatatcctattttaaggagaaaacatgatcaaaccttacagtgctcttacagtgctcagttaattagggaaaattgagcgaaaaccacaactacaacaccacaccaacagctaacctatcctaagttaccatgacagagttcgacacacggcatcaaacaagcttgccatttgagatgacactgcagcctacacatgttatcgttgccaagcttgccacccaagcgacacaacagcttcaacttcattgcgatgctaccccaacggcaaaataaacaaacagaaacgacatccacgaaggacatcatcccaagctaccaaggaaccactcctacacacagctagcatcaacaatccaataaagaaattgcaatgtgtcatcgttgccaagctttgtcgccccagcaaagcagctccgactctacccacaacagtaaccagataagagtgatgaacacccaatgtagcaaggaacgaagccaaggtagtgaaggcctcgtcaaacaccctaggctggaagagcttcggagacattgcaggagtccaccaaaagctaccgttgtgcgcagagggttcttggtgttatgaggggtcaatgccaggacgacgcctccaaggaggggaacggcgccaaatggcgtcaccgtcgtcatgccagcccatggccatggcaaggctttcgccagtgatcccctatcaaaaccccacacaaccatcctgcacaacgacaatcaccggaccaccacgccatcccttcaacgcccaagctcagtctaccaccccgcaggtcaagctggcaatagagaggacaaattcttcactgcctaaccgcttcctgcgtgctgccgtaagccactgaggtcaccattggcggccagccaccaccgctgacaacccggtcaccaccactggcttcctcctcgtgcagcacctccaccgcctcacgccgcctgccatcgggccatggctgcgtgtgcggccaacaccacctcgcactggccgccggcctcgccttcctcctacgtgccatcccaagcaccgccgggcgggggcacgaggcagagcaggagccggcgccgtcgccgcagcggccccaacccacgccgaccggggcacacgcatcgcacctttcaccgcccgattcacctccgtcgcgccgcccaccgcgccggtcgaatgtgctggttggccgggaggccagatccggccacagaggcaccggatccaccgccccaagctgaactgcagtctccacctccggccgtgccatcgtcggccttctccgtcctcctcgcgctggggtcagttcttccgagctgtttgggcctcgccgccgccttcctggctcgccgccggccagctccggcagcagtgaggtggaggaggggaatgagggtgtggcggcgtggcggctagggttttgcccccgagccgcccgcacgagagagacgcggggacactttgaccgtgtactttaacttgaaactggatatcgcttgttgccatccttatctctagcaagtaaattttgcaaggttttagtccatcgttgtgaaccttcaacaataggagaagttgtgggagaatgccagcgataggtcaaccgtcgggggggagcaaaaatcggacgctcccctcccccacatgcgcgtgatacgtgacgcctgggccctaccacggtctctgaccccacctgtcacgtgtctgcaccaaaaatatttcaccttgtttactcacaatatttcactatgtatagatctaatgttgctgtgaattaaaacattcttttgcaacaaatcacccacatattttggaaactctctattaagggaattcgtttcattttttgtttcacaaaaaatgtttcacctagtgtactcacaatgtacatagatctaatgttgcaatgaattgaaacattcttttgcaacaaatcactcacatattttggaaaccctctatgaagggaattcgtttcattttttggtctaccaaaaatgtttcacttagtgtatttataatgtttcactatgtatggatcaaatgttgcagtgaattgaaacattcttttgctatttgctgaaacattgtttttatataaggtgaaacaacacccgatttaaacgattgaaacatttccgatctacttagtgaaacaattccgatatacctagtggaacatcgtgcaacatttaaaaataattcaataataagctaaatgttttttttgttggaatatatctatgtgtggtcttgttttgaagatttaactgcaacgaatctaatgatgcaatcggatcatgatttggataaataatttaagagaataaatagtttaaagtgtttttacacgtatgcgtcgtgctgatgtcagcgcctgatttccccaaatcatcgggtgattttcccaaatcatcgggtgtccgattctaaggtggtgtttagatctagggacttaactttagtctctatatttaaacactaatttagagtaataaatatagactacttacaaaactaattatataaatgaaagctaatttgcgagacaaattttttaagcctaattaatccataattagagaatgtttactgtagcatcacatagtctaatcatggattaattaggctcaatagattcgtctcgcgaattagtccaagattatagatatgttttattaatagtctacgtttaatatttataattaattttcaaacatctaatgtgatagggacttaaaagttttagtcccatccaaatagggtctaagtttcttccttcgctgtgttctgtccgatttaccatggatgcctcaacttccattcagtggagacctcgttcgggttttctccttggctctaccttcaataggttgccatgaatttgtcgtctccaccgccgtcgatgtagtcgcatcggctgtctagtggatgaagtagataaaggacttgattgctaattccttttagcatattttgtctatgcccagctttgatgaggggtttctccgtaaaactggatgcgctcccagtttgttgtcatcaatctattaattaatttattaatttgcccatcttttagctcacttgctttcttctgtgttttttcaataatgtgtcgtggtcagtaccggcggctgcaggaaaggtaaccattaattatgatttggcaaggtcatatgcatgcatgcgtgctgacctgccacacgggtgttgcttatcctgtgactcgttaatgacaaggacgtgccccaaatggctttgcaaattattgctttccttttcgccactacgcgagtacgccagggtaaaaaaacatacgtaggcagtgttccttacattaggttggaactaatctttcaaacacgtgaaacgggacagtgaattaacgtacaattagttaagtattagtttagaaaactttaaaaaatagttaatataatttttgaaagcaaattttctattgaaattattttctactttctccgtttcataatgtaagtcattctagcactttttattttccacataaatattttttattgaaattattgatgttaatggatttagatataaatgttagaatgtctcagattgtgaaacggaggagagagtagaagacataccgtttggtggttcaggaaatgggtgcgctaaaatgagagagcagaggttggaagacagaacaaacaacatagccgtagtgtgatttgcagtatggtggacaagatttcagtactactaagtaaactgtgcagccggccagtcatgtttgactccaatttcgagctcaaacctgacggaatctgccatttgacaagcgatgtgttgcaattcgcacagagttgacagttgatggcgcaaggctgctcacatgaggccattttttatttttttgggcgtaaataatgccgttagttgagggaaagaatcactacccgcatcttctgccacgatgctcgccgccggctatggcgtcctcgccgtcgccgccgccgtcgtcctcacgctgccctcggccgtgcgtgccgcgccctcgaacatctgcgacatgggcgtcgcgacgtacgctgccaacagcacgttcgaggcgaacctggaccgcctcggcgcggagctccccgccaacgtctccgcggcgcgcgccaccggcggctacgcggtcgccaccgtcggcgcggcgcccgacctggtctacgcgctcgcgctctgccgcggcgacgtgaacgcctcggcctgcggcgcgtgcgtcgcggcggcgttcgccgacgggaagcggagctgccccgggatcaagggcgccaccgtctccgggcccggggacggctgcgtgctccgctactccggccagagcttcatgaatttcctcagcaccgagcaatggcaggtctcagagatactgtacggacaccatctatatcccattcccaccattgtttcttccaagcatattatcattggtagaattaatcactaatcagagaaactaatcactactagctcgttacaaacagttggtatcccgaccatgccacggacagcatcaaggtgccggacgttggctggttcaacgccgccgtcgcgaagatcctcgccgccctggtcgagcacacttgggccacgacgacgagcaacgcgaccgccaagaagtatttctccacgggtgaggaggaattcaaccccaagatctacggattcgtgcagtgcgtgccggacttgtcgccggagcagtgcaaggaatgcgttaggacgctccacgatcaggcgaaaatccactacatgggcaacagccttccgtgggctagtacttattcggtgtggtgcagtctgatgtatagcgttcggccgttcttcggtggccgggcgatgctgcagctctcgccgccgctgccgccggcggtcgatactccggttggtactcatgagcctggagcaggttcgactttatacttcgggttttttttttttttagagttccaacttctaaatttagctttagaagttaggtttagagtagagttgtggagcggtctaaacttagttttacctctctattttactttgtgagaacattccacccagctcccctcctattttaggtggagctgacacagccaaacaggcccttcttgtttttccatgaaaattatttgtcctaattcattgaagttcatgatttggtttctgcagggaagaaaaagagcgtagcaggactcgctgcaggcctcgcttgttcagttggggtactcttgatcctttcagttcttgtgttcgttcgtttcaggagaaggaccaaggctgccgagactgaccaccgtgagtagcattagcatatagtctctgttcagtagctgaaatttgctgttacctgatatgatcttgtcaaatgtcaacagctttaaagaagataacgagagcacagtgcatgatttttgatctgcctacactgcaagaggcgaccgagaacttctcggagaacaataagcttggtgagggtggttttggtactgtatacaaggtaagttagcttgtaaaattacaagacaacagtttgaaatgtactgtgaactagtaatctgtagagtatttgtctgaaaatcaatgtgttcagggagtactctcagatggacaagaagttgcagtgaagaaacttttaggaacaactgggcatggattggatcaactacataacgaggtcctgctattggcagagcttcagcacaagaaccttgttaggctacagggattttgcttgcatcaagagcagacactgctggtttacgaatacatcaagaacgggagcctggacaacattctattcggtaattttccttcccaatcaacgcttcagaaacacaccgataactctgatttttgaatagaatttttcagaaacattctgttcggtaattgtcttgggaaacattctagtatttggtaattttacttcatgccaagtatgtaaaacaaaaaatagaataaattgagcaatgcacatcttcaaattagtgtgaagtactgaatatgtactgtactgtactgtaccatttctggcaaacaagttaaaaagctaagaacaagatgtgcatccacttccttaactctactatagatgcgcgattatgattaagttgcgctattttgtccttatagataccaccaaaggaaattcactcaattgggagcaacagtacaacatcattcttggaattgctaagggtatactgtatcttcacgaggattcaagcttgaggatcattcaccgtgatctgaaatcaaataacattctacttggtgaggacatggaaccaaaaattgcagattttggattggcaaggctgctaggagaaggtcatactcattctaggacaaccagagttgttggaacattgtaagctcgtgcattataaagccttcattgatggtaaatattgatatatctatgtttccaagcctaatggttatatatattttttttgcagcggttatatggcacccgagtacgtagcagacggaaatgtgtcaaccaagatagacatttttagctttggtgtgttggtccttgaaattgtgatgaggagaaggaactccgattctggtgatcatgataatgtgaatctcctgactgatgtaagtgcttaacaatactgacctttctccggtatgcatttgtatacaatgtttaagtttcagaccggtaatcggtctatttcatataacaaactaacatcaacgtgtctaataggtctggaatagctggacaaaagggacaatttcacaattcattgaccaatcgcttgatgggtactctcgaagccaagccatgcgatgcatccacattgggctattgtgtgtccagccggaccctggtgagaggcctcatatatcatctgtcattttcatgttaaccagggaaaacatggagcttcagccaccagcacaacctgcattcttctttgggacagaatcggcttcctcttctacatcatgtgggcaacgcagctatgtgtatgaccgctatggttttgctagcgtttctgtaaatgatgttacactcaccgagccatatcctagatgactggtcttactaggaggtcacaatgcgaatgggtaaaagtcagagtaccgtactgtgtccatacacacgtcttaactttgtccaaggaatctaatattgtcgcgaaaaggtggggataatctccagttgctcggagcgtaacactaatgagtgggccctgtagacatcttcccccgccttgtcactaaccacgagacacgtgtctgggtaaaagacagtggaacgacatccagctacgctcaaccccgtcagctcctccagtgggcccagtaaagtcctgtaaaggccccaccggcggtcagcatgcaatgggattaaccatacctaattcctgtttgtatgccccctcctacaagagggatggcaaccagaggcggagttaggattatgtgaagagtagggcctaatcattagagtatgaacttcttgaacgaattttaataggaaaattagtaaattccttggtattttttttgccaggtgtggggcccaagcccaagctgccccacacctggctccgcccctgatggcaactatgtattccccccagactataaggggagggctaaagccattgtaaacggggatcacattctgaaaatctactaagttcagaaactctcatcatctctagaatagataaacccaattctttataaacattgcaacaagggatctagacaaacacataggagtagggtgttacggttctgagtggcccaaacctgtataagcccctcgactcttgattgattcccaaactcttttgtaaacattgcagtaatggatctagtcaaacccacaggagtagggtattactcttccgagcggctagagcctgtataaacccctggactcttgtttgattctcgcgttcctaacctcagatccacacactagcactttgtccgaatcacaaaggagtgcctttcctccccgccagaggagctcgggctccgacaagtatgatacaaccttgatcaaataaagagccattagtttggttcttaaacctaagtggattggaacaaccatatcgattaataaacattagcaaaccaaatattgggagaatgaaaaaaaggtaagagagaaggcattgagagagtagagagctaccaataagaccaagtgtatatgcgaaaggggttgtactctaggcattagttacggtgctcaagtagcacctccaactctccaagggagcgaattccaatcttaaataaaagaaaaaaaatattatggggtttccctcgctgtttccaataaaaagaaaaagaccaatgtgttatcatctagaatgatgtttccattatactcagtttaaataatatgtagtccgttgcatgaatgataattattgtcaataatgaatttcaggcttaaataaaagaaaacaaatattgtggggtctccctcgccttttccggtaaaaaaaagagaccaatccgttagcatcttgaaagagtacctcagcactagtgccgcaaccgttgaatattctctagaatggcacaattgcttacctgtatcggtgactgactgagtgtgcataagggaaaatgatgataaccacagcacatcggcctcggccacaataggttgtgctgatcaagcgaaatgggtagctccaaaatgaaaagcaaatcctatcaaatgcatgggccatttattccatgatagaacttgatgaattatttttaatgtaattcctcaaaatgttattgaaagatattggaaggtagtaaggtggtgtttacatccagggacttaacttaagtccctgtctttagacactaatttagactattaaatatagactacttacaaaactaattacataaataaaagctaattcacgagacaaattttttaagcctaattaatctataattagagaatgtttactgtagcatcacataggctaatcatggattaattaggctcattagattcgtctcgcaaattagtccaagattatggatgagttttattaatagtctacatttaatatttataattaattttcaaacatccgatatgatagggacttaaaagttttagtcccatctaaacagggcctaaggtaacaaattttacataataaattttggtgtctctttatgactcttaatgaacgtaaaccacccatacagatctgatgcatgaaaatgccttggatacatgagtgcgggtgaattacatgtttctcatatgccgaaggagtttgatgtacaatatgtctctggaatgtgtatttgcggtatttccttcaacaggggtgaactatttatttaaaattccctacatgaaataaaattaatgttacccttatttttctttgcagaataatgtggactacaggagttattctttgattcatcctcattgcccagctgcttccggtttattacagtttgttctgttcaagtgttgtttggtgggagcaagcagtttccaatctatgtaaactattgaacaaacaccaataaggtaaccatttaccatttgagacaaaagattgcaatttttcttagagaaattctatattattagaggtgggagacattaattaaatatactaaatttgaaatgagcatggactcacttggttgctatttgacaatagtagcggtgtgtcacggcccgaactagacccgaccggaactagcccgtgacgctccaaattaacctgttattcgataccagtcccaggaaacagtgctggtatcacagggagacagaatattacagcaacagaggtatctttattatagagtagaggtacagtcatgttgggctgcggacagatcccgagctcacaactgcattacaaaagggaaacggaagccaggacttggaccaaacaacacaggcgcgacttgggaactaggccgaaaccctaaaactcatcgtagccggcttgctcctagaagaactcctcatcagccggttccgcttcatcttcttcagcaactgggggggattatttatatagagcaagggtgagtacgggagtactcagcaagccatgggaaataggtgtttaatgcaggcttcaaggaaaggctgttgtttttgcaattgatttttatttggacccttttctaaaaacaactaagtgagtgcttctcaaacgacgcggatgagacagtgcgtctcgtccggtcggagtatgtgcaatgtatcagtctttaga

SEQ ID NO: 11816 - DNA, 531 bp, Oryza sativa
atctccccctctcccccagccctctccccccggcgcgctccttctctctctctccctcctctccctccgccccgctccgcccgcgcgctgcacgcgcgagtgcgtgagccgcgccgagccgagccctcctccctcgctctgcccgcgcgtgcgcgagagccgcgtggtcgccgcccgtgccgcgcctgcgccgtctgcgccgcctggccccgctgccctgccgcgcagccgctcgaccccgcgagccagcgcgcgtgccgcgcctacgccgtccgcgccgcccgttgtttcccgcgcgcgcgtgccgtggtggccgaccgcctggtcgccgccgccgtcagcctctgccgcgcctgtcgctcgtgtccccgctccgctccacaccgccccgccgtcatcgccgtcgtcatcgcccggcccccgccactccgcgcgcaagctgccaagggacggaggcagagctcctcctccctctgccgcgtcgcccccgctccctcctccttttcccgaagaggcaaggggacaagcccc

SEQ ID NO: 11817 - DNA, 590 bp, Oryza sativa
tgacctcatgagtttctgttaacggtgaaatttggcaacagtttcttgatttacctcattggtgtcaccttgtttataactaatcatgactataaattaacagcaaaatcatgacatccgccattgtaggtcgatctactgggttctgctggacacacaggaggccgatgttgacacatttcagcacctcggcttcagggtagtttctgtccaaggaatagtctaccatctctacaatatttccctctgtccagtgcctccatacctagcattagttatatatagatctccagttatcagtaatatagatggtacatatgagtggttttctggaaacataagcaatattagtgtattgatttgtaggaattagaagggatactcactaggcttactaaatcttcgttttgctctgcaaaatagggcccactgtttctttgccctgtcacaatctctaagatgagaatgccaaaactaaacacgtctgatttcgtagagtattgcccgcgaatcacatactcaggagccatgtatccactgcatgcagtaagaatgaaattgcatgttagtacgtagtttttaagtgaaat

SEQ ID NO: 11818 - DNA, 7519 bp, Oryza sativa
acgggcctcctcaacgccacggccaggtacgcgcgcgggcaacaccaacgcgtcgtccaggctgttcgcgacgggggtgatggtcgggttcgacgcccagttccccaagatctacgccatggcgcagtgctcgccggacctgtcgccggcgcagtgcgggctgtgcctcggcgccatggtggcgcggtggtggcagacgttcgagcccaacacgcagggcgccaggagcgtcggcgcgcgctgcaacatgcgggtcgagctgtactcgttgacaacgtcccttccatgctgcagctgcaagccgaggccgtcgcgccgtcgccatcgccggcgccggcgccggcagggaagccacctgctgtgccgggcactacaggaggtgagcttagctgactttactactatgcatattaattaggagtactctgcttccatcttttgttccctgaaaattattgtacctagtgtgatgctggacgtatgatagcttaactaatgccattataattttgcaaagtttgagatataccatcggtatctcaatgacatgtaggatccacatgagtcaatgacatgtgggtcaggacggcatggttttaattttgcaaaattataatggcatggtttcaattttcccttttaggttaagtacagttcagaattttcatcacgccaactaatccatagtttaagcaagaaacgtccgaatttctcttggtattaactagatgaatgcctagattttccatgattcgatccagacctgttgctgtcatgctagttagcgtatagttcactactattccgtactagtgtatactagtactcctatcatacagttgactaagtctactttttccaccgactaatttcttagagacatttttatttagggaatataatatcgaaatcaacctaatccacaagacaaaattgtgcaatatgatactagtaatacgtgtggtttctctgtatgtgattcaattatctgtcagtcgcctaactttcagttgtttgatcagctagtagttaagtgaatgcacggaaaaaaaaaggcactctcttcttactctgaaaatttacaccatcttttctgagaagaatcttgtgtcatgtatttttctgtttgtttgggaacagttgtctatcttttcgtcttctgcttactgttctagattcagtaactgcaggcagcaccacatgtgcaatggcaatctagaagctatgacttgtagtcatgtttatatatggggatataaacacaggcatacagctgttaccaactttagattgtcaaattggtagtttgtagtttcgactagatattgttattaacattagttagtttatgcatttcactcaagcaatgggagttagagtggagcactagtcaagaaaagctaacagtgagtgttatgaccataatgcataacattgataggccataatgcataacattgataggccagtgccaaactgccaatgtgatatcatgattcattacctatctggaatgccattttagacccaaaataaaaataggcgtgcaataatgatcttgcagaatgctgggttagcttatctgaaaggctatccttgctagttgcttactgttcaacaccaaatggcagtttttacacaaaatttgagttttcggaggcaaatatttcacacaatctctatcacatggaaaatttcaaagaatctgcaatcgctatcttacttttcaagtgtgaactcatcatcagttcctcctggtttgctttctgctaaccgtgtcttgagaatctttcaccacaaccatactacttttttcccatgtgtaatacggagtataatctacagggaaaaggagaaacggagcaggtaaagttcttgcaattgtaatgcctatagttgctgccatactggcagtcactgtaattggcttttgtttctggaggaggagaagaccagaaaaaacacctccaccaggaccgctccgatgtgagtcccctgaagtctgagcacttaaaatcatgtggtaacaaattaaatgattcatttgttctgtgttcactttataattgatctatgccagccgcatctcgttcggaggactttgagagtattgagtcactttttcttgatctatcaacactccgaatcgcaacagataacttctccgaaaataacaaacttggtgaaggaggatttggtgttgtttataaggtattgataggcttctagcatctttatcgcaacaaaagtaagtagaacctgcgccagataacaggtatatatattcatttgtgcagggatccctaccacatggtgaagagatagcagtaaagaggctctcacaaagctctgtgcaaggaatgggggagctgaaaaatgagctggttttggttgccaagctccagcacaagaatcttgtccgtttggtcggtgtttgtctagaagagcatgagaggatgcttgtctatgaatacatgcccaatagaagcttggataccattctttttggtgcatttcccctccgtgcattctaaaaatttgtcaacattaatttgcacaagtaattcatgtcccctgatgcttctcattttcatgagacagatgctgagaaaagcagtctgctagactggggaagaaggctgaaaataataaacggagtcgctcgaggaatgcagtatctccatgaagattcccagctgaagatcgttcatcgggaccttaaggcaagcaatgttcttctagactctgattacaaccccaagatttcagacttcggcttggcaaggctcttcggaggcgaccaaacacaggacgtcacaaatcgcgttgtcgggacatagtaagcacatccagtcatccatcaacacccatgacagacagatcaaagattgtgcatcagatatcgtcaaagttaaccatgttcttaatttatctgcagtggatacatggcgccagagtacgcgatgcgtgggcactactccgttaagtcagacgtgttcagcttcggcgtcctggtcctggagatcgtcacggggaggaggaacagcggctcctactacagcgagcaatccggcgatctcctaagcattgtgagcaccaccaacttcttagctcaattgagcaaaaccaacattacatttctcgcagtgacaattcagttaaaaaaatggtgatctctgacgacgatgcagatatgggagcactggaccatgggaaccatcatggagatggtggaccggtccatgggcgagcgcgcggcgggcggcgagatcgcgaggtgcatccacgtcgggctgctctgcgtgcaggagaacccggcgagcaggccggccatgtcggcggtgaacgtgatgctgagcagcggcacggtgtcgctcaaggcaccgtccaggccggcgttctacatccggaagggcggcggcgacgacggcggcggcacggggtcgtactcggggtcgttcgtcggcaccttgccgtcgtccggcaggtcggcgcccatgtcgcccaacgaggtgtccatcactgagctcgagccgagataaggaagaaaaatgtagcagagccatgtcatgtcacaggagtgaagggctccggggatgcctaatttgtgattttgtgtgctgtgatggtgtcctcaagatgctacaatgtatagaaacaggcagtaatcgttggcaagaacaaaatgccagcaaaacagtatagcactttagtgttgtcttttaactcttatggcgaattatgctgagataattgcatgatttgcaggtgttcattacaaatatattaccctcgtttcatattataagtagtcttgacatttttcttactttaactttttcaaatttaactaagtttataaaacaaaattaacatctacaacaacaaatcagttttattaacatgtaatatatttttgtagtatgtttgttttatgttgaaaatattgttatatttttctataaatttaatcaaactaaaaaatgttgattagttaaaaaggtcaacttatataatattgaaatgaatagagtagtgtactcactggtacatgatttatgtggttgaacatattcgagcccacatgtctacgtatgccaaatgctcaactcaacaggtaaatcaagatacataggaggaggtaaataaatcatagtgcactggaggaggatctaccttgcaggacattgccagatattcctagggggaatgggaataggtgttatgtggatgctgcttgggtgaatggtttagcacaatatttttccacatgccaaactctcataatgcgctctttataaaagctagtactatcttgatagctcaatcttctttgtaggcagaattactggctctgatggcaatggagatcgcaaaatttcttgactttgcaggtaccatctttaacaataagaaacttcgatgctgaaccatgacattggagtctcagacggtcagaccctgaaagtttgatgcaagtcaaatggattatcaacagacaacagggtagccgacaagatagccaaggatggtagacatgaacaatcttctgatacggttcatattttgtcaaaatatgttgcatatttaaagtttttttttttttaaaaaaagaggccacatgtctacagtgaacagtgcgtcagactggcagtgcagatagcaattacctttctttaatcctcctgttaatcacagattctatagttttaatccatcgcccatttgacatcagatcatccctgtgctgtgtgctcgatccagatctcccgccggtagccaccgcgcgtggtcgccgcggcggcatcggcatggcgtccgagctgcgcgccctcgccgcggtctcggccgccgcggccgcggccatggcgtacgcgcgcttcgccaccgcgcgcctggccccgggcgtcccgcgcctcgccgcgctcctcccggtgctcgccctcctcccgttcctccccttcgccttcgcctccatccacctccgcaccatctccgccttctccctcgtctggctctgcgccttcaagctcctcctcctcgccgcgggacgcgggccgctccacccgtcgctcccgctcgtccgcttcgccgcctgcgccgcgctgcccatcaaggtcgtggacgacgagaagcggaaacccaccacctccacctcctcctcctcccggcgtctcgctccggcgttcgtgctgtcctacgcggccaaggcggccgtcttcgcggcgctcgtctcggccaggtgctaccgggaggggatgccggcgtacgcggtggtggcgttcgacggcgcgcacgtctacctgatgctggagctcttcctggcgtccgccgcggcgaccgcgcgcgtggtgctcggcgcggagctggagccgcagttcgaccggccctacctcgccacgtcgctcgccgacttctgggggcggaggtggaacctcatggtccccgccgtgctccgcccgagcgtgtacctccccgtgcgcgcccgccacggcgccgcggcgggcgtggccgcggcgttcctcgtgtcggggctcatgcacgaggtgctgttctactacatcaccctcgacccgggctgcaccacgggcgaggtgaccgcgttcttcgcgctccacggcgcgtgcgtggtggcggagcggtggtggctggaagaagctcgtcgtcgcgcgtggaggtggagggcgccgcggcgggcggtggcgacggcgatgacgctggcgttcgtgacggggacggggtcgtggctgttcttcgcgccggtgacgcggagcgggctggacaaggccatcgtggcggagtgcgaggggttcatggccttcttggaagaggccgggtggaaggcggccgccgcggcccgtttgcttccgtcgtgaaggcccatgttgtaaccgagcagctgttcgtgggctgttcagctgattcatgttgtaacggcccatgtcaagtctttccctttgtattgtggcccgcggcctaactcgattcacggccaatccaaaacaggttaagaagcagtccaactcgcaatgagagaagtgacgagatggatcaaacagttgcggaataagtgcacttaccatccctcatctttacgtagagtttgtttgatatcccttaactctaataccaaaaatcttcacccctaaactatacaaaaccgtgtaatttggtcccatagcagtatgaatgtttagtttcacagacgtgacatcctagtcagcaaaaataaaaaaaaaatgtggggcttgcttgtcaggtcccttttgttccttctcttttattcccaagagagggaggcgaccgacgagagagtgggggagaggctggcgagcctaggagggaggggggagacggccgactcacccttccgagctcgccgacctccttgcaagggaggtagaggcgagagagggaggggaggcggctgacgaaaacggctgggctcctgccatcccgcgtcgcttgcagatgcctcatgctgctctgtcctcgtcgattgaatctgttgctgcagattcatgttgctggccggagtgtggagtcaacgcaacgcgacggctccagtctcatgggtgcggcattggctagagaggggaagggcggagcctggtatcaccgagctcgagcggtagcctcgactcctctctcctgagtagcacgggtggcgggagagacgacgatagcggcggtcggcagtgtggacttgccatcatccacctcgaccttgtggtggcgccatcctcaccctcagtttccccacacccgcacgttccaacgacccctttccttgccctcatctttgatgctgctggccgccgtcctcatcgtccgcctccccgcacctcgccttgacctcgttggtcacaccttccttggcgtccacctccccgtgcgccgccttgacctcgccagccgcgccgtcctcggcgtctgcctcccgccttgatctcgccggtcgcgcctttgtcggccttcacctccttgtggtagaatggctgcgggtggaatggctggtagagttggtcggatgatgtggaggggcgggggcaaaggggagcttgtcaggtgcgggaagcgataacggcagcagtggtgcagggcgaaggggatgttctggcggtggtggtgcaaggccgcagtggtggaggcgatgcggggctgggatgaggggcaccatgcctgacaagtaggcccggagatctgttatgccagcaaaaacaaggtaaagtaggatttatattgctatgggacctaagttgcatggttttgaatacttaagcggtcaatatttccggtattgagaattagggatttcaaacaaactcgacgtaaagttgagggatggcaagtagacttattccaacagttgcatgttggtgcccatttgccaaattccagccgaatggctttcctaaaaaaaaaaggttcgcagtgtgttaggaacaaaaacgaatttcaaatcttctttttcacatcgccactgttgtgtcactcaagtagacaaggatattgagaa

SEQ ID NO: 11819 - DNA, 4173 bp, Oryza sativa
  unsure (1)..(4173): unsure at all n locations
tcctgcagccctgcacttagccatgtattgtacaaaggggaagaagaaatgtgtgttctaacattgtgttacattcttgaaatatttcagcaaagatggcatatgggtgggtcatctgctctctggttactcattgcctatggaagtgtcacctcaaggaaatggaaaaagttatagtgatgttggtggaatgtggaagcattccatcaaagtttcatatgatgccacgaaggcagcatttcctggtggtcaagttatagcacatcttgatcaaaagtaagtgtcatatcctttttgtcggtgatatctaatcgactaaccgtataaaagatgctacttcattaccttgtgcttctctgatgtataataatcttgaactgttttagtttaacattctaattctatcagttggtgcttgacttgtaggagcttcaagggctggcaaaagaatgctatcatgagctacttgcaggagctgaacataaggataggaaaacctaatgatttcatctaatatgctgcagcaggtgtccacataaaatttttctgcgtcgtatatcaggtttgcttctactcatgttttggtgccaaattcacttctgcataattttttttttgagaattacacagcacaacacagacacataatgcatgcacactcacccctatgaacgcacgcacgcaaaccctacccctatgagtaggggtggaaacgggtcgggttcggtcggatcttatccttcccatatcctaacccacatttcataatcgggatcgggtcgggcacgaatattgtcggatacgaatacaagcacggataatatcgggaataaatacggaacaaatacgtaccaagacggatacaaacactatcggttgcgaatacttattcagatatgaaatcaaagcaacatccatatataccatataggcaataggcgttcaaccagtccatatatgtataatatgaatatgttagaggcgtagggaatagtaatgcctatcagcacaacagaaccaaagtggctgtggttgcatcgtgtagtaccaatgcatttggtgccaacacttcggtaccagccagagatgcacctgtgcttgcacagatactagtgtttgcatcaccactagccattctatcctaatcctacaggcaaccaacaaaagtaaaataagaaaaaaatccttcaagtcgtaaagtgatgttgataaagggcaataaaacacttaacttttgctcacctgatggctgggcctggatgactgctgagaggtgactaccagaggagatggtcggcgcctcggcggtgaccggcggggccttgcgacggtggtcggcggcggtcaaacggctgtcgcatatctaccggcgattgcaacagtggccagcgggcgcgggtacgcagcaacgtagccactagtagctagcacatcgcctagcggctagcatgcgcggcggcggtgctggctgtatgcctgtgcctgtgattggttgctcgcgtgcggcgtgcggcgccctctggctgctgcctgctcgcctccctgacctgaggctgagtgttagcgctcggtgggccttttgggctgttatgcaattgtgttgatgcctggtggtggtagcagtccgggtcatatacgggtagttaaccgggtaatacccgcacaatttaccggatactctgtatccgtcggatactgtcctcctgaacccgatcttatatccgtcagaaaaaatccgtttttgaatccgatatccgtgtaagcactcgggtatcaaattttgacccgaatttgtcccgtattaatacgggcgggcgggcgggaaatacccgccccgttttcacccttacctatgatcatcttcgaagactaggccggcaaatcctggagatttgacacgcccagattatgtaaatatataatttgagggaaatgtcaattttcatctttgttaaagtcttttgagtttctaacgataccagtatcatggattgttcgttctatttttttctttgtttctgcttagatcacatgtcttctgttggagaaagtcctgaaaatttgcaaaatagtagttcattaactcaaaattgctggcctatctgaggcctacccaatattctgttgaattttgctaacatccgacatttttatagtagaaactagaaaacacaacattatcagctaacaatgctgctttaatattntgtcaaactggccccagaaacattntaggaaggcagaaatatangaaatgccacantngtttttggtattcgtgcaagcaaatatatataacaaaacccaggttttatgattgaagttgcaaaatcaaaggggatttttttagaacacgcaggagatctgcatatcatttcattaagatagagggaagaaggtggacagcgttagagaaaaactccgacacccacccacccgaaagttcaacagcaacaccacacacccacaaggaacaaaacggccctagtatcctagcactatagccttagacaaaagatcatagagcttagaagctcctgctagtcaccgtcctggtttaaaggtttcacaaaggtccaaccatattaaaatctttagttattttttatccactttgacctattttgttcaaggcattaataaatttatccagctagagtaattaattaagtactaataaataactcgataatattcacagatgtattgcatggcatttaaatgaaaaatgagattttatgagaccttgagaccacaatacctgtgttatgtgccacaaccgtagtatgtagggttttctgcaattttgacatgagaatatgggttttcttaaccttactcttctttgtatggatgactgaacaacttcactcctgcggctgcacaacaactgcaaacatggtttctttttcatgaggtgtaattggttatggtattctctcctaaaactcaggtaacaatagtgcctacaactatcattttactatatactagctaaaggctcgtgtgttgcaacggatattataagagataaaagcaaaagcaaaagcaaaagctacaagtttatagcataggtagttgattaggcatataatgccatattcagagcaaaagcattcacgtgtggagaccttatggattcatatgtcagcttgttgacgttggacgccaccactagcatcatttaaagtagtatagagtatagataacacttctaacataaacctttcaaccaaattaaaattaaatctcagaaaattagctagagttagatgttttttttaaaaaataaaaacagagcaagagaaaacctagatgtctctcaaaataaaaatattaacccaaaagtgatagcttgggtgagcaggttaaccccccttgctgtggtttatatacccagctaagaccttgttttgctggccagtgttccggctcattccccatgggttagctaggatattcaactaaccaaggcctaagatgacatctgtaaactcactttctacgtgtatcataggcttgtattgtgtgactcacagtttgcatgtctggctctggcatatgtgcagggacaaatggtaaaggtgcagccctgtgccagggaggcaaaggagaatgcagcctcgtgagttgatgatgttaatgttcctggatgctacacatgagaagtgagaagcaagcaatagtcatccttaatattgcaagggaagccaggatcgatgctgctctgaagaaacggtctagagtcatgtcaggaaaggtggcagcaaaccatccagctagcacgttatctaggctttcatatactagctgtctagtaggagtatttctcaggtttgtgcatatggtggccaaataaaaattagtacaaaagagacccatataaaaagggacacattttagtattataaatctggacaatagtgatactaggttactatattatgaaacaaatagagtactttgttttggggatgcaactagttggactccaacagggaactcttgaacattttttcttattataaatagtatgactaccaaagtaacaaatgactatgtgtgcacattatagaacaaactttttctatgatcagtgtaaaccttttgttatatagtttagcagtcagcaatgaaagctcaaccttttaactgttacacctgcataaaagg

SEQ ID NO: 11820 - DNA, 607 bp, Oryza sativa
ctaatctccaaaccaggagacctaaaagccgtcttgtacatatcctcctacgccataaagatttgattgtagccggcattaccatccaaaaagctaatcacctgatgacccgaggtatcattaatcattatgtcagctataggcataggatattcatcttttggagtagctttatttaaatctctaaagtctatgcaaactctaatcttaccactccctttcttctccaccgggactatactagatacccactccgcataacgacatggcctaataaaccccgctttcaataaccgataaatctcctccttgacccggtcatataacaaaggattgaaacgataaggtgcttgtttataaggcctaaaacccggtttaattggaagctgatgttcgacaagaccacggctaagacctggcatctcatgatactctcattcgaagcaatcaacatactccttaagtagctcgattattttaaccttataatcggctgtcatgtttttgtttacaaaagtcggccttggcttagttccatcacctatgtctatttcctccaatggatcggccgatgtaaacccatgaccaaccttttctacttcgtcaa

SEQ ID NO: 11821 - DNA, 20261 bp, Oryza sativa
ttggatggccatggcgactgaccttagcagtagcccagagctgctgctacaacgacagtatctaatctactaatagcaatgatctgcaaccggagtattcagaaataaaacaaattaaggtgcagcaatacataaaaccggtatatgcatatatatgatctttagagtcgtcatataataccatgatcatgaattggctcctttaacaaattgtacatactaaataaatttcaatgttgttgaatagggacagtataaatctgaagaagaaacaaatccaaataaatgtcagtcgtgttgaatagggacggtagaaatctgaagtgacaaatccaaataaatttcaatcctattgaatagggacagtacaaatctgaagaagagacaaatccaaataaatattgggacagtggaaatctgaagaagagccgaaaccaaatcaatactcgtatgtccttaatccattgataatctggtatataacatgaacaaatcaatcgagtgcgattcaaaggagaaatgtaagccaataaattgaatgaacatatatggttatggttcaagaaaaggaggaagaagcatacctttggtagatgaatatatacccctgaggtttcttgaaggtgaggaggcggctgaagctttaaaggcagggaaaacgaatggaacgatggtttccggtgtgaaatagtatgcagtaggaagtgaatcgggcagcgtgtgaggattcgaccgaacaggatgtggaggatgatagtttcttgaagttgaggagacaacaactatcttgatgacagctataaagtttgagcgatcgaaccacgacaggtgagcggtggtttccatttggaggtgagcagtccaagagctggcggggaaccacgacgctacgcaggatctggaaggtgaggcgccggcgccgcactcgcagtttctagcggcgcagggagacgtgaccgctcgaactcaagagggtaacgggaatggtggtgtggatggagtgtgggaagatgcggtggaaattgggccaaggagtgtggactgggcttgatggtgtgtaaagttgggcttgttggccagcaaaagaaaacagagggactgcacattaaccattgatatttgatccaatggattgccaacagattgaccgggagaagcgcttgatcgagatccaatggctaggagaaaacggggtgacgtggaagcatgaggatgcagagaattgctagtagtggggatgattgtataggtatataggattcactattttttttgtaacatttgaccactcgtcttattcaaaaaatttgtgcaaatataaaaaacgaaaagtcgtgcttaaagtactttggataataaagtaagtcacaaataaaataaataataattccaaatttttttaaataagacgaatggtcaaacagtgcaagtaaaatgtcaaaattccttatattaggggacggagggagtaaatgtgtatataattttgctagctgactcttccctgctcaagaaggttacacgtatctaaggcaaactatctaagtttacacaagtacacaactacaagtggaacatgattaaattaaaagtttcaaatttacatgaatgatcaaatgattactaatgcttaatattagttatctgtgaaatcacaaattctttttgattatgaaatgcccattgcaatagttgcaactatcccccaaaaaagtcctagcatgtgtttaggcattgatgattgacatttgggaggcaaagagcacaaaacaaatgtacagcatgaaacacctgagtaagctaatggcgcagatgtttctgaaactataaaagacatgtaaagggcaatgacaaaaaccagtttgtaggaagctttacaaaacaccctaccatacatgctaatacagagaatataagcatggaagtagatctatacctatctcaacaaacatcgttggtgtattggtgactggtccatggtgagtagcttccagtgtaatcttcacaagcaataagaattagaattttaaaagcagaaagttcagaagaaaaaaaaaatcatcaacagaaaaggtacctcaaactctggaacaagaccttggtctaccgcaatcttttgcatcaaacggagccatggaccaattcgaggattgggcagagctgcccatcctggtctccctccttgaggtggcgtctcatcttctcttagatgtggcacaccttaaggtgcgacacaccaaagaaaaatgacaccatgtttaatataaaataattgaatacatgtggtactatgaagtatgaaccattaatttacacaaataagcatatgtattgcactcaaaaaagtacagatgcattatttgtaaacaaacaaataacaaaatacaagttcagtaccttttcaggtttattaaccaccatttatgtcatatcttatttaggtattcaatataactcaaacacagaaaaatattaaacatttaacagagccagggataaacaagaaacatatagcactttatgactaaaaataaccaaccgattggatggacagtaagcgcaggacggttggagacagcagtgtgtttgctgaggaatatgacctcagaaacagcctctccagtggctgcctgccaccggttgtcaagatcatcctccgcaatgatgctgcgttcatgcttcaatagtcgaacgtccccgtttgtaaagctctccatcccctcctacaaaacatataccatcagagatttatatggaattgtcgcggcattctaacaaattaaagaactgcaaaatgccagaaacataacatctgatggatgttacaaaaaaaattgtaacaataatttttgaagctaaaacttaataaaacaaacagagtcactggaacataatagatatgtgttggtgtacatgatctgcattctgatcactcattgccttctatgttgcctgaagtagggaaaagcaatttacacgcagacaaaaccttggaaagttcagggacaccggattctgaccaactctttttcgacataccattatttatcactgatgatagaagaaacatagcactgttattctccatggttctgctatgcgtctttaggaacaggtttatcagctccatagtcacctaaatctggatttatttgttgattgaggcagatatattttcgcaaacatttgttctgatgaggctaattgatcaaattggtgacttaccttcttctgccatacacttaaattagcaagttctattattcaaaggtaagagacagattccccctaatattttatggaggcgtatagctgtaagtgcacgatatctgcttgcattattcatggataaaagctcgagtgtcatctttaaatatatcgacgttcttatatattatcatacatacaaatggtttaccttttccttgtcactaaaaagaacagtatagacgccactctccattttgctgtgactcatcatgtcatgtcaattttaatgtggcagcatgtggacggtaactatgtgacaaagtccagaggagcttgaaaagctaagggcaatatatatttttatactatcaatatccattcatgaattaatttgcaatgatgtaaaaacagattataacatccggaatcgtcctgcgatctgcgtagcaactagtatggacatgcaaatctctatctagtatctgtaattgcataaacccgcaccaaaagcgcatcctataacctgggcacctggccgcatatgcttgcaaagctcagaacagaagaacaattccagtcttcagaaaagaaaacgcctgccgcatcgaacaagatacctgctccacaaccataaacactagccatagccatggcccaaaccctaattaaggagcagcgcttccccgtgctacactacaagtcttggggaatttgagattggggtggatgggactagataagatggggggcggtgggttgcttacggggatgggcgggccgggagaccagccgggcatggcgaggaaggcggcggctgggccgatagacgccgggtccgacgccgtcgccaccaccagcaccaccatctcctcttcctcctactccgactccgaccacgcctccctctcctctcctccaccagagcaccgctcgcgctcgtgctcggctgctgcttctcttgtccaggagaaaaatcgatagaatgccgctcctctacggtgggccgtgggcttgataagttgtgatttgtctagggcctatttcaacttcttttcttaccttatactccgtagaaaaagaaaagaacgaaaatattgaaactcaatgtataaaatggagttctatacaatttttcctttttttttatttttgacagtagacgtagtcacgtagcacaccacttatacatacagcaccatacttataccctaagcgtaatattcgtgggtactacgatttgaatcctggtgggtaaagttgtgaaccatcacaccactaaggctgtgaaccatcacatcactaaggctgcattcaatagggtaacattgtgagataatttgttttgttttccgtatgcacacttcccaaactattaaacagtgtgtgttttgcaaaaaaatttctatatgaaagttgctttaaaaaatcatattaatccattttttaagtttaaaatagtttatactcaattaatcatgcgctaatggctcacctcgttttatatatcttctcttttcctctcttctcaaactcaccctaatgctttcttcattctattcattttttttattttcaagatagggctatttttatgatattccatgtaaacttaccaaatatttcataaaacgggttttccgactagaaaaagcttgattgtttgctttgcggggaaaagtgttttggtttacatattacaccggattttaactttttatgataatctcttactaggaataatatttgtttaatttagtctcacccatcatgtgttagattcatttttttagtttgcgtaggctctctgcctaaagtttttggtcttgattggcaggatgcgcactttgcaactccatacaaaatgtaccatagcagcgtaaattttgaaatgaccaaatgctgaaaaaaaaaagctccgtgcaaatgctgccagtgagtagcatatatgttactgcaagtttgcaattaatccgctgtagacctctttcaggttagcatggaagagcataaaagcaaacaatgtagagctaaggctgtgtttagttcacaccacaattgaaaatttagttgaaattgaaacaatataacagaaaagttggaagtttgtgtgtgtagaaaagttttgatgtgatggaaaagttgaaaatttgaagaattattttgacggcctaaatatgcagcttcatattcgaagcaccatagccttatggtgtgttcggcaccccctcttcccaacccctctccctcttccatacgtacgcttttcaaaccgctaaacggtgcgttttttgcaaaatgtttctatatgaaagttgcttaaaaaaattaaattaatccatttttgaaaaaaatagctaatatttaattaattacgcgctaatgaaccgctctgttttccgtacggaacacagccttagagcatctccgattcaggcccaaaagttacttccttggattgggactattctaaaaaattttagacctaaaaatctatttcatctccacctaaaaatataatcccaaaaattagttggttgaccatataggattggatgggcccataattgttaccgacgctttgttttgcttttttttaacatatgcacggatcaaatcactcctgatcctgccactgcccttcctaacgccgccggctcctgctgccgtcagagaatccctcgccgaccacggttgactgatggaagatttcgcctctaatgtggaaaagcggaaggctagctaatcctctacacgaccatgacatcaatttgaaggttaatatcctaggcgatcctcatgttaggattttctctattaatcacgttctttttttttaatttgatctgataatatcgctaggggagaaagtttctgttggtgatgaataatggtttggcagttaatttgatctgtgatgaatcatacttactcttgtttcaagggcttgtgcatgaatcatcgtccgatgatgacgatgatttttttgggtcgcagcacaaatcatgcatagctattggtactctgtcaatacatcaaaacatggtgggtatgtcatgggacatgaagtggttgatcgcaacagagaaacatgacacttgaaattttaccaagattactttttcgataatcctacctatgacctagttttattcaagcacaggtttgtattgagccaattttatttgatttatctttgttatatgcatagatatgtatgtctcattagtaatgactacgcaggaatagaatgagcagacccctgtttctttgcataattaatgcaatagaggatcaagatgactattttgtgcagaagataaatgcaatcagtatacttgggttaagttgtcatcaagagatcactgcagcaatccgtcagtcagcttatggtatagcagcagatgctttggatgaatatgttggtcttgcagaaagtaccgctatagagaatctgagaaggtatgtgaaagcaattgttgaagtttttgaacatgagtacttaagatcatccaatgagaacgatacaactcgattacttgcacttggagagaatagaggtttccctagtatgttaggctcttgttaacggtgaaatttagtaagccccgaagtcatcataggcctagagtcagtatcggcttcagagtcatggaatcggccgataggaattatcaagtcgtcaatagtcggattcttggtagattcggttaacgaaattaatcaattaaaggaactttatccagaaaagactgagttgaaggaggatgcagcatgacagtttatctattaattagaaagtgtctgttagtttccttttatatttaagaaagtgtgtttagtatccgataaggattttatgttttcctttatctttaggaaagtttctttcttatccaacaaggactagtatctacccatgggtataaatatttacacccggggtcattgtcaattatctcacagatcaatgcaactactctcggcacattgccaccctctttcccgaggtttttacttatcacggcggaacttggcacctaacgtggggctgcatcggttttcgatctccgatgaaggggtaagtcctacgttcctccggccctggcaattgtatcggctacattagtgttgttcaaggctgcatcgcttcgatgtcttggatcactttggttcggttgacattttttcctacctatttatcacatatcttagttaatctagtttatcatcttaatttgatcatatcggctgagattcgttttagggtttatgctggtattgactaaattatcttactagattagattaactaaggtatcgatcaccctgaaaaatagtcaaaggcttgattgtttagactttatgcttctttgcatactttgcgatgcatcatccctagtcgtacttagaatcataaaagctaacatgtctttgattataataagggtttcatcagggtttcaaccgatgagttccagccgatcggctctttggtgatcttcaatttatatatcttgtcagttgcaggatcaaactgactgtcatgcctgcatctcatcaagatttggacctgcactggacctaagcagatcttccaggccattgtgttcgtcgacttagtttgtgccaccacaaatctgacaccatcgaccgagcgcggatttttcatcaatagctctgtagaccgtatgcattgaaagtgtaagaactgccctacggaatgctagggtatgtactaagggcacgtgcatgagcctataatgattctagagtcgttgcttcgaaagatctctggatttgacacgcttcacttttttttgtttgcacggatctcataacgatatcaatgtacttcatcgaatccccactatttgcattgcaatttggaggagatcacttcggaggtgttcagctcgtataggtgcagggctagcaccaagatataaaattttgatatttcattattttgttttagaacatgttgttatgtttattttctacttcagtttggtgtggaactatgtgatgttggtcgttgtacgtgtttaacgcagtggcagggttatctcaccaccagaaaaagggttttttatggctgtatcaaatttttttcgttggcggtcacatgagaaatcgacttgtaaaattctaacgaggggtggagggtttaggaccgccaacgaaaatccattttcgttggcggttgcttaagaagtccgcttgcaaaaataaccctttttttaaccggcgtgcctcttaactagatttttgctggcgggtactaaaagcaccgcccttgaaaaaatccacgcacattgaaaaatcattgcccattacaaaaatcaccacccaccactccttatccacaccgctccaaattacaaaaatctcctctggttcctccaccagcatccatagtacaaaaaaaccggaccggctcggcggttgaaccggaaaaaaccagaaccagagggctaggcggctcggtttgctgtaaagaccgcccctgcatttgaaccggaataaaccgcctgaaccgccagttttcatgtgaaccggtgaaccagagcgagccgagccggccggtttgtcatgccaagagaggatgggccttgatgggacagtctaggccttgtgcacgtgcatgtgtactactgaaaatagcaagaaaaagggatggaacgggggttcgaacgctggttggctgactgaaagccctatgcatccaccacccagctaactttcacaagtgataagaagagaatatgcatacaatataacacgtcgggttcaacattcgaaccgtgtgaaccggcggttgaaccgctggaccggtgacccaaggactcgagcgattcgatcgccggttcggttttttcaactatgccagcatcctctcctcctcccccttcagatccacccaccagcatcatctcctcctccctccccataggcagcggcagtggctctaacggcggttcttgggcgatggcggtggctccgacagcgatgcgcaacggtgacggtgataggaggcgggcgcttcttcttctcctcctccccctccctctcccacgatctcactgccaccacctcctcggcggcggctgggcttcctagatccggtggctccaccgccagatttgacggtgacagttgtggggcttggtgaggcgagaggagctcagcggcagtgaggtccgatgaggcgggaaaagctcagtgacggtggggcttcccacatacggtggcttcctcatctgatccaacggtgaaaagcatcaactgctgctcggtcggtgacggtgacgacgacccccttcctttctcccggccagattggtggtggaggcagattcggtggcgatgcttctagctgttgttgttgttcttttttttcatgttcttttgtttgttcaaaatgcttgtatgcgtgttcacttgcatgctaattgcatctaatgaactctctggatgaggatttgaatcgtagcctgaaaacttggatgcgaaaatctgagttattttctcttttctttgcgaaaatatattttggggatttattttttttcatggaaaatcattttcgctggcggtttgcttaatcttgccgactgtagaagtcgattttcgttggcagtccacttaaccatgccgccagcgaaaatctatttttgctggcagatgaagcccgcttgtgaagatagcctattttctctggcctttgatcgcatgcgattagcttagacgccagcaattgatgcagcaacggggggttcccgatctttcgatgagaggaggataaactttgatttgggggaggacacgacgttggcggtccgactacaactaccacaggggtgctgcgccttagcaaccggtacaccgactccacgttgttgttgttcttgccgtgccaagaataaccttgaacctgtaagcaatcgaagaacaagcaagaacaagttgacaaggaaacagcttacggcacttgtcaaatgatgaaactgaaacaaaccaaaatggggttctgaatacaagtatccgggtggtctagccgacacacgcgagtacaagaaagtagctgcagctaaacttacatccaaacaaaacccaaagtgcaaaatggtggctgctaggagtttatataggtgaaggaatgaccaggagaggaggtgggagcaaacccttggttttgtggacccctaatgggctgtaaagatacaaggcccaagcccaagtttctgatgtgaagaactattttcgtcattctgagcagcctgggtcaaatttgatggtgaggctacacatagctgaaagtagacgacgagatctttccaacaagtactcatttgccccgtttgccctccggagtgaagagcattgacttcatcaaatcagcgctgctagtgctgctttcgatctggttcctctcccatattcctaacaacaagtagatcacaacaaccatttagtagcacccaattctgagaagaacttgtatgattagctaggaatgactttacctgataattaagttcacgagctcgagctctagtcattggtccttgctgtgcaataggcatggttgtatcgttggaagggatgtcctcatcaggtggtggaggcagattcggtggcgatgcttctagctgttgttgttctttttttccatgttcatctgtttgttcaaaatgcttgtatgtgtgttcacttgcatgttaattgaatctaatgaactctctgaatgaggatttgaatcatagcctgaaaacttggatgcgaaaatctgagttattttctcttttttttgcgaaaatatattttggggatttatttttttcatggaaaatcattttcgctggcggtttgcttaatcttgccgactgtagaagtcgattttcgttggcagtccacttaaccatgccgccagcgaaaatctatttttgcttgcagatgaatcccgcttgtgaagatagcctattttctctggcctttgatcgcatgcgattagcttagccgccagcaaagatggattttagccgccagaaaaagcaatttttttagtagaccctattatcttctttatggattaaatccattttgcatcgattgaatatacaaccgcttattacaaaggccttagttaaaagtcaaggataaacgtatttaacaaagatgacgcattaaaagccacaaaaaatgaggaagaaatttgtatggttgttggtcgtcttcacacctttgttgttagacccaaaaccccaagctaacatgttagcttgaatagtacatgcatgtaactatagttggagatttatactatgtcatttctacaactaaattattttaagaaaaactttttggctttagtcatgcgtcctaaataactcaaagaagtaggcccggccttcccttcgaggacgaaatcttcagcatatacttaggaaaggcccttaatccttagcatatacatactcctactacaagaaagttaaagggcgaaatctagaaagaagatagattagttgccacggctaattattaatcaaatcaatcaacaaaaatacaaaaggttaaaggtgctaaatccagcttgtaaagcagggttgcggcgtcagctgtgcgaaaagaaaaggaaaaaaataggggacaaaagattcctctcctgccaatcaggcaatcaccccacctgtgttttgtattagctgctgcggagtaaggctgtgtttagttccacactaaaattagattttagaagtttaaaaaaaaaggtagaagttggtgtgacgctgtgtttagttccgaaatatttcttcaaactttcaacttttccatcacatcaaaacttttctacacgagcaccgctacggtgctctctacttatagtattctactacaagtagaagcaatctgaaccattaatttataaaggcaaattagtattttactaatttacggttaagggtaatttttaacttttatttttttcttaatagtaggatcagttcgtctgtgtcaccgctccttttgttctcgcgtgcgcccgactccggcggcagtgcccactccggcatatgcgagctcctccgtggctccgtcaaacagataatactacaaagaactactgaacaaagctatatagtcaaatcgagcagcaagagcaaatgtgctgttataaactcaccatgattatctttaaaacctatttgattagtttctccacatgttgtgttttcagttcttaaataattaagccattaacatcgctaaatttgtccaaggatggtaccgaagtatttaagttcagagtggtcatttgctcagttcagagcgatgctcaaaacaccgtaatattgattggcttcgatggcgttgaaatcgttgaattgatctgacttcttgtcgtggttcagggcttcaggctcgctggttatatgtctccttctcgggtctggcgtggaacgcgtactgatctccagcatttgagccgctgggcaaggagtagcctcccgaggctgatcccccaccgtaatcccgcaacgatctcatggaagcacgccgccgatctgctcatcgcatctgctccgccacactcaccctaaacctagcacggcccaacgatgctcaagtgtttctaactgatatgcaaaattacgaattcaaccatcccgtccatatttttttggacaattataccctctaacgtttctactaccgctatttaagatagtagtataaatagatctgatccattagatataaaaagatcaacggttttaattaatttatactccgagtagaaagcaccggagtgggactctttctacacacataaaacttccaacttttctgtcacatcgttcaaatttcaaccaaactttcaattttggagtgaactaaacacagcctgagtaggaaaattttgatgtgatgaaaaagttagaagtttgaagaaaaaagttgagaactaaacaaggcctaagcttgcactgtccccgtgctgtcctatttctctccttcgattttgcacagcacacattgctgtccaaagcattgacttggatgtccagtggtcaatccttacgagtcccacgagtgatcaccggtaagttcttttacaaggaacattgaccaaatttaaacttggaacattggtcttttacaacagaagtttgcctggtccaaatttacaacaattctagatttcagttgaccgaaacctttttttttttggcaattgcttatttgaccccgttttgaactgtaactattaatttgaccatactttttaaagtttgcttatttgaccattcttttcaaaagtgaagcttccgtctgactctgattcgctaactccgttagggttagatttcttttttttttaaaaaaagaaaatatttctaatattactaatgcccaagatgccctccaaaccctatccaaacccaagactctctctctctatcgtgcggcggcggagatctgtgggggtggcggcggcgagggggcaacggctatgttggccgcgcgtcgagggagcagtagtggcggccgtgcgaggagggagggagcagcggctgcatcggcagcgtcggcgttggccaagcgcaaaggaccggtggcggccgcgtgaggagggaccgggggcggccgcacgcgggaggagggagcggctgccgcgctcaaagcgaagtgagggagcggcggcggctgccgggctcggagcagagggaaggagtggcagtggggctgttgccgcgcggaggggcgacagcgctggttgctgccgtggggggaagggagggagtaggggcagcagcggcggctgctactgtgcggaagggaggcgaaggcggcggcggcgtcggtgtgcgcagcagggagggtggcggaggccggcgcgcagcgaagggagggaggggagccaggcctagcggcgacggctggcaccgccggcacgcggaggaaggaaggaggcggcggcagaagaagagagaagagaggaggagaggagagcagagaactgacgggtgggccccacatgtaatagggtcaaatgagtaagggcaaaaaggacattttatactccagttaacaccgttagaagcccttaacagaatagggtcgtactgtatcttcaattttgaaaagaatggtcaaataagtaaagttgataaaagagggtcaaattggtagttagctttcaaaatagggtcaaatgcgcaaatgccttttttttgtcatctaaaattgtacaccactaagtctaaaatacaatgtgctacataacatataacttagttacttctattgttaattttattagtataaatggtattaatttatcttgggtaattttacatttaaattgtaaatgtctatatgttgtaaatttatttcatatctaggttagaacaactatttatttaacctttatctaataaataagtgattgcggagtgatgagagattagattttatcaagattttgaaaaatgaccaaaagttttctttcttcatacgtgcatgacatctgcgcatcatttattaataagaagaataatggtcgaaagtttttaactatgaaagatctacaatcccattactattttcttactctgatagttttaaacttatctagttacgacttacgagaacaaaatatacaaactttctataaatcattgtatgaggaacgtgaccatgcaagataagtcattacaatttagcactactagctaaacactgaatttggttaaccgtacatgttgcaaatcaagagttttacagatgggatcctctgcactgaaggagaaaacgcagaggtgctgcattagctcatgttctgatgcgttagatcttcatccaacggtgtaaaccagcgtgctacaataaaaaggaggtcgatagtaaaatcagacacggttggctacagtatatatctaatgcaaatcactatagcacaagactcgatcactgtgcaaatagtattctctagtattacagcagatgacctgcatccaagttttactacattggagatgaagggttgacagaagtcagtggtgaattgagaagaaaaattactagggtctacttgcataattatcgagtaattttatactcctaattaatatagggtaaatagttggaaatagatatcttacgcggtgtccatactatgttgtaaggccttgtttattttctaatttattttcccaaaaacgtcacatcgaatctttgaacacatgcacagagtattaaacatagataaaaagaaaaattacttgcacagtttacatggaaatcgcgagacgaatctttagagcctaattagtccatgattagtcataagtgctacagtaaaccacatgtgctaatgaatgattaattgggcttaataaatttgtctcgcggtttccaggcgagttatgaaattagttttttcatccgtgtctgaaaactttttccgacatccggtcaaacgtccgatgtgatatctaaaaaattttcttttcgcgaaacagtgcctaaatgtaataggttcctcactattagaagtttgaaaaacgttgagtaataaattgtgtaaaacacacttatattttacaaatcttctccaacgtttgaaccattttgtttaaaatttgcacatctagctgaagacttattatactcttttgagtagcatagttattttcagaattttaaaataaacaacattctaccatctccctctcaaaagagaatcacaattttatttgatactccatcatcaaatatagaaaaaaaagttgagcatccaatgaatgggacccagatatctcgcaagggctatagtgaaaaacacagaaaaatatcatcacaaccgacttacaaaatacgtactatatactatacagtatacagtctaacaggaaaaatcaagcaccgccttttctttagaattattaaagaagaaatcttaccgttgggaaaagaaataaagaaaatactttaaccccaaccccggtggaggcgacgaggctcttcgtcatcatcgtcgctcgcctttcttcctccccacgcccatctctcctctctctctttctctctcttctttctctctctagaacaaacacctggaggaggagtgtaagtaaaacccttgctccccgcgggcgatcgatccggacacgctgtctctctagggctccgccgccgatcggagatccccgtctccgcggtatggcggcggagatctcggcgctgctcgacctcctcctccatccgcccgccgccgcggcgggggaccgggacccgcccgcgcgccgcctccgcgggcccgcggcgcgggcggggctcgaggccctcgcgggggcgctcgccgcgggcccgccggccgacccggcccgcgcgcgcgccgtcctcgccgccgcgcgcgccgtagtctccgcggtcctctccgcctcaggtagagtgttcccacccccctccacccccgcgatcccgacctagctctggctggctcgctgctccctcccgttttggattctttggtcgttgccggtgagggttttggatttaggctctgatcttgcagctgtaaaagcttggtgctcatgagatgcgctcctgctggtactgccttgttggcttggttttgatgctgtttgtagaactttttcttaggaagcagggttcgcttggttttgagagttggtcctgtgaaatcacgaccagttgttcttgttgattacaacaaccgacctagttatctccccttttatcttttattattagtattagtatttggttttatgtgttttatatcttgtttggtgatcaactttgccaacttgaattgttgtatcccttcctctctttgcttggttgtatgctatctccggagattatctaatagggcatttgatcccctttgtttgatatattttcttgaggccctttgtttgatatatattttcttgatgcagcagcgctttcatgttttgtcaggaagcccaacaccgttcattttttgtgcattctctatccacttctttactcttctccaattgcctttctcgtgcctcattatagtcacacacattgtgaaattgtgttgcattagcacgagtactacaggtgctgcaaggtcacgaatgatcaccagtgtgtgcatcttgttaatatttatctacaatctatttactcgtataagttctataattgcgttttagatacttttggtatgcacatgcatgcattgtacatgtttgttttacttatttttctatgcctagtgatgcaacacattttgctatgcctagggatgcatgaaatccagttttcttatttgtagtaactagctttagactagctgagcttggttctgaattgcctgataagatgactagcaatcagtgggaattatctagagattggatatttttacttgtgatgttggtaattttactttccctgttccatgttcaaattaggattaaggtgtttgcatttgagaataaacttgccaacatcggaaactttttgccaataaaattggttattgctatgaccagcagattttttattgactttggttagtagttgtaatttttcttgacagctttaaggtttctgaacattcattacaaaatttgtcttttgatatattgcttccatgaatgcgcaaaaacaatcaattaccagtttccacttctgatccatccattccatttggtttcgaaaataatatgaaatgtgaagtcagcactgtagttgagttgagtgtaccaccatcctttattgaggggcgttacacttttgttttaggtatatctttgtctcttttaagcgtggatctatagttggtgccttagagtaaatacattgctgcttctgattctagtttacatcgttcttttctttttgtgctttatatttagcagaatgtctttctatccaaagctatgagtcacttatgcagatcatatggtattatggttcccattgaaagtactgtagcttcaagtcacttatgatgttagtactgaaaaaaatgcggcaataatccttttgtagtcattttctcattgactaaagcatttctcatatcccctgcatttcactgtctatgtgctttttattaaccgttaggaacaccttgaaagagtcaccatgacatgtctatcatgtcctcgataaacgaatgtctagcaacctgcaaggttttaatatcaccttctatgttacctttgcacgttttgttatcagtggagcaagtggagtcaacggttgtggagattgtggagaggtctttggaattctgtctattgtatctcgaaaaatcatcatatgcatgtgaagactatgggttactggtaagttctttatgcttgatttattttttgggaaatgatcgtgttgacctaaaacagatcactttgttgttaccttttgcaatatgatgtaatatcaccatgctgatcatgttccttttacttcagtctgcatttttggggagtttcttaagttctctaacgtagcattattattatttttattatgtttttcatcttttcagaacgaggttgcctatttcatggaatgcgtgctgcttagagggactcccagcaaggtttactcgttggaacccagtgtcgtaaatgatgttattgagcagtggtcgtctgtccaagttgattctgagcgtatcagcccacaagagaagtatttctgctatttaaaaggtgaactcttggaaacttgtcctttaaaatgcaattcaaggtttatggaatgttggtgctttatttgctgattgttttttgatggcacaaccaggcttcaattgctcaaatagtggagatgatctgcaacggtttcgtttgacgttatcacctgaatgtttacagcaagattatgttattgcagagaatactgaatcatcacacacagcatccccaaacggcatggtgtcaatagcacagcattttgcagttgttcacctacattgcataccagtccttcttacattggttcagaagctttgccagtctccagctttggatgtgatagaagataccaactttaatatgaggttgtcttttggccaaagaattttgaagttagtacatggtttggctatggaatttccttgtgatgcttctgatgcgatgatgctttgttcagtagcaagatgtactgatagtctgccagtcttgtttaaacttaagttcaagttcgctaaccatgacagagtgttttctggagatggtgttggaactgtgttgctgcaaatacttgacgaatttctgcagctaattcatattatcttctgcaacagtgatatttgttgtacagtacaagtatgcatacttgcttccctgttggaaattttcagcccagaaaaatggaaatatgacagatctgctgcttgcttgatgccccctttagtttactcaccccacattgttcaatatgtgcttaaacttctcaatgataccaaacgttggacaagtcgtgttgacagggacagacctggcaaagatgttctaggttattcatgcaattccgagacagatggtttgtcttgccatgctcgttcaaagaaagtgccattgctgaagaaatacacatctgaggagtatctgcaattaatcttcccttcagaagagcaatggttggatgatttggtacatctcatctttttcctccatgaagagggagtaaaatcaatgcctctacttgagaagccgcagatgagttgcacaaagcaagttactctttcagagttggagtctgtggctagtcatgaggaagaagcactttttggtaatctatttgctgaagcccgctctacaggagtagctgacagtgttgaacagccaatttctctagggagtggcccttcgagcagccagcatggccctattcaattagctgctgatttgatatgctttatgaagatgtccatcttctcccctgaatggtgcactgctatatatgtggatgcttgcaggaagttccacagcaatcatttggaacagtttctgtcaatacttcaa

SEQ ID NO: 11822 - DNA, 587 bp, Oryza sativa
tcgtgcatgtcgaaagtcatctaaaggtgacttctcaaaatttgccttgggctcctgggtctcagacttgatcttaagttcttgttctcagtcaataagatctgaaatatgcactctcataagcttgttatgcccatcaaactcatccagacagtttcaactattgaacttgcttatgtcgttactccctagaacactgtcagctggtgaaagtgccgcagagtactttgagttacttgggacaatgattgatacagaagcttcacgtcttttcttaactgttcgtggttgtttgaccacattatgttctttgataacaaaagaagtgtccaatgttgaatcacaggagagaagccttagcattgacatttcacaaggattcattcttcacaagcttgttgagcttctcaacaaatttcttgaaattcccaatattagagcaaggtaactcttaatataccctgcatgtccaaccctaatttcttggtttgtggaacatccgctcccatgcagttctttctcattgtatctttaatttcccatatgtcgcagatttatgagtgataatttattatctgatgtgctgg

SEQ ID NO: 11823 - DNA, 2760 bp, Oryza sativa
  unsure (1)..(2760): unsure at all n locations
agaagtgtatgtgagagtgcatgaagtgaggtcctttcataaggcagttatgacggttgtgagaaggggaaatgtccgaactgctccgcaaccgtcattgggagaacatctagagcgtccacgccaaaccctaggatcaaccgcgatcaggggggttcggccgaacctaggctgggccctcctggcctggccttcgttcagtggactccctagaccttcctctatccatttctcggagttttgggttgattcactgatgtttcgatgaagtacacaacccctccttgtatggatgcataattctcctcactttagtttgattttcctcccaacttcagcgtttatcatctgcatacaaatatacaccaatacttgtggaatatgagagattaagaacctatcactatgttggatgttttattatctaaactttatgcagatgttggcggtatgggattggcatttatcagccgccaacagtgacttggatctttgtgtgtggatttggagtttgggagcctggtgtgtgtttcttgatcttgagcactaggatttgtccaagagttgtgtggtgtttattactcttggaggttgaggactcctagatggctaggtgtcattcttggccaccgatctacgtgtggttggacaagagaagtttgtgaaggccggatcgcgcctccgcaaggaaagagatacccttagtggaaggaggagtgcatttgtccaacctcatgaggatagggttgaaaaagacccggctctttgcgagcccctcaacggagactagaatcccctcaaggatttgaactctgggaaatacatcggcgcgtaaacctcggtgatatcttcactctctttaccttcttgttccattgctttgtgctatgctcatattgttgttggtcgagctcacctctttgcctgtgtataatctagagctcttaggttgttctcttgtttgtattgttgttgtgcaggtcagatagtctgatctcagttcagacaatccgatcacataggactatccgatctgatatcggacaatccgaccctgttttgttttagcttccgtatttatttttaaaaaccgcctatttagccccctctaggcgacatcaaggtcctttcaattggtatcagagccaagtctctctattaagggctttaccgcctagagagtaatgatgtcgactagtggtttggtagatatggttctttactccttttggatggttcaaattatgattcttggagtactcgcatacttgacaaatttaggaccatgggtccttaaatagagcgagttgtagatgtgagcatttctcctcctaatgataaagagctatcatttgaagaggaagagaaatgcatgcatatcaatgctcaagctactattgttttatttggtgttttaagtgaagatgtatttaaaaccgtcatgccgtttgaagatgctcatctcatttggaccactgtcacaccctgaaaattcaaaatatataaattgttgtttaattggaatttttagaaatgattttaaaagcctagaagagaagatctaatttttaatcaataaattccaacataaaatggggccagataaaatttcaataaatactttgcttaattctataattcctagatttttctgggatttatttgagctaaggaagtatttttaataaatggaattgcatttcataaataatttaaattgaaaaaggttttaaaaagtcttcttttggctttgggccgaaagtcggcccaaaacccttctctctctcctcggcccagccggcccagtccgcagccgcccgcgcgcgcgcgtcctcgctcgctgacaggtggggcccgcctgtcaggtcgtcgtcttcctcgcgtcggccgccgcccgaaaccctagcgccgcgccgccgccgtttccttccaaatccggccgctcctttccttctccggctgaatcaaaagaggggaaatgatcctcgggatctcctctaccttttcccctttggaaacatcggctaaatcggcttggaaagtgtttgattcgaggtcgaatcggatcggcttttctctctccgagcccgatctttccttctcgtcgccggtcgccgtgggccttcgccgtcgcctcctagcccctttaaaaggacccccgagctctcctctacccgccgccaccctcgccttcgcctctcgtcgtccgtagcgccctagcgccgagtagcctcgagccgccatcgccgccgtcgctccagccgtgcgccgccgccgttccggtcatcgccgtcgctcgggaagaccaccgtcgtggtcgccaagtcaccgccgtcctcgtccgcctcttcgtcgccgccggagatcgtcggagcaccgccgtcaccgtcgacccgatctccgccgccgctttgacctcgtcgccgtcgccgtccgttcctcttccgccgtcgctttggtcgccggtgagtttgccgtgccgtccgctacccgttggtgtcctccgttcgtgccgaagcgccgccgttcgccggcgagcgtgcgccgtccgagccgccgagccgccgccgccggtggtgacgtcatcgctgacgtcatcgtccccgtctcccgtgagccggtcgtggaccgatcgatctcggccgtccgttttggatggatcgatctcggccgtccgttcgcatgaaccgtcgncgtgcgcccgggccaccggaaaccctagccggtgatgcaataattccctttttcttttcaaaaata

SEQ ID NO: 11824 - DNA, 535 bp, Oryza sativa
ctgagagatcccctcataatttccccaaagcgtaaccatgtgtgaataaattttgagctagtagggttgcagccacgagtaagtcttcccttgttattgtgtagccagaatgccgcaaaacttccatgcctaagcgaactgttgagagtacgtttcgatttctgactgtgttagcctggaagtgcttgtcccaaccttgtttctgagcatgaacgcccgcaagccaacatgttagttgaagcatcagggcgattagcagcatgatatcaaaacgctctgagctgctcgttcggctatggcgtaggcctagtccgtaggcaggacttttcaagtctcggaaggtttcttcaatctgcattcgcttcgaatagatattaacaagttgtttgggtgttcgaatttcaacaggtaagttagttgctagaatccatggctcctttgccgacgctgagtagattttaggtgacgggtggtgacaatgagtccgtgtcgagcgctgattttttcggcctttagagcgagatttatacaatag

SEQ ID NO: 11825 - DNA, 569 bp, Oryza sativa
caatgagagcgccattaagatagccaacaaccccgttcaacactcccgaaccaaacatatcgatattcgccaccatttcttgagagatcattccacaagaggcgacatagacatccaacatgtgagaaccgacaaacaatggtagatatctttaccaagcctctagatgaagctaggttttgtgagttgaggagtgaactaaatattttggattctcggaatgtggcttgatctattgcatgcatgtttgcttggtagaatatgtttgcataccactttgtgacaaaatgatcattcaattcatggatggacactagtcacttttgtggagaacttgaatctatgtgtatggggatctcatttttcaatgaattttggtcctagcacaatttgcaatagattcgcacattccctccttcgagggtgaatcatcttgtctcatggtaattcactctcttttgatctttggatcatccatttgtcttgtggctattgttttgtgtggttgattgcgtgctagccataagctcaaatggggcctaaatgttcgaccattcttttcactcctt

SEQ ID NO: 11826 - DNA, 518 bp, Oryza sativa
tgttgtctttactgtcagagggtaccaaagagttggtgaaaatattaccaagggtaaacctgacatgcatgaagcaattgatgtaagtttaattttctctttattatttttttatcatccattaatttgttcctgagttaatccctggaagaaaaaacatcacagtgctacacgcctattgaacctggtaaatatggagaccttgctaaaccaatggtaggatctaatttgtggtatgtatccaactctacatctctgtttttttcctacagcactgtattatttgacatatgcgagacagatattatgtacttgactttgatataaaacaataccccagttttgatctattgcatattttaataatactcacaatataaataatttagcttatagcacacctctatttggaagaatgtgagggaataaaatttatatttacacatatttatctagtaccaacatgtattattgtacaatactggtagaattatgaattttagtaagaaaatagaagt

SEQ ID NO: 11827 - DNA, 20034 bp, Oryza sativa
ttttctccaccaccgacctcacccgcgccacctcctctcccttaacgacctcgcccgcgtcacctcctctcccccgccaacaccgcctgcgtcggcttttgctgcgtcatcaccaagaactccttcctccactggatcctcaccatcaaaccacccgcccccactgctcagcttccttgacattggcagcggctctgtccccatggagccgccccacccctgtgctcccctcgcgggttcatcgccaccactgccctcaatatcgtcgatttcacctaccctttcctcccatcatccgtggatctctcgtgccaccatgacatcctcgacagtcgcgcccttgatggatatggattcattgatgttttagtaggtgaaattcgatgtttcatatgttacaccaaaatgtttcagtagtagttcaaatgtgtttcatcatttcaagagattgaaacattttcgatctagccctgttcttttctccaacaaaagttggataaacttttggatacttgtggcacgcttttcaaactgttaaacggtgtgtttcgtgcgaaaactttctatatgaaagttgttctaaaatatcagattaatcaattattcaagtttgtaataattaaaactcaattaatcacatgttattaccacctcgttttacgtgaaacgcttaattttatcttcatatttatcttcacgatattcaaacaccacccaggataaagatgaaacatttttttcccgattagtgaaacaacacccgatttttgaaaaacaatgaaaaacaaatagggcgtctgatttgtagttgcttcgcgcctttatatacctacatgtcacagatacacccgtatatacatacaatatgtagtcttgtagagccagaacgattgggcatacttcatatatatctacacacaactatttaacaccctagaggggatgtccctcccctagcttgtttgtccaccaaccatccaaataattataaatttttttaaaagaatttgacaacattcatacatcatatacattcatacccgaatttattcttttattttctcaatatgtaggtcgaaattgaaattgatttttgtggagtgacagatgtcactatattccacattatcaatgtttttcatttttttaatattgtacttgattatatttgaaaaaaaaggtacacgaggggacattctctcgagagattagaatccattcacatgaaaatagcaacgacggacattttcactagttgaaaaacattttggacaattttctgctacctgatagttgtgcacataaggtagcttcttatgcactttgttttattccgtaaggccttgttcggtttggagaggattgaagaggataagaggggattgagggagaataattccacaccacaataggtgtggaataaatcccctctaatctcttcctcatggagattaaccgaacaaggcctaaaggaagagttaagcttaatctttcctttccctggaaaaacgaggggagaaagtaaaacagctttctacttaaaaaaccagacatgcacacagcacaacactttcaagttgaaccaacgaaagtaatttttcatcgaacaaaatatgctctggattattcatactggacaatcatttttttatgactaaagatagctagcaactgcatgaccattttggatcaaaagcggccgtaatagttactataaagcacagagctcgtcaaacagtcgcagaacaaaaaaaaaaaaacaaaaacaaatagtggattaaccaaaatattctgtagagagctatggagtacaatattcttttagtttgaagaagcaaagtaagtatcatcgaacaaaatatgttttacatgatttacatcattaattattcatacctgaaatttatagttaaagaagtgtactgtttgtgacaactctaagatcaaaacaaacccttatcactaaacatgcataaaaaactagttcagttctaggcatcatgaacgctgtccaaactgatattcaagtaccagctgcagtgaactgagctagctagactgtcgatctgatcaatccgttcatgatgcctagaactaaactactacctccgttctaaaatatagtaatttttagctatgaatctggacacacagttatccagattcataactaaaaatatttatattttaaaacggagggagggagtagttttcaatctgttcatgatgcccagaaatgaaggcatgccttcattttaatcgcgcgctagctctagctttcgtgatgatcaacctgcatatatatggcaatcagaatctcccgtacgtgttaaggaataaatatgacatcaaatgtataatcgttggatcgggacctagctagatgcaccacgatgatgtataaaacaatactatatattaatctcgtcagaattacctctagcttttggatattgttttcatttattccagtttcatggctaacacagaagtcttagtgcactgttttgcaggtcgaagatcactttctcctctctctatatatatacatatgcacacattaatctcaaaaaaacatatgcacacatttacgtgagaaatcagcaataaatttatttaaaatattgttaaataagaaactgatcttactgttcaaagctaaaaaatctaataaaaaggggtaccctactaagtttagtgcatctaaaagcaagcgcacatacttgtttattctaattcttgatactgccaaaataggaccgccacacgccacacggtgggttgctattgtcgcaaaaatcaattgaaaattatgttgcccgacctgtttttaaccggtgtagtatatgtggatattggtataaaattcaaaatatttcaaatataggcaaccatagaattgcacaggtatttcctccatcccaaaatacaatcatttcttggttcttttgcaaaaactaagttaaaggaaaaatatccactttagtcactttagtggtctacttttaaatttttaaaattgcttagattatttttccaaagtatctcactacaaattttatgcgttggaatcagtagcatataaatgcttatattgtggtataaattctaaatcctagaaatgtttatactaccaataaaccctattgggacggtatcagaggtgctggtacataaaaaatgcacctatgaggctttcctcatacaaataaaaacggacacctatatataaccaatcattggtgcctgtccattaaaaagccaacaccaatagtcatagatgtcggttcttataataaaacgatatctataaacattacatgggtgccagttcttataataaaccggcacctatgagtgcaacgcaatatatatcggtatatatctgtgtatgtgttttgtaccgaactttttcatatgaactcagataaatgaacattataacaaatctacagagcttgatgagatttacaacctagtagatcactttttgattcgaggtcgtttggatgtatgaaaatgtgttataagttctcagatctatttagatctatttaaaatttctcaacaacaataaattaaaatcatagtacaggtattccatgttttcttctttcacacacacactacacatgaaatggctgttacattctgcatgcttatggaaaatggcaattacattttttaacctggaaaatgacagtaacattttttttaccaggaaaatggctgttacattttttgacttggaaaaccactggaggagatgatgatattaaaagggaagtactgctatatattacatccaaaatggtccgatataaagttcacacatacagtagagaatacagcataaagctaaaatgcccaaacaacacatctattgtatttagagtatggcataaagctaatattcacaaataaaatcataattcatatattgcccaaatttgactgaatagctaccgtcgacatgtagctatcatttgcaaagtatgcacacactctccagaagctcgattagcagacttgggtataaacttttaagctgatcatactctggggttccaatcaccatttccattgtgttcgatcggagtggcaaggaaagagaagcaagccttgtttgagcatgttgcacttgtgctgatcagctagaagtaatataactatcacgctcttcacatcaagtatccaggcaaagcttcatctcgcagatggccttcagcctttccagtccacactcactagaacggataccctcatctcaatcgggcggtaagccccatctcaatctggcacagcgtccgtcacaggctagaagtcgctgatgtgaagagttatctcaatcgggcaaacggccgtcacgaatgaatatatctcaatcgggtcctaagtaaagcccgtcacagatagctttgacccagacgaccagtcaaactatagcccgtcacagatgacctatctctatcaggccacaactagcgcccgtcacagatgactactaacctttatcgggcctaaactagagcccgtcacagatgatacacatctcaatcgggcctaaacttactactgacctcaatcgggcctaaactagagcccgtcacagatgactactgatctcaatcgggcctaaactagagcccgtcacagatgaactcatctcaattgggcatttatttatggcccgttacagatgactataatacacaaaaaaataaattttgttttttggctagcctcaggcctttgctagccatgcccgctgcaaaaatgacagaaacaaacacagatatccaatatccccagctccccagcatcacccattcatatacatatggattcacatacacagacatcaacatatttcacacaaccacacattcacagccatctcatatttcacatccattcacataattaacatccattcaaatatttatcatgtttcacctacaaaaccgagttaattggatcaaatatttatttagcaagtcttaacataaacatatgaaatatatacataaatataaacatcacagttacatcctcatagttgcataataagtgttcatcattgcctaaacataaaggctcaacattgttcatcattttagtttaagcctaaacattcctttggggttaattatttcgcagaggatgaagctggctatctcctcgcgaacctcctcaaagctggtaggcagagacttggttattgtgccctacattgtcataattccagattagttgatcgatcatatataagtactaaaatgtagttagtctatcacaattgagaccaccgacctcaaactcaaccaaagtcttcaccttttctctatacagaaggcgcatgttgtggcacacatggaatccgcactggtcacctatttgttgcttcaccgggaagtctttttttgtggatgagggtgtcatgtcctgtcttcctgaggcctcctctttgcacgtattgggcccacgcttcatctatcgctagttgaattggggtccaatcatatgcgttcttatcaattctggagttcaggtagtgacatgtactccacttaggtgttatgaccagaaggatccaatgggcactacggcattaatatagtgaaagttaattaagtactcaaggaatgctgttgtgtatatttagataacacacttactattgattataggcgcacataatgtactcgatccttgtctcggcgggaccacaaggtgtcgtagatgtagttgaccattccttgacggtcattctggagatttgtgacagtgaccacttgtggatcaaggaaggcaacttccggtgcatgcttctgacaccattgccaacttaacctacacataggataaacgatcttgtaagcaagttaaaccgattgttattactagattgagttgggcgacaatacttacaaggagtagcacttaaggaggcttgtgtccaccgctcggagactatagaggtcgaaaagatccttgaagttgactacgatataatttgttgaaccaaggaatggctttccatcgtgctctccaaggatatcggtagctttacttggcttcctgacgttagatttctccatgtagtataagtgaaggtccttgcaagcggtgcccattgcggcaagcacgtcatctccaaccaatggcatgcctagttggaactcctgtggaacgacgtatttcttcttgacctttttgcccttagtctcttcctggcccttacccagatctagcttccttggagctagaagcgaggcttgcacctttcctccccttcctctccccattgcttcgggtttatcgagagtaattctctaaggggaagagtgtgccttcctgctcttcttcatcggtgggggttcatgaatcgccttgctgtcggcctccgttcggtcctccccaaaatccgtgtcgtactgcaactgcacatcgtaagattgtgcatgacgatcttgagcaggaggggctgaaggagcagaggcgagtctctttggtggacgaccgcctggtgcagtggttggcctcgctgtaaccctgatctcaatgaggtccttgggccattggatgaaggtaccacgggcatttcctagtgagaggacctcgtcgttcggtggatacttcagagggaacagctcgtattcgggcttcaccgaatcgacttgaacttttgcacagtcggccctgagttgcgctccatgcactcttgtctctggggtcggcttgtacacaagtccctcggctgctgaaaccgtgaaggtcggtatcaccctaactgtgagggtgcagctcgttggttcctgcgatagttttaatattcttttagaatattatatatcatatggattcgttaagtctttcatgtattgagtaagttcacagttaccgttatgtggtcgacggcactgtcgaccgatgttggattttccaccaactcagttgatgcgcaactgctttgttttcgggtgggacttcctaactcttcgtgcgcagcagcaacggcggcctgggggttctgttgctcttctcgaatctcttgcctaatcttggccctcatcgactcgagctttttgtcgaattcagatgtcagctcagctcttatcgacgcccggatcttggctttcaaggcgtgcatctttctccgccttgttggaagtccgcttcttgtactgccacgcgaagtctggaaatccatacttccagggaacagaagacccaacgccccgtgtccgtccacggtattccttgttgcccaacgctttcgtgaggaggtcgtcctcgtgtctttgagagcaggcctcttgcgaggcttgttgctcggcaaccaacttcttctgcattacaatttagtgggtttaaataaactgcacgatgggaaacaatgcgaacatctagtttgactagacacttacaatagcttcgtatactcggtgatcttctgcatttggcatgaagattgtgccatcataattcttctggtacctggccctggcccagttcctagcccgagggtgtgggatatcgccaaacacgagcggtgtgcacgattcctccgcttcttcatcctcacgctgccattccttttccttaccggcatatccggtggtgccaagccggtgcggatgctggttcctggtttggagcaagcgatatgcctcgcttctagctctggactcgggggtcgacttcttcgcatggaattcctcccagacctgttccgtgatccaaggaaatttctctcttggatctggattcgccgagttgtatacgaactcgccgactagcttagtcttgaagttcttccaagcattgcccataaccttgaaagcagcctgcctgagacggtactcatgcaccgcaggataatcaaagctctccttgaacgttagccaagcaatgtccttctctgcggccggcacgagcttgatgtcatcttgcagaatactgaatttctgcctccctatgaccccgcagatagacctaaatcggctcaatattttccttggagatgtcggcaaccctacggtgtccaccgctgttatgcggaaccgttccttagggattttgttccctgtcctaggagtacgtgcccttgaggacccactagttgtcatcgatattggttcgccttgctgaaacatcgtatactttttttttctaaataacaaaaatacacaattgagtgctacaatctattacaatgaatttaatgtcccttagaaaaataaatgaaacatataaataaactaaattgcgcatctcacagtaataaaacgaaccacatttcatctatttactaaattcattaatgcaccatgtataaataaacgaaattgcagaatactgaattgtgcatctcacagtaataaaacgaaccacatttcatctatttactaaattcattaatgcaccatgtataaataaacaaaattgcagaatactgaattgcgcatctcacaataataaaacgaaccacatttcatctatttactaaattcattaatgcaccatgtataaataaacgaaattgcagaatactgaattgcgcatctcacaataataaaacgaaccacatttcatctatttactaaattcattaatgcaccatgtataaataaacgaaattgcagaatactgaattgcgcatctcacaataataaaacgaaccacatttcatctatttactaaattcattaatgcaccatgtataaataaacgaaattgcacatctcacagtaataaaattaaccacatttcatcaatcactacaatcatctatcacaaaattcataaatgcaccacatttcatcccaacatcgacatgtctcactcacagttcaatcacatatcatccacatccacatttcaatgacatgtcattcacagttagcatagggcggcgcgatggagtactcacctgaggacggtcggtggggctcggtggcggcggcgccgggctcggtggagggcgttgccagttggtgaaggcggcgttgggctcggtggaggcagcggtctcggtggcggcggcggcgggctcggcaaaggaggagtttgcagcggcggtgtcgggctcggtagagggcggcgccggtcggtggagatgccggtctggtaggtcggcgccgtgcgggcggcgtcgggctcggtgggggtcggcgacgtgcgtcggtgaggacgcgggcagcgacgacgaggaaggccgacaccggtccggtcggtgtaggggctcgagggaggacgacggcggtggcggcgggctcggtggcggcggcgcctggctcggtggagggcgtcgccggtcgggggaggcggcgccgggctcggtggaggcggcgagctcggtggtggcggcggcaggctcggtggcgacggcggcgaagtaggagttggcggcggcgctagggttctaaggaggcaggaaactgtagcgggacttagaaaaattttcgatccgatctgagaaaccctagatatagtagagtgatgagtcatctcaatcgggctttgccgtagggcccgtcacagatgactcattggtgacgggctccatactaatgcccgattgagatgacattcaggcccgtcccggatgactcatctgtgacgggcccaaagataatgcccgatagagatagattaatctctatcgggcttgaactaaggcccgtcaccgatgactatttttccatttttccaaataagtctttatatctgtgagtacaaaatatatagctgttgtataataattcattttattagtcataatacattttcggatagtaaatgatttcaaatggaaatatggtcaacaacaaagttgatcctctcatcaggatctacaacttttattttggtcatttgtctatataactttgtttccaacagcttgaaattgattttgacaatatgacaaatctaaatagcatttgtaaatactaaatgatttcaaatggaaatatggtcaaaaacaaagttgatcctcccatcaggatctacaacttttattttggtcacagaactcaatagcctcctcggtcgtgtaaccttcaatgatgctcccctcgggtttagctctgttacgaacgtacaacttcagaactcccatgtacctttcaaacagccacatttcccttcgaaaagccgggccacatagttttgtttgcttcaccagatgaacagggagatgaaccagtatatcaaagaaagacagtgggaaaaacatctccaggtgacagagggtattcacaatatccgtctgcagcccatctatatcttctggatctataaccttatgtccaattgcattgaagaaggcgcacagacgttggatcgtgtgacgcactttcggtggtaggatgcctctgatagcaactggcaagatttgtgtgattagcacgtggcaatcttgagacttcatttcaacaagttttagatcgtccaatttaacatacttatcctcgctgaatagcccgatggaactttaatatccttcaagcatgataacattgcgatcttctcatccttcgacagtgtgtggcaggctggagggaggtacactttacctgtctctgcatctcgtataggctggagttcactgcgaatattcatgtcctgtagacaaaggcgcgtgttcaacccgtcctttgtcttcccgggaatattcagcatcaggccaaccaaactctcacacacattattttctacatgcatgagatcaatgcaatgacggacatcaagatctttccagtaaggtagccgccaaaatatggattttttcttccacatacccttctcctttgtcttgctacgttttcttttcttcccaagctcattgcttatgttcttgaccatattgtggacctcatctccgaacaaatctttaggagcaggctgaagttctctcttaccgttaaaatttttcttctttcttctaaatgcgtgacgtagcaggagccacctccggtgacccatgtataccatctttcgtgatttcttcagccaccggcttcgtgtatgttccttgcaatcggagtatgccttctttccttttatagtttgtccagaaatattaccgagtgcagggtagttattaatggtgcagaacaatagaactcttagcttgaagttctcctgaccatatgcatcccaagtttctacaccttctttctaagaatctccagatcgtcgataataggctccaggaatacatccatatcattgccgggttgctttggaccttggattaacaagcacaacataatatatttccgtttaaagcataaccatggtgggaggttatagttcgcaataagaactggccaagtgttgtgagtactactcatgtcaccaaaaggattcatgccatccgtacacagacatatcctcatgtgtctagggtcggcagcaaagtctttgtgttttcgatcgatattccttcattcaatcgaatccgctgggtgtctaagcatactgtcattccttctctccgtggcgtgccaacgtactaacttcgcttcgttcgggttggcaaagattctcttgaaacgatcaatgataggtagataccacacaacctttgccggaccacccctctttgacttatttccttcgtcagcacttttctttcgcttgtatcgagaagccttgcagacaggacaagcatccaagtccgcatattgcttgtggtacaatatgcagtcgttaggacaagcgtgaattctacggacctctaactccagtggacacagaacctgctttgcttcgtatgtcgtctcgggcaatgtgttctcaataggaagcataaccttcaaaattccaaaaagatctgtgaaactcttgtctgtccatccactacttgccttcagcttcattaggtccaaggtaactgacaacttagtgtgttttgctttccatccagtatacagaggcgtctcgaaatcacttaccaacctgctgaacttcattccatctctctcattctgggctaggtcctcaatgtcacgtaacatgtcttgcagcagatcgtgatccacatcaaccatttcaccgcccaatggagaaggtataaacatgtcatgctcatcttcatcttcttgattatgtgcaccacttctgtctgctgctgctccacttcctgattcttgctctccatgcttcacccaacatgtatagccctccataaatcctcgttgtatcagatgaccgtgtacgtcctctccgctatcaaacatattctcattcttgcaatctgcacatggacaacacatgtaatcactgttttttcttattcgatcctcctccgcggtgttcataaaatttattacgccctttctgtactccgtagaatgacgtttcaaatttttcgcatacatccaacttcgatcaattgctacaaaataaaaaaaaacaaattagaggcacatattataagatcattattgcaaaagtaagacgtgatgaaattgctcaattaatgattaatattactcacttgattgatccattttgatcacctacaggaatttaatttctgttttccttggaaaaagggcaaaaaatcgccccctacagcctcccaccaaaatagtgagcagtgggatacaattacactaggtagtggggggtatttatactgtgcaacaaatatctataacggccctaaaacaatcaaccgtgacgggcatacaagtaatctctatcgggccttaataaaaggccgtcaaaaaaaagtgttatctgtgacgggcactacacttatctcaatcgggcctctagttggagcccgtcacagataaccctcatctgtgacgggcttattttagggcccgattgagatatggaaccctcatctcaatcgggcctcaactatagcccgtcacagataagtgtcatccgtgacgggttttatttttatgccgatataccatgcctgtgcgaccatatctcaatcgggcgaaacttcggcccgattgaaattacttccttgtgacggcccacaaattccagtcttgttatgggccgtcacagatggaaggatctgtactagtgactgtacctgtcagcaacacgaagctagttataatgagttgtgttatccaacaacatcagtgggttggggtttcgtccacgaatccatcaatgctaatatgctgtgcatatagtgcacgaaacaggtacatcaaggaaaagctagcaggtacttagttttaagatcaaagtttctcgaaatgaaaataattaaactatatattggatgccatgaaggtgtacaagcatatatatgtactcaacattatttgacttgtatataggcatgctatcactggagttttctataatataggaaatcttgacttaccagagttggtagagagaaagtagctagagttgatcaagctgctcctgttgttgggactgatggggagggtgcctttatataaatcctgaaagtgtgtattccggaagcataacattagcatggctggagccaattgtagaccatattggataacgatcagatgcaaagtgtgtaagtgtacagaaaattaaatcccaagcttatccatgcaagtaatcatctgtttcattgttttgcaatctgagtactagctaggactaggaaatcatatggcgattatcatagtatagtaggtaaaactggccatgcctttatcctacataaagtgaaactgccattcattgtacttctccctatatatgtgatgcttatatatataccatgtgaattccaagaatgtttaccttgctcacatgaagagaaattctgttctaatatcttttgacgggagggagagatttcttgttatgttaacacatgcactagcagtagaatacaactatagctataagtatattacaactcacatgatgcagagggctacttttgcattgtgcattggtactattcctaccttttttttccaaaggaacacacaattaattttagtaggaaaattttgggcatccgtaatacattaaaaattaaaatcaaacaagaaacttgaaccggctccaaacggatgcctatctatgaggtttgacttggtcagttgacatagataacaccttagccctagattctcatttactgcactacttgagatgggaaggctcccatgtctcagaaacacacggtaacaatgttaccgagttccagtacacggtaacagacacacggcggcttcaattcatctgttatcgtgcgcatttcccgggtgttttacgattttgcgtacagtatggccaaaaccataccgtgtgtgcctaaacacacggtaatgttcccgggtgtacgtgaactcccggtaacatacgtattaacggaatcaaatggaacagtgatttaccgtgtgttcccagaacacccggtaacatttggtattattcggtagtattttttcccttggtaattaccacatgttactattagcatttccatcataaccataataccatcgagcaggagatatgttcatatccaatagctggtagccgggaacttgcaagacctagggaaagcctagaagcggtaccgctaccggttgtatactgttttggagttgctttcagacctctaatgttactacaacaaaacctcatgtataggcacttttgtagaggcattttacaaattgcctctaaaattaggagttttatagtgtagacactttagaggcactttaaaaactgagtagaaaacttttactctagagacctttagagacattttcagaatattttattaaattttatcttatataggcattttttgtgcactttaaaatgtgtctgatatgtaaaggcatattcttgaagcattttaaactctgtagagacacttcttagaatgataagtatactaagggactaaatataattaacacaaggcacaaacatataagtaatgacatgatgttgggtcggttagtgcattaaagataaaaaaaagtttgcccaagagatcttgagtagcattggttgatatggttgtggtacaatttaaatcctctagaaaatgcgtctaccctcttgtagacattttatgaaatgcctctgttgtagagacaattcaccgtaaggcacttattaggaatttttaaaaatgactctaccatattgtaaaggcattcggaaagtatctctgtagtattagaaagatgtctctatttcttgtagtctgtatagattaaggtggtatgacaaaaggcctcgttttgtatgcccctcagaccggtcactaagccaactacagaccttcatacttgcatatagtgggacaatgtaccaaagttggatcaagcaccaactatccaggggttaacctttatatttgggaatgttacatggggaattccctttgcgcatcgtaggaaggcgggaacgcgatgagcgccgattgtgcggaagaagtggcatcactgttgttgtcttttcttgcgataatatagtttttatgccttcaaattagttcaagtagtttttatcctttccaatgtaatggtctatataaggcccaaggttaatggagaataaagcaagcaagattgatctacacaaaatcctatccctctcttcctttgtcgatcgcagtcacggctccgggaaggtgagggtgtcagcttcgccctcccatcgagaacacgaacaaccttcggagatgtggtgtcaacttggtatcaacaccttagtattatcagcttccatcgaggaggtgttggtgtattttctgctcccaaatatatagaagagaggggaagaaacccaaagtaaagaaatcacctccaagagacgtgaagacaccaggaggtgacccatccaagctctacactgactgcatcttgaagtaagtaccgatgcaatgaaatacttttgtaatcttcatctttatttttttcatttgcaaatcttcatcttcatattttctttgttttgtggctagattcaatgaagttggtaaagaactactcttttcttgggattgcagtgggtctctttttagtaatggtaaataattttgtgtagtgtagggtacagattgttgatatatagtatgcacatgcagtttcatatgcatagaattaacagtactttgataagtttttctcatggcacatgtctatttttttctagtttgttagtgcaaaaataatcatgtcaatggaagttgaagatcatagttggatgtatagtggatggaatgatagtgatggttgtcattgtgaagagtcggtgcgcaacacaaatggttttgttgagcgtgttttcagtggagtacctaatgcagaaagatttggagtaatgtgtccttgttcaagttgtcgcaatagaatttgaagaaagaaagatgtaatgagtatgcaactctgtcaaagaggattcatgcctgattacactagatggatcaaacacggagagtctcctgttaggttatttacagcagtggaaacttataatgttactgaccccttagatgacatgctatgcaatttgagtgatgcaatggatacatattttcaagaggatgagccaacagcagatgccaaggcattctatgccatgctatctgcttcacaagaacaactccatagtttcactcaagtgtcacgatttacagcagtcacacggcttatgggaattaaatcacagcataatattgttaggtttaagggtttgcctaggtgcggatctagaggtagacaacagttgtgaagttggggtcttgggtagaaacaagcgatattttagtaagtaaattaatgcctcagatagcgagcgaatcgtcacggaactggtaaatcaaacaatgtaggcacacgttggcacagttctgtaaataatagatgtctcatccggttgagctgaactcatggcaatattagtgatgaccttagagaataaacgggagagagggagagagagacgtgagagacataccttcgcccttagaggtcgatgcggccatagcaaaggtgtggctgggtttgtgggtgcttccggggtcagcggagtgcacgatggcgatgacgacgacaaggccgactggcagcgtagatggtgagcacgatggcgatggactttccctcacttcagcgcaaatcctggggttctagggtttgtggggagcgtgtgtgcacggcaacgaacgttggttcgcgtgcactggcagctccccctttttattgtgcactgtgtgagaggggcccacagccatcgaacggctggcgcccccgatcagggtgcgtagaggaggagtggggatcggtttcccgatcccccggagatcgcaactaacaaatatatcttcagaatgcatgaataatttacttagcctcattggtgatatattgccaacaggtcacaaaatgctatccaacctgtatatgagtgcaagagtcttctaggtggtttaaaaatgccatatgtcaaaatagatgtttgcataaataactgcatgatatactacaaagaggattcagagaaagaaaaatatgatatttgtaacgaaagttgttacgtagccgtggaagagggatatcaagggacaaaatgaaagctagtgccacacaaagttatacgttatttaccatttataccatgaatgcagcagatgtacatggagccagtaacggccaagcacatgcggtttcacaaggagagtgcttgtgataatcctgatattgtggtccacccattttatggcgaagcatggaaacacactttccaggttttgcactagatgcaagaaatgttcgtcttgcaatagctgaaacggagggattaattaatttaacgagatcagtactattcataaataattaaagcatgaaatagtaatagtatgatctgttggtgtttgataaactggaaggagtaggtcatgacttgccttgcaatcaaggtcttaatttgctgacattagcatagccttcatggtccacctagctcttgccgctctgatcgatggttctgtcattgtgatctaacatatatacacacaaaaacagcaatgaataaacatacaagaaaatgctacaaatgaagagcaaaagaaaatgacgaaaacaatataatattggagcgacaatagagaaattctggagaaccgaaggacagaacgagttcaaaggttaaaagattattttaggattattaggttctatggtgtacatagggacagggtgaggatcaagactagagtgggtgtgtaatatgactgatcaggtggtgttattttcttctgaagataaagataaagattaagttatttacgcaaaatgaggtggtattaacatatgattgattgagtttaaattattataaacttgaaaaatagattaatatgatattttagagcaattttcatatagaaagtttttcgtacgaaatgcaccgtttagcagtttgaaaagtgtatacacgaaaatcttaatcttcatcctactcttgtcggagaaaagaagctgaagtggcttaaaatttgagtgaaccgggagcgaagccacacatatacaagagccggccggtttggctcgagctcagcctaaccgtgatactgttcatcgggctcgagccacatggctcggctcggctcgatcaagtagctagggatcgaagtcgacgtcccgcagatcgctcgtcggcaagaatcagcggcggccggccggagcgggagacgtcggagcgacgggagacgcacgccagcgacgagctgagagagctcaggtggagctaggggcttgctacggcggcgaagagggaagggagagtaggggggaacctttaccgagtcgtcgaggcggcgccgcgccggcggcgagagcgaggagacgggttgcggcgcgcggatgcatggtggaatttgggggatcgagaagctccaggttttcacggtggctggccgggctgagagcgcagatcgacggcggtgacgagctccggctttgcatcgagatgcgtgctgggcgaccgcttagggtttcggtagaacgggcgcttgcggcggcggcggcggctctgcaggctgggatgggccgagtgggccgagcgtctggattctcattacgtgaaaaataccaagctgatttgtttcataaaatgtagctgcaggaactcatgtgttgtaaaatccccccaattaattgtataattcattttatttttatctagctacgcccaacgcaattacatatatgcacactcatgtatataatatctcactgagtgaaaatgtgtagattaccttggattgggaataagctaatgtcccataattgcttatattgtgatataatttttttagatcctagaaatgtttatatttttggtacggatatggagtatttaccaggttcattaattacattattcattaacaaattcccaatttgattaaccagaatattaataatacaattgaaacatcatgggaacacatgtaccgcagtaaaaaagaagtcatatgcccaagcacgccggaaaacatattttgttcaatcaatatccgtttatttttagaaaataagctagagtgtttgcttaattaatacatactccctccgtcccaaaatataaacatttttagctatgaatctggatagtgtatccatattcatagctaaaagttgttatacactggtggagaagtggtttttactcccggttcgtaacccccctttagtcccggtttttcaaccgggactacgaatccgggactacagatggtcctcttttttcttttttattttctcccgaattaagtgggatgcatatccccaaatcccaaatcaaagtaacatcccaaatccacatcacaaatctttaagttacttatacacataaatcaaatacatcacaaatcctaaaaaaaattacacaaatcaaattacatcacaagttctacaaaattcatcgcaaatacatcacaagttcacatcacacacaaatcaaatacatcacaggatcatgcaataaatcacaaattcttaaaaaaaaacc

SEQ ID NO: 11828 - DNA, 6487 bp, Oryza sativa
  unsure (1)..(6487): unsure at all n locations
gtgtgggattaactatacagataaataatttgaacttgtgtagtactatttaactaatgtattgtttttatatgtggatcaaatataatttctctaccatcttctccttttctcttttattcatttacctattgttttgtgtcatagacactttttttcacaaagtgtcatggacactattttgatccccaatactattttacatgtttcttttcttattgtacctatttgtttgtcctgataaaacatactggtttatcttttctcatgtaggaaaatagtttgaggatccatttcaaaacaactttctagagcttttataatatcttgtgccttattagaccaaaatttgctagagattttgcttctaaaagtttgaagataagaggcgttgtttcaagaaacaatcaatcaagagcaaaaccttagtttgatatatagaggaaaatatatatgaaatccggaaaatacttgatcctattgtgcacatccataagggtgacaccctttaaaagtctcatctcagatgagagaatcagttgtgattctaaatcctcttcctcatcaaaaggaaatcatcacactatggagaacactgtagcaatggggactctgtttttgctgggaaatgggaataaattactcaggaataatatcgtttcttacaagaactgaaataaaaacgcacctagagaggtcctcacaccgaccccttatagcaagaaaatggatggccatattctgctcccgccgaattttcctgagaacaaattctctgcttccatccaagagatccctgatctccctaacaagataagcntgctcagacattgctctttcttttgactgtatcagctgcaaagcaantaagcaatctgtttccaggataactggtttgagcgtccaacggagcggcagatagatcccctctttaagagccaggagttatgcttcaagaggggagctgcatctgctcacagacgtgcaggaggcaaagataaccgccccctcccagtcccttataacgacaccaattccacccttaagctgctggctgtcaaaggaaccatcaacatttgccttcatccatccttcctgtggcctctcccatctcattttactggctgaactggatccatcaggtccacggcatctccttggagtagaagggattacagcttttcctttcactgaaccagcagaagattgttgtcggataatgaacagtgaactgatgtagcttctgtaaaaaccatttggaaaattcaatggggggaggtaatttgtcatgggtaatttcattttggatataccaattacgccacataatcattaatgataccatccgttcgtcctcagagagcatggccagctgatcgaataaccaatttgggttcatcctccccacagccggtacggacaaaattgttcctgcatcatacatggaaagccacaaggatcttgcttgggggcactggcagagggcatgtgcagtatcctcatttgcagttccacagatcgaacaaagggcatccgactcaagggttcttttgaacttgttctccttcgttgccaaacaattgactgctaccttccgcgcaaaaatttttaccttctgaggagcagcattcttccaaatgagatcccacgccttacaagaaatctcactcgaggaaccagagcactttgacatgttcttcagcttcagagcccagctgtacgcacttcttaccgagaatctgccatgtttgatcggatgccatgcaataaaatcctcctcttcccgaactggtaacctaattctcagaataatctcagcatcaagcggtaagaaatattggttgattttgtgtatattccaggagccatcttcattaattaaatccaagacacacttgagtctagaagtacccttgctagaaatgggtctcctcgaaaaatctcttggcaaccagggatcacaccagatgcgcaccaacctgccattacccaccctcgatatgatcccttccttcagtagagacaacccatgttcgatagctttccaccccggagacacattgcctccaaaactggtatcaactagggagccatttgggaaatatttggcttttagaacttgtccacaaagactatccggattctctattaatctccaagcatgtctgcaagaagggcttggttaaacaatttaaaatccctaaaacccagaccaccttggttctttggtttggttagggaattccaggctttccaatgtgtccttctcctaccattgtctgcaccccaccaaaaattctttgtgagtttggtaagatcttctgcagctgaatcaggtaatttaaagagccccattacatacacaggaattgcctgtaggacagctttaatcaacacttctttcccaccgatagaaaggagacttttgccccatttaatcatccttttccaaatcttttcttggagactctgaaatttacctctatttatcctgccctcaggggttggaaaacccaagtacttatcctcaaaggaagtactcgttatttgaagaataagtttaatgtcgtccctaatagaggctggtaaggaatctccaaacattatggagcatttggcagggttaatcagttgtccagtggctaaagcataacaggctagaacctccttaatcgcccgtgcctgctgaatttcttccctgaaatatagaagtgtgttgtccgcaaatagaagatgcgaaataccagggctcggcaacagacatgcactggtgaaatttctcctttgattaccctatcttccagaagcaaggatggaccgtcggctatgaagaggaacaagaagggagataggggatcaccctgtctcaacccacatgatggagcaaatgacgagagaagggttccgttaaatttcacagagtatctcaccgccgttatacactccattatctagctaacccaccggtgagagaaacccatcttgtgcatagcctgctccaaaaacttcaagtccacgcgatcgtaagccttggatagatccaacttgtacgcacatgcagcaccgcatggtcttttgttcttttggatataatggaagcattcaaaagcttctaccgtcttctattttctcttttatccatttacctattgttttgtgtcatagacactttttttttcagaaagtgtcatggacactattttgatccctaatactattttacttgtttcttttcttattgtacctatttgtttgtcttggtaaaacatactggtttatcttttctcatgtaggaaaatagtttgaggatccatttcaaaacaactttctagagcttttataatatcatgtgcctaattagaccaaaatttgctagagattttgcttctaaaagtttgaagataagaggcgttgtttcaagaaacaatcaatcaagagcaaaaccttagtttgatatatagaggaaaatatatatgaaatccggaaaatactcgatcctattgtgcacatccataagggtgacaccctttaaaagtctcatctcagattgaagaatcagttgtgattctaaatcctcttcctcatcaaaaggaaatcatcacactatggataacactgtagcaatgggaactcttgatgtagaacacaagatctatacacccatcgttcctcatcacattgttagcatgcgtcatctttgtcgcccgttgcctccatgtgcagcagatggattcgtatcccttgcattaaatgcgagggcagctgcgtgacatgcagaaccaacggtccaggccccatcatatttatggcacagtaggggccccgagcagccaacggggcctaaactcggggcctaccccgagctcatgtcctgagctcaagaatcgtctttgtttaaagcaagaaaatgagttcctaatcccacctttcgctggcatggcccgatgccacatggccttgccatgaaatccttcgtgccctgagtagccggtagtggggacctaggcccccacttcttcgatagatgaatacctacaaaaataacttggaacaacaaaaccggtgaaattcgttagtctaaagaaaattggtgtattgaacaatgtttttgcgcatttagtgcagaaggtcaggggtcaaaactatgtttaatgaccaccaggacactactagtaggacatccacaatgtatggagaacctgagtttaagcaattttttttatggctattcaacatacattgtgaggatggacataagctctttatctgaaaactagctcacaagttagaggtggtattcctgtctctacccttcatcattgcagtcatgctactgcgaacccagatatgtgaaccggcaccgatgctatgcaccattagtgctgctacttgggtgccaattggaacatccagcatatatgcacgaaatatgattgttgacggtcgttatcgatcagtttcgaccgtcaatattactaaaatagaggagaactagtaatgcttgcaatgcatatatctattagaataaaaatattccactagtattaggtatactaaccttttgcagagaatgacaataaagtggaggagaatcgacatcaactcagacgataaatcaatcggacgatgtcgataaccagacttatgtatgaatgggccaaaaactcagaattgacacgatgaattgggccaaaattcacaagtctacaaagtgaagcaatagaggaggctgccagccgaagatgggccgggaaggcccagcccatagttcggccgaacctggtggttcagccgaacccatcctagcaccgttggatgcagggttcggcgtggacgtccaggattgcatcccaatgacggttggagggtacttcggacaattccccttccacaaccgtcataactacctctatataaggacttcaccttctcacttcactcacacacctcaagcaatagctctctcatttctctcaagtttagtttagtagtatctagctggtggaataggaatagagtagaaatcaggagttcggaagtcttcggaagagttcgggtatggctctagtagcttttctcttctcttttgtaagctttgtacttttattagaatactcttctttatacatttatggtattgaaatacttttcgagtatatgaatgcctactttacattatgttcatgttatactgaatatatggctagcttatctgggagatgctttggtgcgggtataatatttgcttatgcaattactctatgtcatgacgatgatattagagtagtatctggtagtttagacgtggtgtctagattacaggatatcattatttggggttatatattgcagatgagaggtgggccgctgatggtgacagctcaatacgggtattcctccgcgccggtatataatcctaagttaattccctggggagggtattcttccgtacttagccccggttgtatggtcatgacgggctgtcgtaaggaactcggcggtcaggggtggcttctcgaagtagcaggagggcatcggatagagggtattagctagtatatcagttaactagaatgtatgtatactatgtatattagaagtataggaatagattctctttctcttttctttccacttagcttagatgatatattatgagaatgagtagttaatgcttgtgtatcactctacccttggattatcttaacccctgcttagaatatgattatcacaagtaatatataaattattagtcaatgttctctttacatgatcttcccacgggataaaataaatacgatacccttggaatactcacgggtgaaatactacaatggtatatccgtgcgcttgcggatgaactctgtaaccataatataccagaagtatttatgcgccattgctggaaattatatttctagtaatgtcgttaaaaaataccaacaacctccctcctgccgctggtcagaccgcccttgcctagccagtcagaccactgcaccacatgtggttagaccgccgccttgctatcggtgtgactgtcgggacctagaaaacaccggtagatgaaaactcgaagatgtagatttaaatatgtcaactttattgcatcaactagtgtttacaaagtgcatcaatagcacccctcacaaaaatctcgactatattcaaagccctaacttttctctcacctcaactctctaagaaattgatatctagaggcctcaacacctctactattttataccctcaacgtgtctatgcaaagcccacaaatctaacaacaatttggactaccaaccaactacttcccaaaatcttaagctctccaaataggatgtgtgtttgatgccttggcaaggtcatgatgatcatgtggtgagaattacaaaattttgctatgcccggtatgatagtgaaattttctgttttatttgaatataattcaaatttcaccatatcgactgatttaattgagacactaatt

SEQ ID NO: 11829 - DNA, 10078 bp, Oryza sativa
cttcctcgatgcttactctggctaccaccaaatcaggatggcaaaagaggacgaagagaagacagcattcatcacgccgttcggggtattttgctatgttaagatgccgttcggactgataatcgccgggaatactttccagcgcacggtctagggcgcacttagcaaccagcttggcaacaatgtcgaggcttacgttgacgacatcgttgtcaaaaccaagacaagcgactcattgattgacgatctgcgggaaacattcgacaacctccgacgatatcgcctcatgctcaatcctgagaagtgcacgttcggagtaccgtcgggcaagctactcggattccttgtctttggcagaggaatagaggcaaatcccgagaagatcaaagcaatcgagaacaagaagtcgcccacgagactcaaggaggtacaaaagctaaccggatgcaaggcagcactaagcagattcatcgctaggatgggagaacgaggacaacctttcttcgctctattgaagaaacaagacaaatttatatggacataggaagccgaagaggcatttattgcactcaagcgctacctatcaaacccccctgtactttttgctccccaacctaatgaagaattattcctctatattgccgccacgccatattccgttagcactgtcattgttgtcgagagagagaaagtacagcgactagtttattacgtcagcgaagctctctatgacgcaaagacaagatacccacagatccaaaaactgctttacgcagtcatcatgacatcaaggaagctgcgccactactttcaagctcacagagtcacagttgtatcctccttcccccttggaaaagttgtgagaaacaaagacgttgtcggccgcattgcgaaatgggtaatcgagctaagccaatttgatgtccactttgtgccgcggacagccatcaaatcccaggtactcgccgacttcgttgccgattggactatgccagacaacaaatcagacaaccaaggcgacaacgaaacatggacaatggcgttcgatggcgcactcaacagccaaggagcatgggcaggatttatcttgatgtctccctccggagatcaattcaagcacgcaatccacctcaacttcagggcgaccaataacactgcagaatacgaaggactactcgccgagatacgagctgcagccgcacttggggccaagcgactaatcgtcaaaggggactccgagctagtcgcgaaccaggtgcacaaagactataaacgctctaaccccgagttatccaagtatctcgtagaagtcaggaagctagagaagagattcgatgggatcgaggtccgacacgtctatcgcaaggacaacgtcgagccagacgacctagcacgacgcgcgtccagacgagaaccgctcgaacccagcacctttctcgatatcctgacgaagccatcggtgaaagaagttagcggcgaagttagcccgaacacacccgacatcagctcggaggtcatcgaggcagaacgcgccgttgctgacatcgaaaccacagacgactggcgcatcccatcaatcaaattcatcagcagtgaggagttgcccgaggacgatacagaggccgagaaaataacccgtaaagcaaagatctactgtatggtcggtaatgatttatacaaaaaagcgctaaacggtgtacttctcaaatgcgtctctaccgatgatggcagacacctcctcctcgacatacatgaaggcatatgtgggtcacatgccgccggtcggacattggtcggcaaagcttttcgacaaggctttttctggccaaccgcccttaaagatgcatgcgacatggtccagcgatgtgaagcctgtcaattccacagtaaacacacaaagctactcgtgcaagcgctccagactatccctctgacttggccgttctcgtgctgggggctagatatacttgggccattcccacgaggacagggcggctacagattcctatttgtggcgatcgacaaattcaccaaatggatagaagaagtgcccacgggggaaatcaaggccgacaacgccatcaaattcatcagagggatattctgcagatacggactaccgcaccgcatcataaccgacaacagctcccaattcatcagcgccgacttccaagattactgcatcgggttgggagtcaaaatatgtttcgcctcggtctctcaccctcaaagcaatggacaagtcgaaagggcaaacagcatagtactacaagggatgaaaacccgcgtctacgacaggctcatgtcacaagataaaaagtgggttgaagaactcccattagtactatgggccgtacgcaccacaccgacaacgtccaataaggaaacacccttcttcctcgtgtacggctccgaggccatgctccccagcgagctacgacatcagagtacacgagtacagaagtattccgacgagaaccaggaggaacaccgagacatcgatgtaaatcttctcaaggagcatcgtgagcgagttgccgtccaagcagccagctatcaacagtccctctgccgttatcacgagaagcgcatccgagcacgcatactttcgatcggcgactatgtccttcgacgagttcaaacccaagcagggcgaaacaaactctcaccaaaatgggaaggaccttacatgatcacacaagtcttgcggccaggcgcattcaaaatcgcagacggcgacggtcgcgaattagcaaattcttggaacattgaccaactacgtaaattctatgtatgagtcaataccactgtacctgtaagtacccttacagtatcaataaagcctatttctaggtcccatatcacaatcaaagtgttttcacccgatgatcccttactctgatgacacctagcgttgaaacctgtccttatgtccctttacgccatctcgacaaggcctccgaggaacctatgggatcttcggctggggacgcccagagtcgataaggccttgtcagatcctgtagagacaaaagaccatgtaagatctggtcgtgtaagagttctcgccgtgcgtattaaccaagccgtgaaatcggaaatcaactttccaacctcatggctgggggctaggatcagagcttattcaaccaaggcaggtcaagggtccaagagccttatcctccgagaaaattcctccgacgacaaggctgggggctagggagagtgtacgactcaaacggctgaccaaagtcgttaactgagaacacactcttacacacgacatccagagtaagatacatttgtttaaggaatatttctttattcacaaaataattcttgtagtttttacataaattttccactacacatctttccctaagatatctgtgacagggcacgagtactaccaagaaggccaacgccagtccatagactggaagattttctcggccagcggcgacatcgacctcgctagatggtctatctccgccggagttctccgagaacaagcaaaaccttcgcggagaaactcgaggtctaggcgcgggtggtgatctcgtaggcaagccagcacgtgccctacggcatatcgactcgctcgacgacactcttgcttcaaggcctcgtcgatatgcttgccgatgacatcgagttgggcacaggccccggttagccaagagatgtacccggccgccgactcctcgggatcaccgcggactactcgaagttccctgcatactctagccatggaggcacaacaactcttcaagtaagaattaaaccacacctcgcgacctcggaccgtctccacagcctgctctttcttcaaggccagcatggttctctcaagttccgccacttcaaatttcgtcttccaatattggatacaacgatcttgatttgcaagggcaccctcgagatctgctaaacgtgacgaccactaagacaagctggatacctcctttacaacataaataacctaatcaggaggtcactaagaggtgaaaaggctactcacttgaggtggccgttgccatcccggcctccgcatcaagagtttgatccacattgtcaaacgaaacatgtggttcgaaatcgagtaccggaatcatcgccagtaactcaggctgcccgcgctgctggacatcctcgtcatcaacatctctacaatggacaaaaactcccgagatcaacatacaaaattggacaagggtggtaatcgcacgcacgaaggcggccagagttcaagatttacacaatatgtaacaaatacaagaagtcctactcttcaaaaagggggagaacagactcccccagatcaccgacttcttccatcatctccttacgcgtgtcgcttgccaccccctgatccaagatctcgcgtagatcgagttcaggacgcgacaaccttacacacgcgaggacgtgacacgccccggtgtagatgtcgttcgacgtctcctccgcgatcctggccgcatgcttggaggggatttcccccatcgccgtcgccagttccgcaagagaggaagtcagcgaaaactcgtcgggattcgccgggatcgtggacttgacgccgcactcctcggcgagctgatagaggccagtgtaggtgacccgcaacgagccacggatctcggagagattgtccccgagttccgacattcggtcctcgagccccttccgttgacgcttgttgccggccaccaactccctcatcttcgtgaggtcctcacgggcttcagctagctcgcgcaccaatctctcagcacgcgcgttcgccgtcgccgcttctgacctcgcctccgagatctcgcggccgatgccatgagcaccagcttcgagaaggcgccccatctcgacttggagttcctcccaggtgagaacggccgctggcagatcacgacccacagcgggatcgctgacggggccgctaggcgtcgcctcccggctcccggtcacgggcacaacatctgttgaggccgtggcaggtgacgcgctggaagctctctcggacttggcccgtgccgccttcgcccgcgcctccctacggacagccacgaatcaaacaccatttgaacgagaagcacgagaatccaagaatctgtttacttacttctcgccgatcgtcacaatgcgctgcttgaaagacaatcaatacagagtaagaagaaaccctccttgctgcacgatctgacgacaagatgaaattatcgagggggtcgctgccttgcggcgatgtccgagtacagacgagaatttcctcgccttggttgggactttgccagcgctagtggtggccgcatcagatgcctccttgacaaccttctcctttagagatgtcgccacctgatggtccgcgagcggcccgatgatgttagtcaaaggaagggcctacgcttaatcacgtcataaggtgatttcgaaaggagaatactggatgcttatcaaatacacttacgttgatggcttcatcgcgttccgccgcccccttttcacaaaggggcacggggatgtcgctagccgtagtcggaccgctgatcatcacttgatcgacgcgccgctctacagcttcgctgctcagacctgttaaacaggaaccaacttttgataagtcaagaggaacacgagtacaagtacgccaagatgaatacgagaaagataccccgaggagaaacccgggtcacgtcatccggcccgaaatagttataggctggatgggcccgagcctggagcggctggatccgcctaccgacgaagtctgcagcgacttcatatcccgacaagccccgttctcggagatcatcgatgatgtcgataaacgactgaagagagggggtcaaagggggcttggcggtccaggccggaatcttgtccggttgatcctcgggaacaacgaagacagggttcgagtccttgatctcaagatagaaccacctgttctgccacttactgcgggaagaaggacactggaaggggatataacgcgacttcatgccatcacgaagtcggaacctgacgcaaccagacaccctattggattccatccaacgtagttcatagtagaaacggaagagatcgagaaaaggctccaccccaatgtaggcctcacagagatgaacaaagatactaagaaaggcgatggaattatgattcaaatggagaagagaaagaccatagaaattcaacaccaggagaagaaactcgaaaggtggaggaagaaaaccgcagagaacgtaatcttcgatcgcaacaatccgacccaagaggggctgaggatcagtacctcctacttctctctccatgtctccatggccgggaagggcgccgtcctcctgaaggttcttcaatgtcgcgccggtggaagacgacttgccgagacccattgctgttccaagatcgccggaaaacgagcctgagttggcgaactaggttttcttgcggtggcggagaaggcaaggagcgctggcaggcggtgtgtgttcaacaaggttggcagacttcaaaatgggctcccaaaattcctttaaataagcgcactaccgacggtgcgaattccaaggaacagagagagatctccgccggaaatctctgggcccgttacgcgcggcagttttctggacttcagttcaaaattcactcgtgaccgttgggcttcaaacggcatgctcgactacgttctatctccgcggtcctcgcaccaggaatgacaacgttctcgacacccgaagtcgtaaatggttgcacgagttcattttaagcagaagtcgggggctactgtcagggttacgggtcaggcataccctctacccttcgatatacgttacatatcgacatggcatacccacgcgcacgcggatatttcctacataacctaaggaaacctttcacgaaatctacagatgggaagagtccttcttggacagaactgggtcgtcgacgtatcgtattgggtatgatatctccgagtcctactggagacctccaaatctgtgatataaaagggaccccccggggagggcatagatcatcgaatctcagagccaacacaacccacacagcctacgaagccgaagtctgcgaggagccaagtcatcgagagctagtcgaatccactcgactacgatctcgtcggatccgataagttccatcgttccctttgtaatctgtgttttccaccatataatcccatatcaactggattagggctattacctaccaaggggcctgaaccagtataattcttgtcttttgattgttcgatgtcatactatgtagatccttgtaccaacgtaccccaataccctctatatccggtctacggatatcacccgtcgacagagggaatactagttattcctcgtaaacaagagattcattaatatttacattttccgatgcccatatagccaattttgtgtggaagaatggagagtcacgcattaaatccaagaaaatcattaagaggataagtggttggattgaaatatgtctatcaaaagtaaaatttccagatttggaaatgtgcctatcaaaagtagatggagggagtaagatttattgtactgtaataacataaacttggtgaaacgcatatctaagtagagaggtgccctcgcatcgctctcacgtgggcagctcgggggaaaaaccctagctgcccgcactgccaccttcctccccctctagctgcctcgccgccaccagaaactgtgtggccagacaggaaggcagcggcggggagaacaagccggcgaagagctcttcctcggtgtgggaggtggacacgcagcgctgctgtgctgccgatcgtacgatgaatccccggttctgattagtgtgactgtgaacgatggaaactaactgcttgagctgtagggatattattttcccgtggcatttgttgttggacgcgtgtgttgtgtagcaaccggttgacgtaaaataccatcggctgtatgagcgctgtgtgtcgctctgcctcgcccgcccttgccaggccattcagcagggaaaggccatcgtacttacaccgttacataacaaataatatgaaacggcttcatagatatcgatttttcaaaatcgtatatacatttttcattctcctgatcgtactttactcgtagaacattatgaaccgatatctataaatacatgtatatgccgatttttagtgaaactaataaatatgaggttgtcgcctcagatgtgcttgttttttttaatgaagaaaaagaatattatatgtatatgtgctgttataaaaaatggaaaaaaaaaacgacttaacgtggcaagacgaagaggccaaaagtccatatattttgccgagtgagtgaaagagccaagccgatttcattcatcttgatcctaccgtctccaattctctcctccctatcctcccaccctcccagtatggctacctcctctccctcgacgttgacttcctcctccttgacagcagcgtcgtgtggcggcaacggcggctccggagcgatggtggcaacccggctagtggcggagctggaacaaaatataggggatataggtgcacattactcatctaatggtattttcccgtatatagtttcacgttattcaaactaacggtacttttgtcatatatagcaagacatttctctagttaataatatttgtcgataacttttgaaaaaaagatataagtgagaagtgagcaaaaaaaagcttactcaaataaacagttaaaaggagcgataccatcaaaaatccctaaatacaacctcaaagtggccgatcaaattaaactgtcaatagtcaatcgccaacaacaaaatcataatagaaatgtcttaatcttcaactgaaaatatatacaataaacatctgaggtaaatacaataactatgaaagtcaaatagtcaatgagcatactgtttaactagtgtaggctgcaggagtccccaagttgcataaccgttgtctcaagaatacggcatgcagcctttaaaagctcactatctttcatttatgtaaatcccaatttgaatgttcaatctttcaaaccctaacctttaatcagggaaaatgaaaaggcactatcaacaatcgcataattcaaatcggagtaattggataactagaagaaaggatagatcgatacctttcttagaattcctgtagcctgtcggatgaaactagaagatgcttacgacgagtaacagggcaaggaactaaggattctcaagctgtgtgggctgagctgcgtctaccactgaggagcgatcaattccggctactcaacagattgacccgagcggttctagctatagcagatcggaaaaaaaagaaagaattgtgaggggatcgaggcgtcgcacaacgtgtttctttgctcgcacgcgtaagcatttaggccgtccatctcacgaggggtatacttaattgggcttaggggggttcctatacggtgaaaataagggttaagcactaaaaatgagaattgggctgggagcctaggaacccctggcttattgggctccgcccttgaacctagggctaacggaacctagggctgacgtaatggtggctcctcctcgatgaccgccaaatccgaccactgcaagctcgaggaccaccagatctagctcccacaagctcaggggtggctagatccggccgatgtagcgtgctcgtcggcggctgcttcctccccaccccatgacaacgatggctacttcctccctacccatggtcccggctgcttcacgatgacctcctctgtatccgcgttgtcttcttgctaccaaaaggtgagtacaagattcatacttttctggcctgcatgtgatattaagaataaaaataagtgtataggattcacaattcacctaaggttaagtggggataataacgttcttcttccccaaagctttaataattttacggatttggtctggatttgcaattgaattaatcccaaggctcaaagcatcataaaggcggggtcctttccaatatttaataagggttaaaaaaggctgcctttgggaaaataattggaaggtacttaataaaggtagtaatatatttt

SEQ ID NO: 11830 - DNA, 18864 bp, Oryza sativa
caaaaggaagtggaagggtaatgttaagtgttgtttttgtgatactaacgaatcaattcaacaccttttctttgattgtattttggcaagattcatgtggaatgcagtctatatatcttttggaattcacccgcctaggaatgttgctagtatgttcggcaattggctaaagggggttcaacccaagctaagagctcaaatcgttgtggggatttcagctttgtgttgggcggtttggttatgccggaatgatgtagtctttaatggctccaatactaattttctgttgcaggtgattttcagggggactttttaggcaagacaatggtctttgctacttaaggaggaagatggccaaaaagtgagagaaggttgcttgatcctagagatgagagtttctagctttttcgcaatgaagggatggaacttaaggaaaagattgggagattaatgttctcttgttcttgtgtggtatggttgaaactttgtattaactttttaagaattgctgttgctagagcctaagtgctcgggtctagttgcttgtgatggtgttaaaccttgtgtaagggtgtgagtctatgtactcttgtgagttttgttggggctgtgtacatccttttttgggtgtagaggccggtttaatccattatctaaaaaaaatgtgtgtggattatgctgcattggtattcttataaattgcttgtcttgtatgcccataagaaggctctatcaaaatctttgataaattttgtagtaggccttttttgtgtgtgttttaatggcacttgaggaatataaatacatgtttttgacaaagtaaacataacttctgacatttacacacaccaactaaaggtacacacaaccatatatgtgaaaataaggatttaaatcttggtgtgcaaagtcatacacccacgacgttgtgcagctcatagattccatctcatcttccaccaccctccacccataaaactgagatgagcatcctccctctctctatatatgctacctcaacttgcatactgccttctatcctcctaatttatgcaaagaaaaacgattaatttaaacaactaatgcaccaaggaattcacaaattatatgacgtttggattgtcctaccaaagtatgtaaagaatttccaaccacaagcctcgagtgtgtgtggtgggtgtacatacatggcttcaacatgtggacaggtgtcattcttcatactacaagaatccataattttgttggcgcccaaaataaaagcgccaagaaaaactttccacattgttagccgccaataaaatggactttcccttgccctctagacttggtgggtattccttgttggttggctggcaaagcttattactttggtagttttatgtttttcttggtggtttgtgcccctgaagaaatatatatcttgattcttgtcatgaggttcatgacaggaagaaagaacaaagtggaaaaaagttctagcgcaaatggatgcaaaggaaaaacaaggattcaataggaaacaaatacaccattcccatccatcccactttaaccgaagtcttattcataccattttccatccatctcactttaaccgaagtcttatcaaaacaatacctattcattcatcttcctatttaggcatgcgtactactccccccacaacctatagctaaccatcaacctccatccactccatagctgccactacccccaccttgccatgacatcaacacaatggatccaatctgtcgagtctctgccgaccaccatgacgcgccttcatcaatcctctttggcgagtcactcatgacatgatcctctccagcatctttagagcgggaaccgctagatttgtcatcatcaaaagctagttggcctgccacgactagattcaccacagggtccttctcttacagtcttctcccaagctatatatctccaccactaacttatcttgttcacttgatcttcttccagaaaaaatgtaagtaaagagtattactgaagtttacactaagaagtggttcttattggccatgttattataacatggtctatcgtagcacaacatagtgttccaatttataggaaaaagtagtcattcttattaaccattttactgccatgcatcaaggaaataattgaaacagaaccaggtactaccatactagagatcagtctagacaaactaaagaccattgatgatatataaattgaacttgtcataccaccaatatcaatcactataggcatcacttccacacatatgtaaaagtgtcttacacattttctcatattcaaatttagctaaaaattgtaaaatagtgtagtgcctaaattcagcagggaacttcgaccttgaacaacctctgagtgttcctggtaactatattatatatcatgtttacctgttgctaagtgtgagtagttgagcccaaacttgttctattttcattttatctcaactaatacaaagatcgttccgatcagctctcggaacctgctttcagggttaacgccaatcaccaaagccaagacgacggcatcaagatgcaccacagggtcagaggtgggtgggcacatatttgagatcaacgggtacagattccagaagggcatcggtgttggcaagtttgtccggtcgaacatcttcactgtcggtggcttcgactgggcagcttctatcctgatggagtttgtgaggcttacaaagagtacatctcagtctatcttgagcttatgagtgacaatgctgaggtccgggcattgtattccctcagattggttaatcaggtacctggcttgtccaactgggaattgaccctgaacaaacagccagtagtgttcagctctaggggtaaaaatcggtttggaactgtcatttcacatgcctatttcaagctaagaagcgatcttgagctgccagaatcaggcttcatcaaggacaatcgcctcacaattaaatgtctacttctggttgcgaagtgagcatagctcaactggttaggttccttgtggtggaaccagcccacccgggttcaaatcctagatttgacacgggtgctcgcatttacggctaattattctttcagtggtaggcgacgtacccgttgacagcgaggcgcctgtggtgacttcgtcaatctcaagacatgccggctcagtctttcggaggtgctcataggggtagagtgtgcgtgtgtgcgttcataggggtgagtgtgcgcacgttgtaagcgcctgcgtacgtactgtgtttctcaaaaaaaaaatgtctacttctggttatcaaagaatcacatgtgtgtgaaccttcagggaggtgataagattgagatgatccggcatttacttgtggctgcggatagatatgccatggacaggctcaagttgatttgccaacacatccttggcaagagtcttcatgtggacaatgtggcaactacattggctttggcaaacgtgcacgtcacaactacacacctgatttttcctagacaaacacctcaataggttgcagacggataagtgtctgtgtctgcataactcgaccctcatttttgcatacagcttcttaagagacccgcatgcgaaaatctattttcatagacatccctcttagggaaccgtatgcaaaaatatagctatttttttagatgtgccaattaatcggccgcatggaaaaatatattttcgtagacggacctcttaaagttccacctagaagtctgagttacttcctctttcactctttagcacttcgaatttgttcaagtcatcccctctctatctccttacctcttccttatctcctctcttcctcctcctctcctcctctcctctcatactcctctctctctatctctctcaaactctctcccaggaactctctcctttccaattctcgggcgcacagcggtggatggcggacgggagcgcggcggcagaggccagtgggtgcgtggtggcaggctccccatgcatcgaaggaggcagcagtggtggtggttgcatggtggcgcccgggtggtagtagatccagtgttgggcgacggaagacgaaggcggtgaggagagcgcgacagttggccggcgggaggaacaaggcagcggcggtggcggtggcgcgcggtggctggcggtcggcagcggatccagtgtagggcgacggacatcgaaggtggcgaggggcgcgcggtagtcggccggcaggaggaacaaggtagcagcggcggccatccccctactcggatccacgcgaatccagcggcggtggcaggaggagcacacccgcggtggcgggaggagcccgacggcggtgaacgggcccaatggctaatgggttagggaaatgatttcccacctaccaaaagatatctttaaatcctaaccattcattctcccacttccatttaattccaaccctttattcatttcccaatctcaatcccaccccttatttttcattatccaaacataccttaaaggtaagcaaatgtaaatacaagctaagtgacacatcatcaccagacaatgtcctaaccatccgtttcaacaataaaagaacaaagaaagactaaaactgatcaaccataagcaattcatcattcaaacattctggacaattaatgatttggtttttctagagtgtactttatatccatttaattaattagtattttttttgaaattaaatattttcttcactagcggcttcttaaaaccagatttattagtttgcactatttctttcatactgatgttggcataacacatatatgaacaggtttacaagatagcataatatcaaaattttaatgtaagtcctcttaaagtaaatcttattttgttgctaactactagacattttttccctttgttcagttattctttttctttagtgtgcacatctttttaaagtcattaacatgtacataatcatcccgcaacaatgtacgagatgtgattagtataactatatagttcattcacactaagtacagttaatgctatttatcttctatctcattaaggcgcatcacctcaactatgttaagcccttcgatgattactctatggtctaaattgactccattctttttcttctcttataaagtcacagtccttaattagtttttgcctttgcatgatcaatcaattgtttgtagcttttatcgatgattgattaaagatgtaaattacgcaaagtatataaagttatgtcgtttagcttagattaaagtcatcatatgttgtatttctaccatattagcatacaatactcctgtagcaatgcaattatgcaaagagtttcatctagtattattgcacattagcttgccattgtgtggagcttatggatgtagcgcagcatatgccttatgctatcatagtgttgattgcattatcttcaaaatgtgacaacacatttttggagaacgtgtgtgttggatattatatactccctccagtcattattatataatccctccgtcactaaaattagcgttaaaacatcatatactaattaccggaggaagtatataagtactacactcacttccctaaaataatattggtgatttgctactctataaatattgccacttttgattactttgcactctgacaataccatgtaagaccatctgagttcaatgaattgtgggctaggatggtaattaattgaagcacatcctatttctagagtagaaaaataccaaatctaacaaaacccaatgcttatctccccattttctctccaccatggttcatctctcctacatggcaaccctgcgaagctcaaataagcctgtaactgatcataaataaaagagtaaatttcacaaaactacaggtactttgcacaatctatcacaaaatctataattttaaaaattatctcataaaactacatatttagggaccctgttattacaaaactacatgttttagctctcttcgttaaatctaccgtcacctgacagggtggcccacttgcagcctcaggaacttccccgttaaatgacacggttcctagttttcctagcgtgaaccgaataggttcctgagtcggatgatgcagttatagatggccatctgggcggcacggctcggcacggcctaggcacggcccgaccaacacaccggaccatgacgtgccagcccacatgctgaagcatcggcccaggcactgcccaatacgactcgggccatgttgggccggcccgaaggcacgacaacccatcatgcttcttcataaaaaaggtataatttccgtccctcatttctttgggtcatgtatgaataattgtaataagtctatatgcatcccttctctcttggcccgtgaattatatggctacactaagtctaattttagtccctaaactatttttcttccctcctcattggatagggccgtgccgggcttgcccaccgtgtttgggaatcagcccaggcctggccaatcgggccaggccgtacctgggccgggccatcgggccttatggccatctatagatgcagcttggacgaattgaagaaccgaaactaatgcaaacggacgacgcgcagcagaccaaccgatgcatctttaaccgtaaaacactcttattttccatcatcttaaaaaagaaaaagttggatatccaattggaaggggcaaaatataaaaattcactgcctagggtttgatgtaggagatcgaagaggcgtctcctcgccgtcgtcgctcaccatcttccgccgcaaccgccgccgccgatcgcctctaccctcgacgcacgcaaggttggtatccatcagcttcaccccgcgcttcctcctcctccgccgccgcaagaagagctagcttgcccctttcccgccgatttgatccgatccccccaacctgctctgatcgatcggttcttgggaaatttcgcagcgggggatggtgtccaagaagaagaagacggtgtcgaggcacaccacggagtcggaggaaggcaggcactcgttcgagatcgtcgggtacagcctcaagaagggcatcggcgtggacgagttcgtcgaatccgccaccttcgccgtcggcggctacgactggtgcatccgcttctaccccgacggcaaaggcgatggtgccaaggactacatctcggtctacctcgagctcctgaccaaggactgcgccgtccgggcggcctacgacctgagattggttattcttgcccccgggttgccaaagagtgtctactctgaaacaactcacaggatgttcaattctgaggacagtagcaaatttgctccgcattacgcgactttcatgcacagaagtcaactggagatggaagcgtcaggctacatcaaggacgatcgcctcacaatcgaatgctttgttaccgtcgtcgtccaggaatcgatggcgtctaataccgtgaaggcccatgaattaatcaaggtgccgccgtcagatatattggaaaattttggcgaattgttggagaagggggaaggggcggatgtgactttcgttgttgggggagagaaaatcgccgcgcacaagatcgtccttgcagcacggtcatccgtcttcaaggcggagctctatgggcagatgaaggagaagagggcccggcgggtaaccgtggaagacatgtagcctgatgttttcaggggcctcctgcatttcatctacaccgattcgttgccggacatggatgatctcagtgatgacgactactatgagatgatcaggcttttgcttgtggctgctgataggtatgccatggacaggatgaagttgcagtgcgaaagcatcctcggcgagcatcttgatgtgcagaccgtcgcaactacattggctttagctgatcagcacaactgcaacggccttaaagatgtttgcattgagtttatcgccactcaaaacaagatggatgatgtggtggcaactgaaggctatatgctgaggacttgcccttctgtcttagttgatgtattcgagaaggcaagtaagttacgtagaatttaaatgctaatgaacccccttctacttaggtgctgtctaggagtaggttctagttcttaaattgtatgaatagcatgtctgttttgcaagagcagctctgctaacaccgggggttatatgtgctgtgttaaattatgatctccttttagggcacccacaatgttgtaaaaaaccaggtagtaagcattaaatggttgcttactacctggtattagtcattgtgggagtagttcatacttaaagccaggaagtagcgctactgccggcaagaagggaataaaaaatgaaatgtgtacagtggagttctgacaaaaaattttaaattgcaagtagcctttgcttcttccaaccgttgctctcctccccagccaaccgttgcatggactgttcttcttgccatcttcatgccctacaaaaacagagatggctcataatttctttgaatcaacacaaacacattctgtgaaacttagctagctgagagcttgagatggatccctccaagagaggtttcatgaacttgttaaaccaaggctctccaagccaacaatctagccaaaactcccctcctactcaattcccctcaactttctcccaatcacaatttccccaatccccacattttactcaagcctcaccacctaatttccaaaccttcaacccttttggtcctccagccaactatcacctatatggtagttctcctccaaactttcaaggttttcagcagcaagcaagctggttacaatctgcaccaataagctttcaaggttttcgtccccaagaaagttggatgcactcaccaaatcaagttgtcgggtccgcctcatctcatggatccgaatcagcctctcagtgccctgcaagacaggaagagaacaatttggttaacatcgaagagtcaagtgacaatagccaagagacagggagaagagggacacgcgtcaactggaccgaagaagaaaacttacgactcctcagctcttggttgaataactcactagattctataaatggcaatgacaagaagggagaatactattggagggatgttgctgcagagttcaatggtaatgcatctagcaataaccgcaaaaggacagtcgtgcaatgcaagacacattggggtggtgttaagaaggacattgcaaaattttgtggagcttattctcgagctagaagaacctggagcagtggattctctgatgatatgatcatggagaaagcccatgcattatataaatcagaaaacaatgataaaacttttacattagagtatatgtggagagaattaaaggatcaaccaaaatggcaacggatacttgaagaggacagcaagaacaagaggactaagatttctgaatctggtgcatatacatcatcatccaaccaagaaactgaggaggagaccagccgaaaagagaagcgtcctgaagggcagaaaaaagccaaagccaagcttaaagggaaaggaaaaaaacctgcaccgtctcctttgggggaccagccatctcaagattttgttctcttcaacgaagctgtaaaattgagagcagaagcagtgctgaaatctgcagaagcaaccaccaaatcagcggaagcaaagaaggaacaaactaggatggagaagtatcagacatatttaaagttgttggacaaagacactgccaattttagtgatgcaaaactcaagaggcatgaagctgtcctcgaaaagctagctacagaacttgcagaagaatagaagatccctaagttatgtttgtacccctagtacttagtgtgtcactgtttcattaagtttaacttgctagtaatatttagacttgtgataggtttgtagggcaagtaattgttgtattgtgaactcagtgaatgatgaatgtaatatttcactagtgagaaggcatatgaagtgataatatttgcccacaatcataatatgtctgaaccttctgctctgtagtctctgatttgtcccataacaacagcaatttgttcttaagcagcctgcagaaaaatatacattgataataattagcacaacattttataatatggtggtttgaatagatagaaaaggaaggtatggttgtttaaaatctagctgttagaatacatccaaaaagcaagacatggttgtttaaaatctagctgttggaatacatccaaaaagcaagacacagttgtctaaaatttagctgttggaatacatccaaaaagaaagacatggctgttcagaatctagctgttggaaactagccgttgcaatggaagcaaaagcaaggcatcaatgttacacatagctagcaggatgaaccatatataaataagacatgcacatcacgaaggcagcattccccttcctttccttcaacttcttaccaacataacaacccatctccaaaaaagatgtccactgagtcacaagataattctagtcattccgatgagtccatcactagtgagaagcttgatgatatgacatgggaagaaattaatgaccctatggaagctcagcttgaagctcggttggaagctcaacttgaagcgagattgatggctcacctagctggtagctctaatcagctggggggctacacaaggaggtacattagtagagatcatgaagatgaccccaacagattatttgcttaaatatttttctgagagtccattgtacaccgatgatcagtttcggaggagatttcgcatgagaaggcatctttttttgcgcattgtacaagctcttggtgtttggtctccatattttcgtctaaggcgagatgcatttggcaaggtgggtctatcaccattgcaaaaatgcaccgctgccatgcgaatgttggcatatggtacaccagctgatcttatggatgagacctttggggttgcagaaagtacaacaatggagtgcatgatcaattttgttcaaggtgtgcggcatttatttggtgaacaatatttgcgcaggcctaccgtggaggatattcaacgtttacttcaatttggagaggcacatggatttcctgggatgttggggagtattgattgcatgcattaggaatggcaaagttgtccggttgcatggaagggccaattcacacgtggtgactatggagtacccactattatgcttgaagcagttgcttctttagatttatggatttggcatgctttctttggtgctgctggttcaaacaatgatattaatgtgttggaccagtctccattattcactgaaatgatacaaggaagagcacctcctgttcagtttaccataaatggtacacaatataacatgggatactatttaactgatggaatttatccggagtgggctgcatttgccaaatcaatcaccaggccccaaagtgctaagcacaaattatatgcccaacgtcaagaatcagcaagaaaagatgtggaaagagcctttggggttttgcaaaaacgttgggccatcatacgtcacccggcgcgtatttgggaaagggaagagcttgcagatataatgtatgcctgcattattttgcacaacatgatagttgaggatgagagaggctcatatgatataccggatgacaatacatatgaacaagggcagtattctcctcaaatgacagggcttgaccatggaccaatatatggatttcaagaagttttagagcaaaacaaggctatccatgaccgacaaacacatcggcgtctgaagggagatttgatagagcacgtgtggcagaaatttagtggtcagcaacaataagattagattttaataattccatatcaaccttgtattttactagtttaatttgtctttaccaatttagaatctaaatgtttgcttccaaaagtacttgtatttgtatgtcaaatgtattactttttatcagctacgtattccaatagggactatgtacactagctagttatcttgcaatacctacaaaaatggattgccttttatttctgaagaactatatatatgttctgtatacagctagtagactgaagaaaaaaggagagcaaaactaccaacagagaggcaaaatgtggttcctttttcctgaaaacatttgaacaggaaacaactgtgttgatacatagcaacaaggttacttacaccaacaccaatgcactggtgtcaagtatactcccctgcagctagctgatcgagaatcgagaatcagctagagccctgacaaacatatactccagtagctatatcgaatactattgaagttttcagattaatcaaactccgatgcttactttcgattagtgttgtaagaattaaacataattatatctcatcatcatgtagcttgtatttttgagaaaaaagacagtcggttgctgttaacaggccggcaacatagcaaatagatatattttggatggcaagagagttaaattaaattttctgcaacataatatttagcaagaacataaaaggttagtgctagctacatccgttcgtgatgtagaacagtagaaggttaatgtagctacctgttttaaactgttgtatgctgggctcttatggagtggggaaacctagtgttgtgttctttacttggatagaagcacgaaccataacacagatcaaacggtaaaacaactgaccgtgattaaacaaaaaatctgtccacatagttatagcaactccgaccgtgattaaaaaaaaaatctgtccacacagatatggcaactccgattctcataaactgaactagaaaatataacatgcgcaacatcgacagagaggtacatggtacaatatttatcatgcaagcacatacgctattctactacttaaatcacaagcataggggttagttggacttacagttggtcttgcagctccgtcgcagatctcagcaggaggatatgaagccgaagctgatcacacaccagagaagatgacctcctcagtctccagccgggctgaagcaccagtccgccataataagggaggtggcttgcggcgtcgggcggcggggatagcggcgacggatgaaggggaaagcgtcgcctgattgcagagaaggaaggtttgcggcgtcgatggtgggggtggagcggatgcggcgccgggtggtagcgatagaggggattgcgtcgttgggtggcggagaggaacccggcgtcagtggaagggtggaggggtttgtggcgttgatttcggggggagggggagcggatcgccgcatggatagtggggacggaggagttggcggcagcgagtggcggggtaggagcggattttacggcggcggggaaggagaggagattgcggcgccggtggaaacagcgaaagaggaattggggatcgatctggccggaactcgcgcgaaggaactgaggagcgccgattttttttatcctgtggaccccacctttactaccctctcgccgagataagcattgtggatagtgtcttctcctattaccgcctgtgactgggtcccacactaatactcatcttgataatatacattggtgttgcccttagggaaaagtgatagatgaacaatagttggatatcgatgtaaggagctgtcatagcctcaagctctcaagtgctgagtcgaacaacattagaaaaaagtttcattccactgagtgtggcaatatagcagcataactagcaacacactgatgctgtcattttaatattctgtttccctgttatacattgcctgcagagatatggcattttgcggcatgacagcatgagtagtttgattgttcaatcaatattgcaataattttgtagttggaatttgtttggatgatcgtgttcatgattaatgtttggttatctggttagctgttaggcttttaagtttcatctggcgttcgagtccaacagctaaacctgctgatattgccccaagtctatattaacgaataattaattattctatagctttgcgtgctcatgttttactgctgcaatgggaactttggatagttcataattatcagaggattttatcgactgcattggtgttctattagttattcagagtaaaaactaattatcttttacaccagcaagcactatatagagagattatttaccatgttgaaccttatgaaggtggtaaaatgtaggcctgaacagcagtacacttgaaattttagagctaaacaggaaagtacactcgaaatgccgtaggaaactgtcgacataataaacagatacgcccatcctcgatggttacgcgcgacatcctcgcctccttcatacccacgcagagctgcgcctggaagacaggcgaccgcatcgcgagcacgatcttatgcgccgcaaagctcccccttccaacaatgaaggtaacatatgctccctgctttgtctccagcagcttgccaacttgccaagatgctccgcgatgtctgacggcggcacttgaatgatctcagaggtccccttggtttcgctcagccgcgattctttgatgaccttcaccgtgctttcaaccgtgatggtatcatccttgatgtaacccggacaatgaaagatccaccgaatctggcaagatgagtactgcaaaccggctgataccttcatggctgaacaccggctgataccttcatggctgaacactcacggtgtccggcgccggccggaatcctggttcagcttcagcaatctcagttcataggatgcccacgctgttgcattctcggagtcgagcacgaggaagaatgaactggccggcgatttatcggatgccccgctgctgggtagaagcggatgctccagtcgtagccgccgacggcaaaggtggccgattggacgaacttgccgacgacgcccatggccttcttgaggccgcgcgctgtacccggcgatctcgaacgcgtgcgtcccctcctccacctccgtgacgtgcctcgacgccgtcttcgtggatttcaatcccatctggtgggtgttcgtgcaagtgcaaccaagatcaattcagagtaactgtcagttacgaggaagaaggcgacgagagtggtcgcgaacggcggagagcggtgaaggcgacgagacgaggccgattggcagacaaggatgaggtcctaagattttagtgaggtttcttcgagaaagacaagatgtagcagaaaacatgaaccataatactctcttcatctacttttcatagtcatatttcatcttggcacaatgactaaagataagtaattcttctaaacatccatttaaatatgctactccctccattccaaattgatctacatatatttttttggttattcctaaatgatgtacatatttgtgttcattcattgtgcattggagtaaatagacattgatgcatgcatccatgcacacaagtatttataacccacatgcaatatcttgatttttctattggctaggaaatagtggggatcgtacatacattgagtttgttgctagagtaaatatagtatgagagagttattagtttttcttggtcttagtgtaccaatgaaatatgtagatcaatttggaatggagggtgtcagggttacgggtcaggcataccctctacccttcgatatacgttacatatcgacatggcatacctacgcgcacgcagatatttcctacatatcctaaggaaacctttcacgaaatctacagatgggaagagtccttctcggacagaactgggtcgtcgacgtatcatattgggtctgatatctccgagtcctacttggagacctccagatctgtgatataaaagggaccccccggggagggcatagatcatcgaatctcagagccaacacaacccacacagcctacgaagccgaagtctgcgaggagccaagtcatcgagagctagtcgaatccactcgactacgatctcgccggatccgacaagttccatcgttccctttgtaatctatgttttccaccatataatcccatatcaactggattagggctattacctactaaggggcctgaaccagtataattcttgtcttttgattgttcgatgtcgtactagatccttgtaccaacgtaccccaataccctctatatccggtctacgggtatcacccgtcgacagtggcgcgccaggtaggggggcttggtactcatggttctactactatgtcatccagctttgtcgacaacaatgtcaacaccagcctcagccaagcgctccctgcttcaacaatgctggtatggactcaagtcggcgaaatcgtcttcccggtttacaccacgacgccgatctcaaccggtcctccaatgaccgaaaacgagaacgcagtggctacaaaccaaggcgactccatgtcgaaaaatccacccgtcgaaatggagaatggatcatcgacgacatccaagctcgggaaggattctgatacggccaaaccttgtccttccgacatgaaccacgagccggcaaagatgacttccgaagccacaaggtcttggtgtcctatccacaaaaccaagaaacacaccctgcaagattgttgggaactcaacgtccgtgttgaaattcgcgcctgcaaagaacgtggaattcagcgtacttctccaactcgggatgtctattgtcctattcacaagacaaagaatcatgacctctcgagctgcaaagtcttcctcggcgccatgaaagctccgtctcctaagtcatacgtctccgtcagggataacggcaaggaacaaggagcgactccagccttagatcgattcattggggtaatcgatatcgatcatcacgaaccatcggtcttacatcttctcgaagactatgggtcatcgacaacgagcgtgccgcgggaggtattggctatcgatgacgttggcacgtcagcgcaagccaacgcagaagtggcgaatcaatcgactactccaacccaacacatcagggccgttcaagctatactgagggaaactccttacgatcccgttctgaacgatgacctcgagcgttggacagaacgactacgggaatcggtgaccaacctcagcaacgcgtttgaagaagccgctaccgcaacgcatcaagatcagccgccaactggcgacgccaatggtgaagatccggaatggagggaatcacctcaacgagccactcctccacctcgcggcgctggtgatctccgagatcaaatcaacggccgccgagaagcacgacgcacacgagacaatgtaaatagctctcggcgtcatgtctcttcacggcgccatgataacggaaatcgaggagaccactcaaacgaggaccgggatcacgacgaccaccacaatcgcaacgatcgtgaacgacgggggccagacaatactggtcatggccgccgccgaaacgacgacgataatggagattggtgccgagagaatagcgagagacaatgacaggattcccgagatccaggccgtcatcctcgtaatcgtacgccggaaccaagcgacccatcgtcatcatcatcatctgcgtcctcctcattgtcagacagacatccacgaaggacacacgaccgccgataacccaccgcccccaacgctgggtgtagggctttcggtcgttccctacgtgatgtccgatggcctgagagattccgacccagagcaattgaaaagtatgatgggagcaccgacccagaagaattccttcaagtctactccacagtactctatgctgccggagcagacgacaacgcgctagtgaactatttaccaaccgcgttgaagggttctgcacgttcatggctgatgcatcttcctccctactcaatctcttcgtgggcagacaattcgtcgccaatttccaaggaacgtacaagcgccacgcgatcgaagacgacctacatgcgttgacacagaactcaggtgaatcattgagggaatatgttcgacgctttaacgaatgcagaaacacaattcctgaaatcaccgacgcttttgtaatctgcaccttcaaatccggtgtcagagatcgctacactacccaggaattggcgacaagacgcatcacagccactcggaggttattcgagatcgttgagcgatgcacccatgtggacgatgcgctaagacgcaagaacgacaagctgaagaccgggggagagaagaaatcagccacagaggcatctgagtcaagcaagaagaaaaatcgcaaaaatgggaaaaggaaagctcaagcgaaagtcctcgcagcagaatacgcgaaccgtcccaagcacccagactcacaagacagcgacacaaagaaatcttggtgccccatacacaagacggacatacattctctagaagattgccttgttttcaaaaagtcgctcgagaagcacatggcgtttgaaaaaggcaagcgagtatgcgttgtcgagaagaacgaagagacggctcctcacgaatcggattctgcgtatccagactccgacctccacatctcacacattttctgcagctccacaacgtactcctccaagcgagaatacaagaaagtggaacgtgaagtctgttcgacatggcggggagctgcacccaagatgaagtggtctgagcagaaaatagagttctcggaagaagaccaccccaagaccgtcgttatcccaggacgatatccgatcgtggtcgaacccactattcggaacatcaaggtagcgcgagttctcatcgatggtggtagttcgatcaatctttttttcgccagtactctggacgcaatgggaattccacaaagtgagttgacaccaactgatcaacccttccatggaattactccctaatcatcatccagacctttgggcaagattacgttgcctgtgaccttcggccaagccaacacttcccaacagagcagatc

SEQ ID NO: 11831 - DNA, 10878 bp, Oryza sativa
ccaccgtggtgaccgcgcccagtcggagcgacatgagtgggccgtaggccatggctagggcggcgagagagcggtgtggctggtcccgaggaggtggaggctgcctatgaacggcagagggcggggacccggcgggaggcggcggcgagagtgggcgaggaggtcaaggaggtagacggagaggagagagcccagaagccatggcagccatggaagaagaagggacgggaagaggaacgccattttaatttcttggtgatcgtttcactactctcgatctgaccagcagacaatgccatgcactgtttgtatatatctgcgccctcccgtgggtggaggttcctctgtcgctcgatcgtcaacttgtcattcgccatcctaatacttgttcgttcccaatatttttgaggtattaagaaagtatgttaagatgattattgaaagaagtgtgtgattggttgaaaagaaaaagtaggtcaaagagaatagtcaatagagacgcctatccgttggctaaatgctgaaatatgtcatacgttgtattagcaaaacaaaaaatatttgcgaataaaaattgtatatatatatgtcttagtgatttaaatatcacagtaaaaaataaactttgatgaaaaaacttgaaagttataaaattttagttttttacagtgaccgaaaaattttagttttttacagtgaccgattctatatagtggaaatgacggggcaagagtatatactccctccattaaaatatataataacatacaattggattagacatatctttgtattataaatctggatatggacatcgagattggtagtattagaatgtgtctaatttgatcctagattattatatgagttttaaaacagagaaactaagtcttaacaaacttaaagtcttcgttattgcacttcaacggttaattcgctaattaatttgcttcaaaatatattacaaagtactataaaaaattaacaccataaggaagtagtttcatagcatgaggccaaatacattgttattttgaagtgagcatactggttaggtttttttggtggaactattttactcgggtaaaaatcctacatttgacacgggtgctcgtatttacggctaattattttttcagtagtaggtgacgtacacgccaacagcgagactcctgtggtgactttgccaatttcaagatatgcatgtttcaatttttcgttttcagtgtttgtatcgggcggtgctgatatggcgaaattttcgaaatttggaacaaaatttagttaaatttgaacacatattaccaaaattcacaaaaaattaaaaatattgaaaatttcagccaaaataatatcgtataggagtgggtccaaaatgaccgaaatttctgatttcagtctgaaatgtcagaccctgaagatatgtcagcccaatcttccagatgtgctcgtaggggtagggtatacgtgcgcgtccatatgggtaagatacattgttattttatttatttttaaaaatttacaaatattatgttttcaaaaatacggacgccttctatttatttttggaaggaaggaaattaatctccctctaccctaacgctcgggccgtctcctcctcttccaaactcccaattacctttttcctcctcctccgccgcttctcctcctcctcgtcttctcaggctcccctccgctcgcctcctctcctcctccgccgccgtcgccgtgatggggacgggatccaagaagaagaagacggtgtcgtggtgcacgacggaggtatcggagggcacgcacgcgttcaagatcgtcggctacagcctcaacaagggcatcggcgtcgggaccttcatccggtcgggcaccttcgccgtcggcggccacgattgggccatccgcctctaccccgacggagtcaccgaggattccatggactacgtgtcggtgtatctggagctgatgaccgagaacgccaaggccatggcgttctacacgctgggcctggttgatccggtcaccggagggatccgctgcaattggtcccgatcatcgccgaggctgttcgattcctccgattcgagccgtttcgggccaagatccccactcttcataccgagaagtgatctggagatggaggaatctggctacattgtgaatgatcgcctcacggttgaatgcgaggttactgtcaccaaggggccgcaggtgtcaagaaccattggttgctctgaaatcggcgtgccaccttcagagctatctgaacattttgggaagctgttggaggaggaagaggatgtagggagggatgtggttttcagtgtcgagggagagtccttcgccgcgcacaagctcgtgctcgccgcgcgatcgcccgtcttcaaggcggagttttacggggagatgattgaaaggggcacattttccatagatatcaaggacatgcagccttctgtcttcagggctctcctgcatttcatctacactgatgtgttgcctgctgacattggcgatcttgagggagatgattatgtcgaatttatccggcatctagtcgtggcggcggatagatatgccatggataggttgaagttgatgtgccaaagcatccttggaaagtatgttgatgtgaagaacgtggcgactacgctggctttagctgaccagcataactgtgataagcttaaggatgtttgcattcagtacatttgctctctggatgaggttgatgctatggtcaggaccaaaggctatgcaaatctcaaaagaagttgcccttctgtgttggcagatttatttgagaagacaagcaagttccgtgcttcttgattaattaagcttactctatgattagttaatttagttccctatagtattagcttgtccaaactttaagccatgggctgttagtttagatctaggtgaccaattcatggataggttagcagagctgatgggtaggttattcactttatttttgatttaaatgaatggcctgcagctaattttcatagagtggctcatatcctggtaacccatgtgtcattagtttatgtcttaaattttgtgcacccttttgtcgaacggttattgtataaattgtcaaatatcagtgtcttcagctgtccagtaaataaaaaagaacttgcttatgcttatagtgctttgataatgaaaccactacagaatacagataacaaatgcatgtcattgtggtaggaatggatgactaaagcaattattttgatgatattatgatattaatcatgcaaccttcaaaattggatgatagctgttaatgtacaatctggcacataatttttggaggtatgttttctgttcatatatccgtgaatgtagttactcagccaattaggctcaattatactttgtgcctggaaagccgtaagattagttcttgtatatctggtcacctgataaactatcaaatttcaatttaacatcatactgaggtttaaatgaaaggtgaaaccaggttttatagccctaagtcctcatcaataaataggtcaccgaggtattttaagtgcatataagaaggggcagagccacaaattggtcaagcagattattttctgatgtgctcatgtctaactattttatatctctggattttcataatattttaatagagctactaataataagcctaaagccaagctcaagcccaaatttccgtaggtttgcctctgcccccgcatatatataagagatttattcctgtgttatgagtcagccagaataatagctctatttttacattgccgagcacaacataaaaccctctctcatagtgaagtttatcaaggttgtatgcttggaaagctaaacaacagtatggacgaagcttcagaggtaaagatatgatcattgtcctaccgtcctactgaaattctgctgcattcataacaatattcaagttcaagatccttcataagattgaagtgatctaatatatctagcgtcatatataggagcataagaatcataagtcttgaatcaagcttctgacggcatagtttggcagctgatggaactactgcatcttagttgtttcaaccagaggagaatcaggtattgttttcctctgtaatctatcttatgtatgagtcgttcagttattcagtgatgctgatagctttgagacgacgctttattatgcgatcaaacttcagggtcatcttttagtgcatagtataatatcaaggttctatacttgtacattttaatagcatgacagctatctccatatagttgtttcattttgataagtacatggttctggggaaagatggtcctatgtagctgtattgaattccttcttttccttatttaagcagcatccatgacagaacatgaggaaaagaagatttgatgaatcctaatttaaaaatatttgttataacaaatgttaaaaaaaggataacaaagtttgtcaacttgagatggtagtgtgcattgtgttagaaacatcagatggcctatatgctgcatgtctcatttttattctgtggtgtggtttcagctcattagtttgttgagaaaaatatgtagttgggacttgggagtatattagtataaacaagcaaggcttattagagttcttcctggaggatgttggttgctgctgttgccaacttgtcgacctgaaaccaatgcatgcatatcctgacctgttgcctgatggttatcatgttatatgtaccctgattagcctcctggtcttcttttatttctgagaaacaatgcatttgatgattattccttattcaaaagcgtatctggattgaatgctactatttagctacgcatagaaggtatgtaatggctcatggctggacttggacttgatatatagcattctagattttactgtttcaatccatcgacccagatgtattttgaattttgcacaagtgaaataacgacaagtgaaatcaatctttgtggtgaagaaaaatcaacctgtctcatttccagagattccatctgcatgccgaaaggatgtgtcattagcttgtatgacagcttgtagggtgaaaattttgttcaaactgtgtgattgtctacttgtcgtgttgaggttggaataggtggtggactgatggtggtgccatggggagcatgtcagccaaattttgtcatattatggcaaaatttgctacataacactcgaaaaatatgatattggctacaagacatcgtaagattatggttttgctgttggacactgtaaatttatggtattttactactagacaccgtgagcattattatattattttcatcacattgaggagagagaagccgcatgaaatgtccgttttacccttctgatcaaactaaatatgtgtgcttagcagcttagcctgtgtagattgatgggggcacagcggcactggctctagcaggtcgatggacctctcatcatactgcccaacgggcaagcatggctgctttgtgtccactgaagagggccatcaggattcggttcctcacgcaattccgtccggcctcctcgtccatgtcgccacctggaggattcggttcctcactgcttgcgatcgactagtcgtttttcaagttcgcaacctcgcggtggcaaggagaccgaaaaggctgcaggagagcagttggccgtgctcctctgtccccttaacaccaatggagaagcaaggtggcagtagcgcaagtttcgaatggaggccaaggtgaaaggaagtaaaaatccatttgaatagaaatgtaactaagtattataagaactcactggtgaaaggaaattggaaatagggctatggatgaagagattgtgctcgctctttaaaaacctaagtgaaaatgagaagggtgctgaggtcattctttagtgtgtttctcttttaatcactcaaatatattattttaatgagaggcatgtccattagcaaaataccacaattttatagtgtccagcagcaaaatcagattattacaatgtcttgtagccaataccacattttttaagtgtcacgtagcaaattttgccatattattattgcattggatgtacgggtgatttgatacgaattttttttaaaagaaagggaaatgttcgatctaagtatataagtgcattatggttatttagtttgattttggttagccagatattgtagatgaggggtatgtgcattttgcgaatctaatcttctcaagccgacagtttggcctcaataattagaatctaatcttctcaagccgacagtttggcctcaataattagtatcattgaaccacgtggcatatttaaactttgagataaatctaggattaaaatgaggtaaagaattgataaaaatgcagatccatcggggaaaaactaaatacagaaaacaccagtagattttaaaaggaaaaacatagggcctgcccctttgcaactaaagaaattcattttccattaatcatcaaaaaataaaagaaaatgaagaccaaactgggaaaaaattaaaaaaagaataattgtgaaattatttaagaaaatgaaaataaagttaaaaaggtagaagcaaaataaataataataataaactacaaattttactgttcctaccatcacggcatcaccactgtccttcacggtcacaaccgtactgacaagccaaagctcagtgtttatgccaactacgggctagagctctctgtcatgtcccaagccatcaatgcctggccgaatcaaataaatctagctaggaatcgttctgaaaaaaaaatcacgatttgttaaataggaaagaataaaataaatagtgcattgggaaaaatctgacctactttcttctaaggataattctatcattctcgagaaggtatcatatttttcagtataaaattgaatatctctaagtattaagggtgtgttagtgtgtctaaaggcattttggtcttttctcatactcttgtgtacattttatatggtctattgatcccaagtcaatgcacaaattcaatccccaaatcttctcttaaagtgacattagatccaaaatctacccaccaaatctcccatagccggcgcgcgccgggccatcgtcgttgtcgtctgtcatctacaatcgtcaacagcaatagcaaaaatatttttggtcgctgctagcaggaagccgcattggtcatcactagtctcgtcgccggccatccatcgcgtcaagcatctcgtcactcttcgtcgttgttgtcaagtagcaccagcagcaccagtcagtgccttcgtctccgagcaacagccagcatcaagctcgtccgtcacttgatcttccatcagcaacaaaatcaaccatcatcatcttggagtagcaccagcagcaaggtctttctcccccagatcagtcctcgcttgtgctgtaggatcgcacaagatcgaacaaacctaccagagagaggtgaatggtagggaagaccaaaaacccaaaaatcttttgcggaattaaagattaccctcaaacgaagtcgatgacgaagtccagtcgccgccagtcgaaccgcccacctgccgccggtcagactgccgaagcctcgccggtcagaccgcccgtacacctgcggtcagaccaccgctatcccaccggtcagattgcgcgcacacctgcggttagaccgtcgggacccagaaacaccggtagatgacaaactcgaagatgtagattgaaacttttcgactttattgcatcaactagtatttataaagtgcaccaacagcactcctcaccaaaatctcgaactaaactcgaaaccctaactttctctcaacttgtgtctctctaaaatcgatactaggaagtctcatgctccctctttatttatagataaaaaaccccatacttaaataggtatagaactcctatttctaatagaactcaatccctcactttcctttttctccaaaaccacagccgcaccagccatgaaaaatcgccgtcgccatgtcggactccctctgctgatcaaatccgtcttcaacacatgtccttctccgtacggctcccgctcgtccagcgtgggccgacgcctgggcctgctcggccttccaacagaccagaaccaacacacatgggcatgcatacatcacgtacacacgcatgtactgctcgccacagtacacacatatgcatgctacagtacctcgccgtactgtagcgctatatactccaatccaatttcttccgatctccttgaacaccgatgcttgcacgcacacctcgtgaagtccgttgcgaagatctctctcacacgatgtccatacaccgtatggcattttgtatccaacttcgtcacccggtatccttgactgtctggacctcagctcctctctgggtctagtcctgatccccaccattgaccgaagttgacctttaagaattctgactctagtcaccttctcacatggtatcccgacctcaatagacctttgctcctctcgagcatagtcccggtcctcaccattgaccaaggctgatctcaagccatctgcaaacaatcagacaaaacgaccgtttctgggcacagatatcacaacctgacccacattagtcacatgcactcacgccaacattcacacatcatttcaaaccaattcattgattaaattatttgcacagccaattattcattacaaatattaatcatgacaatgatttcacatgtgcttgccatcctcgtccgctgaagctcgtcgtcttcccaccgcgtcagatccggtaattgcaggcttgcagccatcgtccagctcgtggtggcctctcgtcaatcctcctgtcgtcctccagttcggttccagcagtgacagcagcaagacgtcctctttgtccatcttcaagcaacaaccaacaatagcagccagcaactcattgttgcctcgcctgtgtctccgtcgacacattcgctgctgttggctccggcaaggacggcttcaccttcagtgtcaaattaaggattgtgcagtttgttcggttctaatcctaatttcactcgcagaattcacatgtttttaactttactccatcacatgtgcagtcagttttcgtgcttgctggtcgctgccatctgataaccactcatcaatcatcaccatgcttctgtcagcatgttcattagtagcatcctttggatctcttgctaataagtaatagagcaattttacgatccttgaggaggtaccatgaggtaccactttttctattgtaaatttggtacctcttggtacctaagtactatgaggtactaaattttacactaaatttttggtacctcatggtattttctcaaggaccgtagaattgctctaagtaatatgcatctttgcttgctgcacatctatcaatatttccttttgctatatctatcaatccatgtcctctactaatcaatttcctatgtctcctaccgagtcaaccaaagtacattgcatatccttcgattcgttgaagtcttgctagtatatcatcatcatcttcactagttccatgttggagctagccttcatatcctcaccagcttcacgtcggagctggtcttcgtcatcaacaactcgtcggagttaaccatcatcatcagcttcccatcaaagctggcatcatcatcaatccgtgaggtccgaagaacagtttgtgaagggccttcatcaatatcaatgtctcatcatcagtcaaggacctaagaacagtttgtgaaggtccattgtcatcatcatcaacaactacatctcagaatcaatgaagagccaaagaacagttcgtgaaggcttcaaatgtaccaaggttcgaaaaacagtttgtgaaggctccgaggtcaacttcattgaggaggagatggatttcttcatcatcatcaacaactacatgtcagaatcaatgaagagccgaagaacagttcgtgaaggcttcaaatgtaccaaggttcgaagaacagtttgtgaaggctccgaggtccatttcattgaggaggagatggatttcttttcttcttcatcatccaagaattgcacgttccgatgacatcttcaagcatggactttagatttatcctagtgtggcattaatctagtgtttagtttcaaatgcaatgttattgcatacccattgcatttgagtgagggtgttaagtatgtatgtgtgttagtttgtctaaggatgtgtgttagtgtgtctaatggcattttggtcttttctcatactcttatatactttttatatggtctattgaccccaagtcaatgcatcaattcaatccccaaatcttctctcaaagtgacatttggttgcatgcattcctctggcccgcgccggctcatctctctcatccatggtgagtttggcttggatgaggagatactacaacaaaaccattgttttaagacgtttcacttaagttattctataagtcgtctctcttttataagtaaaattgaaatagggacgatgtttgagacgctttattagttgaggatagtttaagacgctttacatgttagcacaaaattaaatcgtttagagaggaatattgagacgttttggaacgtctcatgtgtagaaatgagttttgagacatttttattatatctgtgtcatcgttattagataatatataattatttatatcgagaaagacaaaaataaacacactgttcctaatcgtcatcatcaaataccgttataataatattataattatttggacaaaaaaattgaatatttaatattcagtctcagattaaaaaagaagagtatctgctacaggacgcatgtttgtagagttgcagtataagaaaaactatctatttaccttcaagattgttcacgttaatgacttggttaatgc

SEQ ID NO: 11832 - DNA, 583 bp, Oryza sativa
ctgctaagtccccgtcgcccgcggccgccccgccgctgcgtgccctcgcatccagctcccttgcccgcgcctcgagctcagcggtccgctgatccagtgcggccctctcggcgcgggcaccttccagattgcggcgcgcttgttcctcccgcgccgcctcgcggagggacaggctgtccgccagcctttgcgccgcggcctcggcctcctcgagagctctctcccgctcggtgagcgcatcctcgcggaggcggagtgtggactcctcttcggcacagccggcctcgtgcgccgccagtgttgtctcccggatggcgacggcggcctcgcggtccgccaggtccctctccttcgcgcgggcgcgctcttccagcaccatggcgcgggcctcaagggcttcttcgcgccgccgggacgccgcctcggtcttcgccgcccgccgttcccgggcagcggcggcgtcaaggaccccccgggcggcgtcgagcttctttcctagctccgccgcctaactcccgtattggaggcggagatcgtcccgcgccttcgtcagcacggcggtggcaattgagggcagcctctc

SEQ ID NO: 11833 - DNA, 1085 bp, Oryza sativa
accgtgacaatttggtatcagagcaatttcgatcctggagaagccacgatatacttcccgtttgcaacttcaagtcgaagcgatggagaagcagaacattgatttcggcaaggtgttgatggagatctaggagtccttggtgaggctgaatcgtgctcaaggcgaaactcaagcagcggtcgtcaagctagatcgcgaagtgagcagttggagacctcaagtagaagcagcagttcaggagttgcgtgaggaagtcggcgaccttcgtcagcaactggatctcgtcggcaaaatgaagcaggcttctccggcgacgtcttcccctccagcaccatggcgcgggcctcaagggcttcttcgcgccgccgggacgccgcctcggtcttcgccgcccgccgttcccgggcagcggcggcgtcaaggaccccccgggcggcgtcgagcttctttcctagctccgccgcctagctcccgtattggaggcggagatcgtcccgcgcctcgttcagcacggcggtggcaatgagggcagcctctcgcttctcctccacctccctggcaatctccgccagctccttccgacgggcctcgagctctcaggtgtgccggcggtgtgccttgcggcccgcctccaccatggcctccaccgagcattgcccctcttcgacacgcgctcacgccgcgtcgagctccgcccgctctgcctgcaggacctccatctgggcatttaacccatccaacaccgtggtgttcgcagtggccaaggcttgcagaaggggctccgcgctcagtggggcagcggaaggcatgggagagagccgcctcggtgagaatgccgcacggctcggcccgccgatcgacgtgccggactcggggacgtcccccgaacctggctcgtcctgagcgtcgcccgaggagtcgggcccgagcggtgcgcctgcggcctagtcgtgggtggcctcggaagtcatcgtcgcctcgggcggagtcgggtcgggggcttggcaggccgcctggcgtgcgcgtgccacctccgcctcccgggcggacttctcggcccggcggagcctggcctcctcccgagc

SEQ ID NO: 11834 - DNA, 1022 bp, Oryza sativa
tagaaaactaaccgttacagggcaatcattgagcccactcaacctggctggtctgaccgcagtgaagtggccggtcagaccgtccacggctcggtcagaccgccatcggctcggtctgaccggttgcggctctggcagctctgtatcgccaccaaaaaccagaccagtgcaacagaccagtagggccggtcagaccggccttaccacgctggtcagaccggctaacagccccggtcagaccgacctaaggcccacggtcagaccgcaggtcacttttcagcacaaccaaccgttagtaaaacggcgatatctcttgactcgggtctcggaatttggcgttcttggactctatggaaagcttattcaaagggctatccaacccatgaacaatccatccaagaaacacaacttttctcagggagaaagggctcacactccaaagaatactccaccggacataaccacatgaggctaaccaaacctataggatgtgcccacttctctctttgtttgggacttgataaaactcaccacacttggctagacaagcccacaaaatgcacctatatgcatatgaactaatatggcacaaaatcatccacatgctcgcttcatatacccctcttgatagtacggcacatatctagtaaatccggtctacaccaaacaccaagaccgggaaaaagactaagaaaacattcttagctccattatacctttgccttgcgccatccaacttggggtcaatgcttgagccaacatcaacacttgtgaccattcggttgaaccatgtttatgccgagatctttgccatcctttgtcaagactttattctcatcacaagcttgacttcattcttgccaacatgacgatgtccttggcttggtgaccattaacccatggtgtcattcattagcctcatcgcaattagatctattcctttgcacgactcaaaggaaaacattagtcccaacaaatcggttggcaccctccacttggtgaccaaccggttgcttataaag

SEQ ID NO: 11835 - DNA, 607 bp, Oryza sativa
cccagtcagcgaataaaataaaaaattccctgggtcccacctgtcattccctaggggttatctctcgcgcacaggccacccactataaatggccaaaaggcccgaggcccgaaggcccggcccacggcacgaccttttggcccggcccaagcatagcacggcccgactgggtcgagcccgtgctagcccagcccgaccgccgtgccgtgcttgggcctccccaccggcatgctgggctggcctggcacgatcaggccggcccggcacgatgggccggcaggctaggcccggcacacaaagtatagggactaaaaatagacatataaatgtcatggtccaaagaaaagggacctaaaatagacttattttatctatttatatcacaacccaaagaagagggaggttaaatagactttttgagctatatatgtcacagcccaagaggagggaggaaaattagacttattctgagaaaaagcacgatggaccgtcgtgccttcaggccggcccggcacagcccgagtcatgttgggccatgtgtgcggcccgtgggccggcacggcacggcccggtgcgtccgtcgggccgtgccggcccgacaagcctt

SEQ ID NO: 11836 - DNA, 646 bp, Oryza sativa
tctttggcttttatctactttgaaatattatggtcttacttttgagaaagtacctctctttttttataacacaagtgctactaacattgctaagaatcctgttcaacactcacgcacaaagcacattgatattcgctttcactttttgagagatcatgttgagaagggatatgttgaattgcagtttttggacacaaagttgcaacttgctgatattttcactaagcctttggattctaatcgctttgcttttcttcgtggtgaattgggcatagttcatccttttggcatggtttgagggggagtttgtacctcatggttttatcaagcgataatatgacaatgagaaaaattgagaaaatagagctttggttatgcaaatggtattttcttgtgcatgctagcaatactttgaaggtttatttgtctctagcatagcttgtatgtattctagtcttttcatgagatttagattttgcttttagggagatgatgcatgacacttaaatctatacttgaataagaaaatatgcaatgttgatgctagcatatggtttgattaataaatgctttatatatatatgctttggtggattggtattcctcaaatagccttaattgctaatgtgaaaagagaataaaaaat

SEQ ID NO: 11837 - DNA, 736 bp, Oryza sativa
  unsure (1)..(736): unsure at all n locations
atgataanctangaacacatctcggtacccctaatttttccactgtaacatgttccacaagcatggttaaaatcttgagtacttgcctacataagacttatatagttaacttatatatgttgtcatcttttgggggaaattatcaagttggacagccaatgattaatagtagctttagctgctgatggagaaagggatttcaaagattcaggcactttttgctaatttcaaatacttcagcatttcacatgtatgcccatagatttattaattagcttccttttgggagatattaattagcttcctcagctcggtagcctttcaaatctcaaacaccttgacctcggtttcatatcgaatatgtgcacaacagatatctcatggttaacccgtctgcataagctggagtacattgacatgagctttataaatctcagcacaataactgattggcctcttgtggtaaacatgattccatcccttaaggttctcagcctgtacaattgctcacacacacacacataaacctcacaaaacttgagcaccttggtctatcaaggaactactttggccatccaattgcttcaagttggttttggaaagtaagaaccataaaggaacttggtcttagtgaaacctatcttcatggtccatttcctgatgcactagggggaatcacatccctccaacagctagattttaccaataatggtaatgcagccacaatgactatata

SEQ ID NO: 11838 - DNA, 2065 bp, Oryza sativa
tgaagtagtgatcttttctcaagaaatagtatgtaccactgcttcttgtgttaattacgcccttgcagaaaagaagttattatcatcactgctagttgtggtgtcgaccaccctgacctttgaagcataccgctgccagcaccagcagcctagctttcgcggcgttgcccggctgcccagacaagtgcggcaatgtcagcatgccgtatccttttggcaccatagatggctgcttccggggaccacccttccgcgtctactgcgaagacgaccatgcggtttatctccaggagcacaagaagttgaaggtcttgcgattcgagctggcccagggcgaggttctcatccagaagcgcatagcaacaagctgcggcgtcaacctcaccggtaaagccgtcggcattccatgggtagtgcacgatggtggcttagcagatgactatccctatctgacaatctctaccaagaaccagtttgcagtagtcgggtgtggtatcacagcgatcatcgttggtcagggagagaaccagcctgattacacggtcggatgccgatcattctgtgatgatgtcgatagcaatattgtcgaagataatagcacgcaatgcaatggcaacacgggctgctgccaggcttccatcccaggtaatctcaaggctttccagccctcattcttaaaaataagcggtgtgaactactccggcgtcccgtgtgtctacgctttcgtcgtggagcagaactggttcaaattcaagacctcatatgccaaatcgatggaactttattcaaagtatcgaaataagggcaccggggttcctctagtgctcgacttggttgttggtaacgaaacgtgtgacgaagccaaaaggaacgcattatcctatgcgtgcaaggctacgaacagctcttgcatcgacagacctagccgctcagggtacctttgcaactgctctcaaggttatgaaggaaatccctacctacatggaggctgccaaggtgagaatgctctccaaaaatttccatgcccccttttcttgcaactagaaacatacaaattgacaccacttctttttaattccctggcccaacatcgtttgatggacagacatcaatgagtgcgattatccatggttgtatccttgcaaaggtaactgtcgtaacaagattggaaactatgcgtgttcgtgcccatctggaactcagagcaaagatcccaagatcataccctgcactccaaccataggtatatatataatattcactagcttttttgaaaaatatttttgcacaagtcatgtttggggaagtaacaaactattttcatgggaaacttttttttattaaaagtggtaaacaaatatctatatatatatatactttcaggtttaagcattggtataggagttggtagcgcaacaggctttatttgcattgttctcattgcaatgttccttaccagacggataaagcacaggaggaaaataaagctaagacaaaagttcttcattctgaatcgtggacaactgcttaaacaattggtatcccaaagggcagatattgctgaaagaatgatcatcacattagatgagcttgaaaaggcaactaacaactttgacaaagctcgtgagcttggaggtggagggcatggcactgtttataaagggattctatcagacctacatgtggtagccatcaagatatcaaatatagtggtcccgaaagaaatagatgatttcataaatgaggttgccatcctctcacaaatcaaccataaaaatgtagtaaaactaattggctgttgtctagagactgaagttccattgttagtttatgaatttatttccaatggaaccctgtatcaccatcttcatggtgagggtccaaggtcgctatcatggagcaataggttgaggatcgcagccgaaattgcaaatgctctttcctatcttcactcatcagttacaatcccaataatccatagagatataaagtccagtaacatacttcccgatgataatctgacatcaaaggtatcggactttggaagctcaaagtatatcccaat

SEQ ID NO: 11839 - DNA, 1807 bp, Oryza sativa
ctcacagttgttgttctcaagttccttagtcagcatctgaatctcatgagcttgttctactacagaacggtcatcgaccatcttgtagtcataaaactgctccatgacatacagctcactgccggcgtcggaaactccgaacttggcctcaagtgcatcccacatgtccttcccgaaaggcatgtgcatgtacacgtccactatattgtcagcgagtacactgatcaatgctccacggaacaggcaatccgaagccttgaatttagcctcttcctcaggagaaagaggtggttcacttcgtttgccccgtgaaacatagaagcattgcatcgctgtcaaccacaatagtgcacgtgctttccacctcttatagttagaaccatcaaaagcatgtggtttcagtgcagcagcaaagccactaccgaaaatgacctatcaggtttttggattgttggaaatatggtcatatatcagcatattttaatccaaaatattaagacaataatcataatcatggcatgaacaatgtggggtgatctagtgacaacttatagcataaccagtaacatgcttaaggtatcatgagcatcatgcacatacccataccaaggacgcaattgacttgcgactagcatgactaacagcggtatgaacaaatgaattaacaacaggagaaggacataccccgagaatggccctccgctgaattgtgaggcagaattgcctctgttggtgttgacgttcgcaacggctccggctcctggcgcgtcatctccagaggcagcagcggcgccggcggcagctccggctccaggcgcagacatggtggatgaactgagcagtcgtgcgggaagcactccccaaaaacctgatcacccgcctacccggtgcatatctcaggcgaaggtgtggttctagaggcctgcaccttccgatctctcgtgcgcgcaagtgatcagaagcgaggaagcgagacagcacaggcgcgcgcggaggaggaagaacaccagggagaaaagcaagcgaatcgttctgatcggactagcggcctccttagatagcaggagagatcccgccagttgcaacacacgcgtcgtggaatcgtgggatcgtgcacgcaccgttacggaggcagtcgtgggaacgtgggatcgtgattgcaaaagaatagagacgtgacgtgacgcacgcccgccagccacgccttgccttgttctcggccgggccggcgcgcgcgcgcgtagctttccgactcccacctcaaccggtcaatagggagcctccaataactccctatttaggttgagatactcctcgcttaaattctgaggtggtattattatccttaacacttattatgggcctttgagattttaatagaataaatcgggtctagcccaattattctaacaatccccaccaaatttcaaggctcagaagaaatgttctcaaggttgtgcctgtttgatatagcagtgttttggtggagactgttaagttgaacttccacctagaaaatgagctacatcagaccacaactgaacaatggactatgccttgaattgtcagtcttgtgtgatcaggtttcactcaaacccttatctggtattgggctgccgttcgcatcccctctgtttggagcatataagtcaaactccaggcctttaataagtatttagagatcgcccaaacctcatagattgtgactagcagtcgaactcatataggtgtgttccttctgagatgttctgcacgtccccctctgtgcttggaaaagccactcggaacacattaaggtttgagccat

SEQ ID NO: 11840 - DNA, 1077 bp, Oryza sativa
ctattctcgggttttccctaatagcacgctggatcataaggagtagaagttggcttgcagccactatatccaaagtgactcaaaatcttgtccacatagtgggattgcacaagtgtaatctcaccctcatctcctctttgtagtttaatgttaagaataacatcagcctctcccaaatccttcatttcaaaactcttggacagatagtccttgaccccctcaatcacattgaggttggtcccaaagatcaatatgtcatcgacatataagcacaagatcactccttctcccccaccatagcgatagtacacacatttgtcagctccgttcacaacaaagcctgcagatgtaagcgtggtgtcaaacttctcatgtcattgcttaggtgcttgcttaaggccatacaaggatttcaacagtttacacactattccctcctgaccttctagtacatacccgtctggttgatccatatagatctcctcctccagctctccgtttaggaaagctgtcttaacgttcatctgatggacgagaacaccatgagaggctgccagagcaagtagtactcgaatcattgtcaagtgagcaactggtgagtatgtgtcgaaaaaatccttgccttccttttgggtataacccttggccacaagtcttgccttgtacttttcgattgtaccatcagggctaagctttttcttgaaaacccatttgcatcctataggcttgcacccatatggacgctcaacgacttcccaagtatcattagacataatcgagtccatctcactgcgtactgcttccttccagtagtcagcgtcaggagatgaatatgcctcttctatggttcttggggtgtcatccactgaggtatacaatgtagtcatctccaaaggattttgcaaccctttgtctcttactcttacgagtatctacaatgttgtcctcctcaggattttcctcaggcgtttgatcattgtgttctatcggtgcaaagtgcttatggggcatgacagtttcttgactagaaaagcttagtggttgtttaataggaaaattattcttaaagaatggtgt

SEQ ID NO: 11841 - DNA, 7383 bp, Oryza sativa
tgttggaaatatggtcatatatcagcatattttaatccaaaatattaagacaataatcataatcatggcatgaacaatgtggggtgatctagtgacaacttatagcataaccagtaacatgcttaaggtatcatgagcatcatgcacatacccataccaaggacgcaattgacttgcgactagcatgactaacagcggtatgaacaaatgaattaataacaggagaaggacataccccgagaatggccctccgctggattgtgaggcagaattgcctccgttggagttgacgttcgcaacgcctccggctcccggcgtgccatctccagaggcagcaacggcgccagcggcagctccggctcgaacggctccggctcccggcgcgccatctccagaggcagcagcggcgccggcggcagctccggctccaggcgcagacatggtggacgaacagagcagtcgtgcgggaagcagtccccaaaaacttgatcacccgcctacccggtgcagatctcaggcgaaggtgtggttccggaggccctgctccttccgatctctcgtgcgcgcaagcgatcagaagcgagacagcacaggcgcgcgcggaggaagaacaccagggagaaaagcaagcgaatcgttctgatcggactagtggcctccttagatagcaggagagattccgctagttgcaacacacgcgtcgtgggatcgtgggccgttacggaggcagtcgtgggaatgtggttgcaaaagaatagagacgtgatgtacgcacgcacgcacgcacgccagccacgccctcggcctcggcccggcccggcgcgcgcgcgcgtgtggctttccgactcccacctcaactggtcaacagggagcctccaataactccctatttaggttgagatactcctcgcttaaatcctaaggtggtattattatccttaacacttattatgggcctttgagattttaatagaataaatcgggcctagcccaattattctaataggaactctgggataggaccctctccggctatcctgagaaatctcgggagagcttggaggttgttcatgctaagatcatggtgcctcagatgctgcaaggagagcaaggagctactaaccttgccggacatagctgcctctccaccatccgtgttgcggaggtggagcttaaggacatggccggtgaggttgctgcacctgacacctctccaatggcggaagcagtcttctccggtacgccacgaagcgaggcggcccacggggtcgccgacgacaccttccttgaaggccagcagcgcgtccctctcgtgcggcacgcaggtcgcgccggcaatatttggccgcccatgatgatgctcatgtagtgcatcggcgacgaggaataagctgccggtgcaggctgctatgacgacgagaagcagccatgaagacttggtagctgatgaggggtattgcatagtggcgatatgggtaacgagcagtgatccaagctatctgcctatgcaactcgatcgcccgtggttatttgtgcttgagcatatatttctttcatcgatctacctttgtattaatacattataaagacaaggcctagaaatttactaggtaatactaaaagataaagaaaaaagcattagacaaatcgtttcggttggtagtgtatattctttgcaccataagccttatagataaaactaagagatttgcttcggtctagcaaaaagtacatcgagatactggtacttcacggtaccaaatcgttttcgatcgttggatatagctgagcaaaattgttattgttagatccaacgatcggaaacgatttggtaccactactagaaaaaccatttttcctagcattgtcctattattttcattggtggaaaaatgtgaaaaccgccagcaaagtcgtaatagataatcttcgctggtggtcgaattttactggcggtcacttgggtgcgccgctggtgaaaatagataatcttcgctggtggtcgaatttttcctgccggccattaaacgaaaccgccagtgaaaacccaggtcagtgatccaaaaatatcttgtcacattaaaaccacccacctacctcatcctcttctccttctctccacatcccctcctcttttttccatatctggtcacattatccactcctcactctcttcctccctcctggcctccccaccggcgacggcggcggcggctctggcggcggtgaccggcggcgatgaccagtggctccccatgccgcccctgccctcccatcccgtctcccagatctgtccgaggggaggaggccgccggcggcggcgcaacagaggtggcggcggggaggacggatctgccccgctggcggcgcgggcggcagatgtgcatgcatgcagcagcggagctgacgacgacgatgacgacgacgctgcctgacgggtggcgccactgccctccccttccgtacccacccctttcctcccctaccctcttccagatctggctggaggagaggcagccgacagatgacggcggtagcggcggctcgtccccgatggcttcagcggctagggttctcttgtgtgttttggtttgtaaggatgttaagttaatctgtgtgttgttaatctgttctgttgatgatgccaatgtgttgtatttgaattgatgccaatattatgtgtttgtgatgctctggatttggattgatgcttgaatgatgtttatatccagtttcaatagttgctaggcccctaacgagctttaatcccggttgatgataccaaccgggaataaatatctctattcccgtgtcatctccatctctcgcgcgctctctctttccttatctcctagtatagcgcgcgctcagcctactctcttatcttctttctattccacccctcccctccacactctccttcgtcgatccctatatcatttggaattccacctgttaactggttgagtgacaaggcaacgataaccatataagaaatttcagctgcaccatactttagttcttgatgcttcattacttgagaaaaaatttccatgggtacatattttcctatgacatcttggtaccaactaacctccgttaatatcatgtgacgttttggtgtcattgatgttaattttatcaaatgttgaggatgaccctgatatgttgttgcctgttaaattcaagaatcgaatgctgtcaagatttgtaatactgtttggaatatccccatagaacatgttataacttaactgcagatattgcaagttcaccaagtctccaatccatactggtaatgctccatagaacttgttccttgaaagatctaggaaagttagtaatgatatactttggaggcataacgggaattctcctgaaattctgttgttacttaagagtaggagaaataagtttggcattctaaaacagagggggaagttctccgtcaattaaattatttgactagtccaatatatacaagttttacaacttgcaaacagtaatatgattgcaggacagtattagatctttaatacatggagaaccaaatttttatggcaaattccctgacaagaagttcatggagacatccaatttccggagtcttctcggcagctctggtatctgcccagttagtttgtttgaattgagaaataatgaatccaaccaagtcagattctgtatacctactgctataggtccactaatgctgttgtttttaagattgagaaagcttatgctctttaagtgagatatctcatttggcaacattccagtcatgttgttgccttgcaaactcaagtatttcaatgggcttaaataacatcgtggcaacttctcaacaagctccgttatgttcccagatgatagccccccatcaagtaacagtgttgtcaattcacaaagattttgcaagtctactgtcattgtggctctgttaccgttatcgaaaaaatatagctcttggagggacctcattcctcctagtgcctcaggaaagggaccatcaagataggtttgagagaggtcaaggatcttaaggcttgttactttctgttggcggatggcatgaggcccttcgactaaatctgccgaaacccgtggcgaaggctatggagcaagaacggcgtgaggcgaagagtcgtacgagtgccttgccaggccagaggcgtctcaggcgaagggtgcaaggcgaagactatctgccgaaggaagacgacttcgccatagcaagttcgcccccacgagggccgaggaagcctttccggcccatcaagcctaaggcctacagggccggcgatcaccagatggcccatcaggggcccatgagcccctataacattatgtacccctgtaaatgtcccttttgtgagggtaatcatgtaaattcccctgtacaacctaaagcctagtagtaagaacctgtaatggggctataaatagtcccctagggccatgtaatggggggatccaagaagaagaattcaaaaattcaatacactttgtttccttccaaccactgttgagtaaccacgtccttcgacatatgcagttatcatttcgacaacactttccaaaaccaacctgatgcgattgatggccaaagtggttcccagagagatcaagcttctcaagttttgtctggtttatgtgtgtgaaagtctggtttgcacttgaaagtgaggaacccgaaagaataagaacctcaagggatggaattgtgttcaccacaagaggtgatcaatatatcatttactgcgcttaggtttacgctgctcatgtcaaggtacttaagttgatgtagattggttaaccatgagatatctactgagtacatatcagtatccatgaaaccgaggttaaggtgttgtagatttgaaaggttaccaagctgaggaggcactctaccaaacaatatggatgtttcagacacatcaagatatcttatgttcttcattgaaccaaagtactctgggacatggctggcttcaactggatagccaaacttgttaatagagacatcaagctccacaagttttgcgaggtttcgttgtgtcaatgactgagttttgcctggaagcgaggagcaagaaatatggagggccaccaaagatacccaagtatcacaatggtggagcgacaaggaatcagggtagtacaacctacacgaattagtgcgactactgggtaggtccgtcggtttggcacgcaaaccgaggccaagcaagttaacgtgtgattctaataaagcaagttgcaaacaaaataataatgattttctaattataggggcaattggtcaaagggtgacttgccttgctcaaggtcttcacgaagcttcacgaatcttcgagaaatccacgattgacgaaaatccggtaaccgcaactatacgcaaacaatcgaaatcctaaacaaaagagcaaaagaaagatcctatttagactaattaatagttccattggatagatctcaattttacggaattattggaagtggaacggagtcaatcggtgttacgaatcgggagacatgaattttctaaggattatttgattttctgtctaaaggaaaaggaattattaattcccttgaaaaagataatggaggagggaccggaatcagacttttaggccaagcgtgaggcgcagcccaaggaatttgcgtgcgcggtcgaggcgagtgggtcggcgcgcgggagtgacggcccacggccgagcgaggcgcggcccaaacggacaagacgcgcggcaggaagccagtggacctcggtccacgacgcggggtcccaggatggggcccacctgtcggtggccaggttcaccgaggagaggttttatgcggcgctgcgctagggttttggtgggtgcggtttgcgcgaggtgcaccgagaaggccaaatggcggtgggcccacttgcagccgcacggctcttgtggaccgcgtgcaccaaagaaaagggacggagggggcgctgaccaatcttgctgacccggttgcgaccaatgtggcgccgacgtggcacctatgtggcagctacgtggactggcgagaggagaacgaaggaggctggccggggaacggacggcgggaggcggcggagttcaccggagctcgacctcgacgagacgtcttcggccaaagggagcacactggtgtgaagagggatacgagaggaatcaatccgaaggctctaattcgccggaaggagtttgacggcggaggatttccacggtgatcgtcggcggtgagcaaaggggatacagcggaggggagacgaggattcaatccaaggcgacgaaagcatctccagggttcgagggactcgttcccgggctcggatggagcgaggggactacgagggaggctggcgaccagcggcgacctccgggagcgggcggcgacggcggccatgccgatcggtggcgccgctaggaattagctcctacgcgatcggggcgacaatgccgagctatctagcgagctaggagaggtcaagggatgggaacggagggactaccgtgtcgggaagaggcgccggaagatggccgacggcacggggcgtcggcctcaggccggggaaaaggaaggagatcgagggcgcccggagtcctcgtctcgcattcacgcatgcaccggcctccgacgcgtgcgacgggcgaagagacgaagacaagaggtgggagcggcggcaaggcgtcaacaatggcgcgacgggtgtgaggcgagcgaaaacgagagaggaaggggtttggggtggcctgggttttacactgtttcaattaagagcgaaatgcaaaagttctatcttgttagtattgcaagtttatgcagcagatgttgcagtcatggcatagaacaaataaatgtatatatgactatatgagcacagagctcttctagacttatggtaatatacactgttagcctcttgcctttagttcaggaagctcagaaaaaacaaatcaagaggataaccttatctggaacaagaaaacaatatatgctagctctgatcacggctgattattacaaattatccagtaatattgcgtgcattacagctgggttcttttttagggaaaacaacaacatcatgagcaggttcaaaggagccctgacaagaaatcctatcttactactataaagttatcctcactaactccttaagcttagcatacaaagataccatatcatcatccactaataagatgccacatcatcatccactaatccactaattaacaagatgacacatcatcatccactaacaattatcacatttaaacatcatgcaaacatgttatatctttatagtttttataataaaacagcttttcaaatacaaacatgttaaaatatgatccaacattattaaaa

SEQ ID NO: 11842 - DNA, 1295 bp, Oryza sativa
  unsure (1)..(1295): unsure at all n locations
tggttgaacgtcaactttgctagggcaccttaacttgggggaaatcgatctcagtacagtggtcaattggccccaagtggtgaacatgattcctttttagggtccttggtctaggtggttgctcactcactagtgccaaccaatccttcccacaccttaaccttacgaatcttgaggaggcttgacctctcctacaactacttgaactcaatcgagtcttgttgattttggaacctagcgagcctcaagaaactcaaccttgatgctattggcttgcatggcatatttccaaatgtgctcggagacatggtttcactccaggttctagtattatcatcaaatgaaatgaccatgaaaacaacaaatctgaccaccctgtgcaacttgagggtcctacaactcaaagagtcatattcatacggtaacatatctgagctaattgaaagtttgccgctgtgcgcgtttggcaaattgcaggaactgtatttgcaagggaatcatttcacaggaaccctaccaaattggttggggcagttgactagtttggtcatccttgacttgtccatgaacaacattactggacctctgccaggtatttttgggaaatttactgatttaagggaccttaatcttgctggcaatcaactgacagggcatctgccatcccagatcagtatgctcagtaacttgaccaggttggatctaagcaacaatatcttggatggcctcatcacagatgaacactttgttggtctaaagggcttagagtatatagacttgtctcacaatagattgaagattgtgctgggctcacctccctttaggttgaagaagcacattttacaaactgccagatgggtcctatgtttcctgcatggcttcagtggcaggtggatctttcttaccttgatattacaagcacaggtatagttgacaagcttccagattggttctccaactccctttcaaaggtcatatatttggacatttccaacaatcagatcagtgggggattgccaacaaactgggagatcatgtcagtggaacagctctatctgagttcaaaccaatttaccggcgaaataccctcattgccaagaaacattatcaccttggacatctcaagcaactctttaacaggtaatctgccatcaaatttgtctgaaactccaatgctagatacgttgatgggtaccgagcagatgtcaaacaaannncaccatggggggggggnnggtgttatgacgcccggatttaatctgcacattgtantataccaaaaccagtttatttat

SEQ ID NO: 11843 - DNA, 1066 bp, Oryza sativa
tactagaagggtatagggactcaaactggatatctgatgctgataagataaaagccacaagtggatatgtgttcgcacttggaggtggcactggttcctggaagccttgcaagcagaccatcttaacgagggcaacaatggaaggagaacttacagcactagatactgcgacagttgaagccgagtggcttcgtgaactcctgatggatttgccggtggttggaaaaccaatgccagctatcctaatgaactgtgacaatcaaacaatgattattaaagtgaacagttcaaaagacaacatgaagtcatctatgcatatcaagagaagactgaaatctgtcagaaagcagaaaaactccggagtgatagcattggactatgtccaaacggctagaaatctggcagatcagtttaccaaggggctaccacgtaatgtgatagacagtgcatcgatggaaaagggcttgatacccacctaaggctgcacaataggggaaacctgtccattgagatcggagagcccgtgaatttggacggcgaaacaaactattgggtgcctgagagaagagacccttgaaaaaggctcattttcatgatgaacttggattccttcgtgaaaggtgggatggctcaaaaccattaacgtgaaccgggcggcttctccaaagcacagatgtagaggtgtagaaacatctaagaaggaaacatacctatatgaacggacctgctaatgacaatctatgaggttagggccatctctaaatacttatgaaaggcctggggtttgacctatatgcctcaaacagagggagtagcaaacggcagttccacaaccacttaagggtttgagggaacactgagcacacaacacttgaaatgtaatgcataacaccatcgttcactaggagtccggatgagcttcactccaaagggcgaagttaaaagttaacaggcattgactcaaaacacctggtttataaaaacaggcacaaagctttgagaaccatttattactgaagccccacaaatctcgcggcggaattgctaacaaaaagacggaccctgc

SEQ ID NO: 11844 - DNA, 765 bp, Oryza sativa
  unsure (1)..(765): unsure at all n locations
acgtcaccgatccgagnctcgcatngnanaanncnagctnggnacccgacaaagatactaacagatattcaacttacgactgagaaaatggtagctgtctcctgcaaaaacagactacagaaaatagtggtcgaccggttctgtttccttatcgaatttcttcagctccagcagagcgctccaggtggggattcagaattatgcaaccgcgggcatgtctttgagccatgcatcaagcggcttgccgatagagtagacaatgaagccaatctccctgagcttctcaggatcgaccacattgcgcccatcgaagacaaatgcaggtttctgcatgttgtcaaagatcctctggtagtccaaggtcttgaactcgtcccactcagtgaggatgcacagtccatgggctcccttggtggcctcatacgcatcccagaccacactcacctgcttaaaagccgtggggctagttggctgcaggtgccttgggtggtcccaatcaaacttggccatggaaaggtcccgctggatctgatcttcagttacctgtgggtcgtagatgctgatttgagccttgtcacccaacaggccatggcacacatcaatggcaggtgtctccctggtgtcaccggtgtccttcttgaacgcaaagccaaggacggcaatcttcttgccagagacagtggtgaacatggaggccacaacacggttgacaaaccggctcttctggtagtcaataaatcttgatgacctggtctcagtaggcga

SEQ ID NO: 11845 - DNA, 759 bp, Oryza sativa
  unsure (1)..(759): unsure at all n locations
cgtgacgtcctagatcgctcngnccntncnaannnnnnntntgnncccctaaactttgggaattttctcatcacctggacactatggaatggtttgattattgtggaattgaattcaccccgccccctctattcaaaatccccaaaatggttttaggctgggctcggggtgcatggttttgatagtagcacctcggccatataaggaccggtcttcgggcctctgttgtaaagcactaccgtacttccacatgtctagtgggtaaggctttgtttgtggctcagtctggttataaacaaaagtacacggatggagatggacgaagtcgggggtcgatggacatctctagggcaaatgaaggctacacgagctgcggcccggtagtcgagatgtcatggcacagggccggtgtcctgctgctaggggctcagccctgcctacctgtcccgggggtcccggccgtaggtgggattgggtcggtactcttgtctatggctaggatgggttggaaactatgtcacgtctttcgtctgtataccgaggtggtatgtggcacgtggctacacgtgaggaagatgtgtcttgtgggtaaagatgtacacctctgatcagagtataatctattcgaatagtcgagccctcggatatgggcaagcctagcaatgtacccaagtcagtgttataattcttaaaatttgcttaacaactaaaatgtggaatggttggcctcgggtgccttgngatgagcttggacccacg

SEQ ID NO: 11846 - DNA, 764 bp, Oryza sativa
  unsure (1)..(764): unsure at all n locations
gatgtcaaacagactttcnnatngnacnnngncnaantnnagctcggnaccctagtgtagcacagctaagccatataaatttgtataatgagtaaaggggctaatttagagtggttacaaaagagggtgcaagaatatcggtctacaaagaatgatattggtgagactattgaagatttcgatgaagtggagaaacttggacaagggtttacatcggccgatccattggaggaagtagacataggtgatggaactaaaccaaggccaacttttgtaaacaaaaatatgagagccgattaaaaggttaagataatcgagctacttaaagagtatgttgattgctttgcgtgggagtaccatgagatgccgggtcttagccgtgagcttgttgagcatcggcttccaattaaaccgggttttagcccttacaagcaaccacctcgtcgttttaatcctttgctatatgaccgagtcaaagaggagattgatcagttgttgaaggcggggtttactaggcgatgtcattatgcggagtgggtttctagcatagtcccggtggagaagaagggaagtggtaagattagagtttgcatggactttagagatttgaataaagctactcccaaagatgaatatcctatgcctatagccgacatgatgatcaatgatgcttcgggtcataaagtgattagttttttagatggtaatgccgggcacaatcaaatctttatgacggaacaggatatatataaaacgacttttag

SEQ ID NO: 11847 - DNA, 1557 bp, Oryza sativa
agcgcatttgaatcactactgataaccgactcacaagggcgaattcgagctcggtaccctcccttctctcttatagagggggtaaagcaatggtacacccataccggaagaaaactgcatggtgaatgggaggaatcaaaaggtaggttctaccttgatttcttcctgttaacccgtgtagtctctatacataaggaggttctcaacttttgacagaatgagaaaaaaatccaatggtgcagtatgggctcttttgttcttgttaactcaagacagcctagatttgtctgcacccgatcatgcgttgttataacactttcactcgggtttagataaggagtctgccatgtatctcaatacttccaccggaggttcgttcgcacacaaaacgacgttagaaagtagggagctcttggattgtatcctagagaacacctccttcgttcgttgtgaaaccgtcttgaaaataaagaatacacgtgaggaaccatcgacgaccgatattggattcgaccgttgaattctcacccaaacctcgagaactgaaggtagaagaaattcaacctttgaaattcccattccagtttgatgatgatctttttgaacattatggaaacacctcaaattattcctaccaaaagagaccaccggtcccgtgtaattctcccgcaccactcgatgagaatctcttcaaagagacggtgcagaaattaactaccatcatgagtgatgagtggttaatggagatggaggtttcttctgaagtaattcatattagctcccagtccttaactattccatatctgatgagagaggccatggtgcaaactctatataatcccactgttggtgcaaacattatgtctacaacctttgcattaaattgcttcgggggcgaactatttgcgccaacaaacaaaaacttctggagcccctctagtcccatcatcgaaggttatgggattcttcgtagagtgtcgatccagcacaatgatgtcgaagctatcctcgacttcaatgttttgaaagtctcttatttcgatcttttcgttggccatcccatagagaaacttctccttgatgtgccgcataccggagtccttgacattaaactcgggaaaatggtgtttttcattttgatcttgcgattgaaaaattctatgatggaacccattcctgattccgagccaattgaggaagtgatggctatctctccttttgaggcccccgaatccctcctcgaaaatgatgccaatgcattcgtcgaggagctaggacgatcatagagagatgatcgagttacccaaaactgatccacattcatgacctccagatgagctcaaatctcttctttcaggctttccttataccttcttgcatggtgatacggagtcgcccgtcaccatcagcgacaagctgtctactgacgagacctccaacctcaaagatgtgttagaaaagcatcgctctgttctaggctactcacttcaagacctgaaggggattggactggaccaacggtcaacaataaccggagcctctttgttggtcctgctg

SEQ ID NO: 11848 - DNA, 634 bp, Oryza sativa
aactcgtcccaatgatcccttagctttgggaatacgtcgaagttcggggttagtcccttcaagatgtatttcttgtacagatctcccttgaagctctggaactgtttggccattttcttacgagtccagggtttcactacgttctccgtacccgcagggagcgtgaatgtctcgagcattgtggtccacagcatctctttctttgattccgggacaaagctgtcattatccccgcgtgcccttgttctgtgccagtacaccttgctgacaggcacgttatacctcacaacccaaccgatgtggcgtacaaaattcttggctgcttctgccggggcactaggttagccgtctgtgtccacctcaattatgatgtgccgaccctctatcttcttcgcggcacctcgttgtccgcgtgccctcttctgtccagcggagggatgactttcactagcctcctcctcgtcccctccgcatccctctccacgttcccctccgcatacctctacatgttcccctccttgttcaagtactggtttggatcctcgttcccctcttcttcattccaagactggctgcttccctttacgattggatcgtacaatatctgtttctcatcgcgatcagccaactgttt

SEQ ID NO: 11849 - DNA, 756 bp, Oryza sativa
  unsure (1)..(756): unsure at all n locations
aggggttgaattcaaaagagcttcngtacctcananncncannnnactcgnaccctncctatgcataggtcaaccacctattcgccatcatggaaacaggtggtgtatgataatgctcgtatttacattcactaagaaaattgagatcatcctgactcattgttatgaaactgatgaatgacataacatgcaggtgacaacacatgagcagtataggaatatatacaatattggatatcatggatatcatgcagaaccatgttggagagtgggacatgtaagaaaaacctaacctaaaaattcatatgaacaccaaagttgcaaaaacaagattcccttatcttcctttgtcccttttgtttcaagtaatgtcgagcacaattagaaaagagctatttcatgattttcttgggaaaagagaaaatgataacccttgacccaggattacagaatatttgaaagcatatcatgccactcatttcacataaaagaatccatattcttcctttgcaaaaagtttttcggatttgttaggatgcaggcaatcaggcactattgaggacaaagcttgcaagccaggcactagaggaaatagggcagggaggggtttataaacaattgactaccttatgaatggagttggattgctaaacttccatcgcacgacgttacaccactggttacacctcaaaggtaagtcccgatgacttcttattcatttggagaagtattgatacattacagtcttactcgtgg

SEQ ID NO: 11850 - DNA, 710 bp, Oryza sativa
gactgtgcccattgaatgcactcgaactctcgccgccttcaacgccatcgggaccctcaccgtgtacctcatcatcatcggtaacgcaccacagcatatctccccccgagccgtacacccagcgaacctgcagcgctggtcgccgcgtgcagacgagtgatatttccggggattttggtgtgagtgttcctgcaggcgacgtgatgtccggcacgacgagcgacgggaaggtgcacgacggggtgctgacggagtggttcgggcagcaatggtggacagggcgggaggcggtgctggtggcagccgcggtgctcctcctccctcttgtgctccggaagcgtgtcggtacgtaagggagcccgcgatgattgttgtttctcattaggaccgacgagcagactctagatccagtgccccaaactaaaccgcattttcagtcatttggtcgaattctaaattcccatttccggaccaatttccactacgatttggcaaaactggacggtgtcgtatagtagtatatgaattttgcaaggttagaatgccttatgaatttgggaggagctacgacatttgaaaaatacctgaataccgtagtccctgaagtcataccctttaatttgctgtgacctgtgactaaatgcagattcactgaaagtcacatcagccgtgtccatcctactggcaggggtgttatgttcatcagcccg

SEQ ID NO: 11851 - DNA, 531 bp, Oryza sativa
taatataggtgagcggactacaaggtctaaggtaacgactcatgatgtttatgcaaattccgcatttgttgcttcttttgaacccaaagatgtttcacactgagagatcccctcataatttccccaaagcgtaaccatgtgtgaataaattttgagctagtagggttgcagccacgagtaagtcttcccttgttattgtgtagccagaatgccgcaaaacttccatgcctaagcgaactgttgagagtacgtttcgatttctgactgtgttagcctggaagtgcttgtcccaaccttgtttctgagcatgaacgcccgcaagccaacatgttagttgaagcatcagggcgattagcagcatgatatcaaaacgctctgagctgctcgttcggctatggcgtaagcctagtccgtaggcaggacttttcaagtctcggaaggtttcttcaatctgcattcgcttcgaatagatattaacaagttgtttgggtgttcgaatttcaacaggtaagttagttgctagaacccatg

SEQ ID NO: 11852 - DNA, 549 bp, Oryza sativa
attagaatccaaaggcttagtgaaaatatcagcaagttgcaactttgtgtccaaaaactgcaattcaacatatcccttctcaacatgatctctcaaaaagtgaaagcgaatatcaatgtgctttgtgcgtgagtgttgaacaggattcttagcaatgttagtagcacttgtgttataaaaaaagagaggtactttctcaaaagtaagaccataatatttcaaagtagataaaagccaaagaatctgtgaacaacaactagcagcagcaacacattcaaattcagcagttgattgagcaacactagattgtttcctagaagaccatgcaatcaatgatgtaccaagaaaataacatgttccactagtacttttcctatcaattctacaaccaccaaaatcagcatcggaatatccacttaagcatatagaagatgaagtagaataccaaattccaaactcaagtgtatgattcaaatactcattattcggttgaccgcttgacaatgtgaagcacgaggagaagcttgaaagcgtgcgcacaaacacaca

SEQ ID NO: 11853 - DNA, 1204 bp, Oryza sativa
  unsure (1)..(1204): unsure at all n locations
caaatgagttgaanaatgcaatggatggaccattttgatcataaatatcacgccccacaaatagaaattgatcagaatgaacttgtcttgaaaactaaatcatcacagggtttcatcatgccaacaaatactttaattacacaaatcacgagcactagaaaatatttattaattatattaattcaatgaaaactaaatcctcgaacctaacagaagctgtaaaatgttcatccaccttcatatataggaaaccagtgctcttactctgaagaaatggcagtagcatgaacagttctagttaacttgcaactttcattccagttaggctaccccaattaacaaccacaaacacatatactttgtcataaacactgtcgaagaggcgaaaataagcaatcctccaagttttcacgaacagcagagaaaagaacacaacccaggaaccaaccacgaaaccaacgccacagccaaagaggaagaacatttggtcatcagaatgtagttcaggtatctgctgatccccatgcttttcattagaaagatcaccatcctttgatgtgctattgccggggcaactcctttgaagaggaaacccacaaagaccattgttaccactatacatcaatgggttatacgtgtacagtgtttcaagttgcccgcctgatggtattggtcctgtcagattattgtaggacaaatctaaaatgcttaaatatgttaaatttgataagctgggaggaatctctcctgaaagattgttgtttgagaggtctattgattccaaagcatgcatactcccaatcttgtgagggatattcccattcaattgattccaagataagttcagatttaccagcccttcaagacttgaaatgtccattgggatctcaccagataaattgttaggtgagaagtcaatggtcgttatatccaaaacactaaaaccttagtatttaagctgtagtctcttggttattacagacagttcaccaagcctaagtcgataaaaacgaattgaggcaggaggatatggatttgctgcactatattcatataccatagcacttagattcgataggcatggaggtatcataccagataaccgattttccgcaagattcaaatggcgaagatctcttagtccagtgatagagcctggaatatgcccatggaacatgttgttgttcagtcgtagaaaccgcag

SEQ ID NO: 11854 - DNA, 10337 bp, Oryza sativa
cagatattgctgaaagaatgatcatcacattagatgagcttgaaaaggcaactaacaactttgacaaagctcgtgagcttggaggtggagggcatggcactgtttataaagggattctatcagacctacatgtggtagccatcaagatatcaaatatagtggtcccgaaagaaatagatgatttcataaatgaggttgccatcctctcacaaatcaaccataaaaatgtagtaaaactaattggctgttgtctagagactgaagttccattgttagtttatgaatttatttccaatggaaccctgtatcaccatcttcatggtgagggtccaaggtcgctatcatggagcaataggttgaggatcgcagccgaaattgcaaatgctctttcctatcttcactcatcagttacaatcccaataatccatagagatataaagtccagtaacatacttcttgatgataatctgacatcaaaggtatcggactttggagcttcaaggtatatcccaatcgagaaaacagcactaacaacagcagttcaaggtactgtaggatatttggatcctatgtacttttacacgggtcgtctcaatgataaaagtgatgtctatagccttggtgttatgctagtggaattgctcacctaaagaaaactattttcatatttgtcctctgaaggtgatggccttgttgcagattttgtcaacttacacagtgtaggtaatttggtccaaatgctatattctcaagttatagaagaagggggcactgaaatccaagaggtttcccaactagccatatcatgtatagaattaagaggtgaggatcgacctaccatgagacaagtgaactgttcactcgaaggcatcctctcacaaatcaaccaaaaatgaattatgtcatctgagaaggatgcggaggatagttcactggttggtggagaaatttgatcttcgagaataaggtttgatggttattaatcagttgtatgtaaactattgaagcgcaaagcacggggaaataagcatcgtacttgtaacatgatcaggttttgatgtttgtgttggccatagatatgcaatatatatttaatgttaatacctaaacatttaaaaaagttttatactcatttgaattgggtatatactcaatttcaaccatggtgcccaggcaccatggagcactaaacaattttgagtggtgccagttgattttgtggtgctgtgcatttatgttgtgactggcgattgcaactttgatgtccgtaggtgttgtcttcctcctcggaggcatcgatatgtgggttgcacttctttcaggtgaaaccctagttcggtgatccggatgggcgttggtagtatccttgatatttgtttcctccttggaggcttcgcatggaagtttgtgttccatggttgggcaggaagtcggagctgcctatatggtggggctagcttggcaacaaaaaaagtcagatgcccattcaaaatttttcatttttctcttctttcccttttcatttgcttttttgttcttcttcttttagacgccgaagctccgtttgtcaatgtagagttattgatgataccacgttggcgcttatgtggcatgacacatcagtgccatataggatcttggaagggctgtgacagtttgggatcggaatgacacattttgtcgagttctggtatctaaatatatattttgatagtttggggatctagatgacatggccgtacaagtttaggaactgttcgtgccctttactctttcctttaatttacaatgcgattatgttgttttcaggcctggttttcctcaaacaaggccaactcttttttcttcttaataattagaaaccttatccttcttcttgatgtttacctcaaaaaaatccataagggtttactcccttcggtttcataattcttgacattttagacaatgttgaggttaaacttttgtaactttgactatcagtaactttaaaattattttgtttaaaggaactagaacaacatatataaatttatgtttcgaagtactataataaaagtaaacatgcatttatttattgtatatgttacaataaaaaaaccaaggtcaaagatatattttggagaccatgccattgtctaaaacgtaaggaattatgaaactggatagagtaactagctagaagcttgataacaaaaatctcccagtttcatcggcgaactaaaagaatttaatttagaaacaagttttgacatattaattccattgaaatcattatcatgattaatatttcgtgatgaacaattggctttgcaaatgacttatttaataaaaattggttcgtaaatatatgtggatgttggtgtgggtacgtgtgactaatgttggtcaggttatgatatttatgcctaaatacatttgctttgcctttttgtctcttcaaatcaagctatcaatctttgcaaattgcgtaatctaaatttgatcgaacatagtctttgcgtcaacgaaccatgaaccagacctttcaataagaatggttacatcagagacattgcaaagtaagtaaacgtagtttatctactttgcaaaattggtgtcttcagatcagaacttagcctaggaaactatttgagtttacgtttgcaacaaaccaacatactagtcacattgctgcagttttctatctctacatgacacattaatctgttttagatttgtcacgaaaatagaagatcttttttggaccatgaatctaggtattctattgttcttattgaggtcaaagtttgtcagtactactggggaaagtgaacggctgcactatgacaactcgagttctgatcttgtatgtactaaatttatttcgctccgatttagtagcatgttcgcatgtacttagttgctaaaactcataggcctgacgaagttgcgataaaccaacatactagttacttcttgcatgtacttagtttgcttattttgcacattaattaagggagaatataagcccagaaaagctgatgaagtttgcaccgcaaaacctgtagctttagcgcagaaaagctgatgaatatacctattttgttttcatccctcgtcaggttactgtagctgtttgacaaaattcagaacagagctaaactgagttcagtatgaagggtcatttctgagacactacacaactcttctagtacaaacagatacaataatatatacatcaatgtggatcaatgcatcatatgcatttaggatacttgttctaataagttccatctatgacaaaatatacaacccaactaagagtgttgtagacctgctccagcttctttgtcttcgtctattcatagtattcgtcagagtcgatggatgaccatgcgacctgcgacattcgcaatctttcatctgttcttcctgtcaactttgcccagacaacaatcaccttcacataaacctcatcatacatattgtccaagaagcaaaagtaagcaatcctccaggatttcttgaacaaaagaatatagaaaaccacccataggcctgccataaatcccactgtaactccaatggaaaatgaccctatgtgaaaaccttgtttgcttctgatctggtaaccttgctttgaggcatcatacttataacaacttttttggagaggtggcccacaaagaccatcattgccgtcatacagatgatggttttggtcatagaggctacaaagttgtgtccctgatggtactcttccagtaagattgttataagataggttcaaataacttaaatatgttaaatcagataggctttgtgggatttcaccatagaaattgttcttcgagaggtcgagtgattccaatgacttgatggccccaatcatgtatggaatttttccattcaaattgttccatgacaaattcaaatttataattccgtcaagagaaactatgccttcaggaattacaccagtcaaaaaatttgaagacaagtcaattgtcacaactgttactttttcttggttgtattgtagttcctgtcccttcatgttcacaaaagatttgtagtcacatccagatagtctctcttcatattttgtggtatcatggtttatcatcattcctgttaaatttgacaaatgctgaggcaggggacctgataaaccattgctggctagatccaaatgagaaagctttccaaggttggtgatgctgtcaggaatacttccagagaacatattgtgcttaagctgcagaaattctagcttgttaaagtttccaatccatgtaggcaaagtcccagagaatttattccatgacagatcaaggaaacttaactttgtccaaccctgtaaaaaagatgggaagttgccagaaaaactattgttacttgcacgaaaaaatgataccctgctcattagagaacattgagggaactcgccctcgagtagattattggacaagtcaaggccatttaatttctgcaattcacaaatagactgtggaacatcaccactgataaggttatatgatatatctagtagcataaggtttctcggcatccgaggaattcgatcagctatgtggttgcagtccaaatataatttttccaatgacatgttttccatatttgttggcaagcctccagcaatttgattctgcgacatctccaaaaacgtggccttcgaaaatgttgtagagaaccagtctggaaatgtatcatttattccagcatcgctcatagcaagttcaagaatatcgacttgtgattgaagccatgagggaaatgagggacccatcgaagtagatgcaaagtatgccttctctaatctgaagggaggtaaccattcaggatccactacaatctccaagtaattataacacaaatatatcgacttcaagctcgttagattggcaaagtgctcctctgtgatgacaccatccaggcaattgtaatggaggtacaagtttgtcaaatttgtgagcatacctatctcagaaggcacttgtccagtgatgttattattaaagaggtcaagagtgactaagcttgttagcctccctaccaattttggtaaattcccagtcaaattgttattagccaaatgaagttccttcagtttgttgggtgaacactgtggtaaactctcaaatatttctgaaatctctccatatgccagtctataatcaaggtcaagaacttccaaattgcacagattcttcaagtttgccttcatgatgcacatgttacctttcttcgaaacactcatgttgtacgagaaatcaagaacttggagggacagcatgtttcctagtgcttgtgggatctcaccatacaaactagtcgaactaagattgagatacttgagggatgtcaagctccaaatccaactagattcagcttggtcactaagttcataattgttggaaagatcaagtatctcaagttgcctgaggttaatctgtgtgggatactgatttgcactctgaagtgagcaagaagaaaggctaaggaacttcagagaagggatcatattcagaacatgaggccaatcgagtactgtgctaaggtttaccccgttaaggttcagatattgcaaattggacaagtgtgctaaccatgaagcatcactaatgtacagaaatggagccatgctggagggcaacatcccggagaagtcgagaaatttcagatttgaaagcttaccgagctgaggtggcaccatgccggagaacactataccagatagattcagatatctcaagcttctgaaagagcccaagaactcagggacatgtccagttggacctgccaggttgttcatgctgagatcaaggtacctgagatgctccagcgagatcagagaatggcctatctcgccaaccaaacctgttccaacgtcggcgtaatcgtttcgaaggttaagcttaacaacatggccggtaaggttgttgcaccgaacgcctctccattggcaacaatcctcttccagcagctgatcatcatcatcatcatagtggcctcctctttgccagaaggagaggaggcctgcaggatccttgacgatgccttccttgaacgccagcagagcgtctctctcccgcggtttccagccgccgccggtagtgatcatgaggaggaggaagaagaagaagaaggagcaggtggtggtggagacgatgataatggccgtactcatggtcggccggccaagtgattagctgctgtgtctgtgcgatactgtgatgttacttcacactactgttagcttagctactggggctttgatgcaagcatgtgttgttgctcggcattaataagcgtttcagactttcagtgtagaagctaggtcaagtcgtcggtggtttggctggccttctcccctcctacaggatcggctggtgttaatagatggctccattaatcaattgtgtattaaaagccgaaggggcttgatgagaatcaatgccgagcattatgcactactggagaaaccatctttactgggttaaccaaaaaccacattagtaccggtttgaaacaggactaaacttttttttcccgattaaaaagcctaaccgattttttttatctttagtaaatatcacttttagtcccggttccaaaatcgtcagggacctcactatcttcagtcccggttgtttataccaaccgggaaaaaaaaatctcgcgcatccccaatccttatctcctcgattggcacggcaaccacgcgccggcctcagctcctcatcttatctctggaactaaaccacgcaaactccacgtctcctcttcctcactccatatgcacgcctccctcccatctcctctcctcatccctttcccttctcattcccttctccccttcccctctccggcgggaggcgggaaatgaggcgacggcggcccagcggaaggcagtgcacgaggcggcggcggcccggcggcggcggttggcggcctcccctccactagatatgggaggggaggcggcggctgcagcggtgttgggggcaatgtcggcaatggccgtccggaggcgcacggctatggtttttttttaagattttgtgaatgatctgtagatttttttagatttgtggatgattttgtgaatgatttgtggatcggcctatgaatttgtagatgattttgctgtggatgacttgtggggatttggggggtgacgtcgttggtgctcaaagcacaaaacaacggaaaaaaaaaactttaatagatggtagtgctacatggcgttaccatttttaggttaccaaccggggctaaaaatggatctttagtcctattattttaactaggactaaagatacctatttaatttagtctcggattcggggtcccgatttgctactcaggagtaaagggggttgcaaaccgggataaaaaggcttcccccgtagcgatggtggataataatttttaaagtcaaaatttttgaaagttgaataaccaagttaatagaaataaatagtaacatttatggtataaaattagttttattagatctaatattaaacatattttgatagtttctttgttttacgtttaaaatattactatttttttctataaagttggtcaaaacttaagaaatttaaaaagaaaaagacaaaaatgacttataatataaaatgaaggtagtaacttctatatagttcggtgttttgcaaactgcttggttttaatatatatgttgcatactatatttattcccaaaattttgtacaattgagatattctatatagtaagacatttttaactttttccatccttaatttaatccatataataagcataatatatgatatactcctccctccatttatatatgttgttctgaactagccaacgtcgtaaataaataaattaaaggagggaccgattaagttttaatatttacaataactaaaaagataagcaaatcaaagaacaaacacaagtaattaataaacggcgtgtacatactcaagctgtccatttgttataagacggttaaagtttataatactaaattagtttcattaaatcaataattaaatatattttcatattaaatttgtcttgggttgaaaatagtttgactttgaccaaaatcaaaatatcttataatctgaaacggagtgagtaggagaaaatctcgttagtctagctatagttgcatttcatatcatgtgtatgtgtgaatttaaataccacacgtactggtgctggtaggctaagagttagagaagaactttgagagacaaacttcacataatagtttcatgtatttaatataaataattaaaaagaagataaatatatatccactctcgaagtccagatatcatccacctacactgccactttatgctcgtgattagtatagaccagatcaacggcgacttccgtgggcatgttgcttgttttgcagttgatcgagtcgcttcaaattactatctatactatcatcttttgacagtcacagtcagtctctataaatcaccatcacaacctcctccaattaattattttttgcatattttcttagtactcatgtccactttaaaaattaattatattttaagatggggtagcagtaagacatgttctaggagataggcagtactccttggcagtcggaatgacacaagtgattgcaacttggaagaaatatatcctatacacacaagtatttttaccggctaacaaaattctaccaataattcaagaaaaaattgtgttacatctatggattacgtttatggatggataaggataacgtctgatcttataattaatttaaccaaaacgacaaaattctaacaaattaagaggtcttaaaactgtcagaatttttatctcttttattacggctaaaatagagtgaatttaattaaggttaagaatttacacacaagtatagtactattgaagtacatgtacattttttttaaaggtttagtaaaaatttgttcgttggtgtgcatggtgtgttcatataaagcttttgtgttcgcaactaagatgttggggtaagatttcttctacatatagtaaaattctatagcagaatttttaaaaaaatgataactaaagtgaaaaacaatctttccacataagtttaatatttgcaacaacataaaaatcattatatatacatcagcagtacagcaacaccgagcactaacataataactactccattcaattttgctgttacattattgctcccaccaatttaaacattctatacagtttgactttacaagacaggaagcttaatcgagcgctaaaaacagctctgaaatcgtcacttaataaaaagatgcaaggtaaaaacagctgtgaagccgcgcaaagattgagatttttttatataggcccttggtttatctcatactcctattaccgttacggagaaaagggaaggagagggcaacggcggtggcggcgttgtggcgaacggcggcggtggcggcggcgctcgcggtgttgacttaggaggaactcatctcttcccgcgtggttgccttcgattcggcgaggagaatcgtggagcgcatggcgccgccaccctaccccggatgcggagcgggatcaaatccgctcctgcatgcaggcggcgacggcgaagaactgaaaaagccttgtcctcttggagcaaactggtgatacctcccctcctttcctcttatcccctgttttgtcctctgttttgctctgcttttgtggtgagattggtcagttcaagaaaacaaaattagtttccggtaagattaatctattatatgcatatgcgtgcagtaaagcaatgagatgatactagacagctaaattgaagaatgggtgaatgaaccggacccaaatcatgattcagataaattttggtgagtgggggtgctttctctgaaaatattgatcccgggtatatactactatggctgagaatccccttacagtttagggaatctctgaaagtaagaacgattaacacaaacacaatgaatctgacaaagaactaaccaagctcatccacaactgatgatacaaattataacatggtggactacattacatatggttagtggtgggcagaaaattaatcaactatcagacaacattgactgtcacaccactaacacaggaaacaaaagtatacagaatgacattttcttttgagtgcctctccactttcatttattcattcataccagtaaacctgtcagttgtaggaagcagaacaagcatatgatttgaagtgcttaatttgcagttgcctgtctaattaacctggcccaagtaacaagtgcaaaaacatacgctttgtcgtataagttgt

SEQ ID NO: 11855 - DNA, 1497 bp, Oryza sativa
cagttcaagaaaacaaaattagtttccggtaagattaatctattatatgcatatgcgtgcagtaaagcaatgagatgatactagacagctaaattgaagaatgggtgaatgaaccggacccaaatcatgattcagataaattttggtgagtgggggtgctttctctgaaaatattgatcccgggtatatactactatggctgagaatccccttacagtttagggaatctctgaaagtaagaacgattaacacaaacacaatgaatctgacaaagaactaaccaagctcatccacaactgatgatacaaattataacatggtggactacattacatatggttagtggtgggcagaaaattaatcaactatcagacaacattgactgtcacaccactaacacaggaaacaaaagtatacagaatgacattttcttttgagtgcctctccaccttcatttattcattcataccagtaaacctgtcagttgtaggaagcagaacaagcatatgatttgaagtgcttaatttgcagttgcctgtctaattaacctggcccaagtaacaagtgcaaaaacatacgctttgtcgtataagttgtcggcttggtggaaataagcaactctccatgatcttttgaactatatggcgcagaacaccacccagagaccaatcacaaaccctgacacaagcccaaaataaaagaacatcacagcctcagtatcctccacacttatgttttgtttcccatgctttggtgcattaacgcttgaacaattcctttgaagaggaggtccacatagaccactgttgccatcatacatggatgggttgtttgcatatagggtgtcaagttgacttccccgtggtattcttccaacaaatttgttatgtgacaaatccaaggagcttaaatatgtcaagtcggataagctcagtgggatttcaccagaaagattgtttcttgagaaatcaagtgattctactgatttcatgtccccgacattgtctggaattttccctttcaagtgattcgatgataaatttaaattcaccaatccatcgagacaagttacttgatctggaattccaccagttaattggttttgtgacaagtcaatgcccaccagatcaaaacttccttctgcatgatagttaagttcttgatgtttcatcactagcgacagaatatctgtgagtaggacataatacgttaaagattcgtaccaaccaacatcaattctcgtcggatgtagtgtcattgcttttaagtttaccaaagttcgaggaattgatcctgacatgttatttgctgctaaattcaagtattgaagactgccaagatttgctatatttactggaatatttccatggaacatgttgtgacttagctgaagaaatcgcaaattctccaagtctccaatccacacaggtaatgctccatagaacttgttccgtgaaagatctatgaaagccaatgaccatgtgtattggatgcata

SEQ ID NO: 11856 - DNA, 4260 bp, Oryza sativa
tggccccttgatgattgcacatcgatccccatgggaaccttgtccagttctttccatatgaccttgctttggtacattattactcgaacaattcttttgaagtggcggcccgcagagaccactgttgccattgtatatgtcagggtgttgattgtagatggtctcaagttgtgaccctgatggtatccttcctgtgagactattatatgacaagttcaaataacttagaaatgtcaaactggataggcttgctgggatttcgccatagagcttgttctctgataggtcaagcgatgccaacattctcatggccccaatcttatatggaatttgtccactcaagtgattccttgatagatttagatttactaatccaccaagagagactatgtcttcaggaattccgccggtcaagaaattggaagacaagtcaatgttcaccacttccacattttcctcattatattggcgctcttgcccttttgtggccacaggaaaagtataagttactcctgatgctggaggagtctgatcagcttcttcatatggttggcctatcatcgctagtatttttgacaaactatttggtatagcacctgaaatattattgcttgcaagatctaaatgatgaaggtttgtaagtttggtgatgcttcttggaatatcgccagagaatgaattatggctcaaacgtaaaatttgtaactcagtcaagtctccaatccatttaggtaatattcctgataatttattccatgatagatcgatgaaatgtagctctttgcatttgcgcagaaaagatggcaagttaccagataatctattattacttaatcgaagaaattttaggtttcctactcccatctcaaaacatcgaggaagttctccctcgaaacgattgttacctaggtccaaggcctccaaagctcccaagttgcataaatatcctggaatatgtccactgatttgattggagtagagattcaggtgagcaagatttggagctccaatgttggatggcaaaggtcctgataggtaattgttgaagatgtccagtgtttcgaggtttattggcaattcaggtatttcaccagttattaggtttgaatccagataaaatgtctccaacaacatggtttccatatttgttggcaatccaccacggatttgattgttggagatgtccaaatatgtggcctttgaaactgttgtccagaaccattctggaaaggtatcttttatacttgtgtttgctatgtcaagttcaataatatcaacttgtgtttggagccatttaggaaacatggggcccatttgacaacaataaaaatatgcatactttagtctgaagggaggtaaccattcaggatcaaccacaatctccaaggaattataaggcaaatatatcgactccaagcttgctagatgcgcaaagtgtttctctgtgatgactccatctaggttgttgaagcttaggtccaaatatcctagatttgagagcatacctatctcagaaggcagatgagaaaagttgttgtggcctaggtcgatataggccaaatttgtgagcatacctatctcaggaggcaaatgaaccaggccattgtagcttaagtccatccatgtcagatttctaagcatgcctatctcagaaggcagttgtcctgtgagatagttttgtgagaggtcaaggtatactaaactggaaaacactcccattgatattggcaggatgcctgtgatattgttgtatttcaaaatcaattgctgcagtttgctggccgggcatttcgccaaattatcaattaactcagttatgtttccagatgagagactctgtgtgaggtccaggatttctaaactgcatagatttctcaagttctcagccatgatagtgatgccttcgatggcggcatcatcgtcaccggaggaagggggtgcttggctggatggaagcagacctattggtgagataggtacaggacgattaatcgaaaaatcgaggacctggagggatgtcatatctgccagtgcatcagggagttggccatataatctgttcccagaaagtatgaggtccttgaggcttgtaatgttccaaaaccaacaagaagcagcaggatgattaaactggttcccggagagatcaagtctctcgagccgggtgaagttattgtgaaggtgagtcagcttttggtctgctctttgaagtgagcaattagagagattaagaacccttaaggaaggaagctggttcatcacatgaagccaattatcaactgcgctgaggtctaccgaattaaggttgagatactgtagcaaaggtatgttccttaaccatgtcatgcctgatcttgactgcatttctagccctatgcaagatgagaggtcaagaaattgcagctttgagaggttaccaagctgaggcggcaccacgccgatgaacggcatgccagagaggttcagatatctcaagttcctaaaagatcctatgaaccctggaatgtggccatctgaaccacttaggttgttccagctgagatcaagatgttgcagatgctccaaagaaagcagagagggacttatcagtcctaccataccgtttccgacgaggctcatgccatcatcatcaaacttgggcttccaaagttgaagcttgatgacatggccggtcctgttgctgcaccggatgcctcgccactggcaacagtcgtcgcctcgccgccaaaacttgagctggcccatcgggtcatccgtaatgctgttcttgaactctagcagcgcgtccctctcgcgcgggatgcagccaatgggagcttgtgcttggccattggaggtgaccatgaggaagacgatggaagtaaggaccacgatgaaggtgcacatgggggaattcatggtcaagtgattggggctgcttgattgctatgatttggtgcttggtgtgtgttattaagtgcagttcattccattgtgttttatagtaaccagttccagggcatcactaccacgaactctttcctcatctgtgacgggttgtaaccatcagttccaggacatgcacagtgaatgtatttttggttcaaaaattcggaaccctctgcccccaccgcaaggcatttttttggccgaaattttccattttctcaaacttttgtgtattttcccaaaatttattgaaattcagtcaagttgtgctaaaattttcaataatttcagtccaaaaattgcctaaatttcaggagtttttgtgctatcgaaattacccaaatattaagcgaaaatcgaaagtgaaaaatcctgggcatgcaatcatacatacaagtcaagtcgtcggtgtggatgtacagttttgtgtcaactggaattaatactgcgtgctagttaatgatcaaggcttctcaacaaacaggcaagttgtccactagttacccctgtaacggccacaggacatccttaattatgcccgaaatccacgtcttactggtcttaggtcattcaataagcagaaatgtggcgtgttagtcggccctctctaaaattccttctctcgatctatggaaatgccatttttaggtgcacatataaatggtcattttcttattgtgcacacacatagttttatgcataagaaatgtgatcagctgattcaccatcgttatggaaaataacctcacatatcttgatcagtgctagtaagaagatggacctctcagatcgtaccgcattcctttgtccgttatactacatgaatctgtgactgatgctggcatgccaattgacctggacatagttataagaggaccttcatagttatgtatagcatgtgatcaactctctcatgacctcccatctcaattataatggtgttttccactaagctgggaccaacggtggatacaggaaatttttagagccgaataaaactacctaccttgaatatttactttaaaagaatgtcttcaaattgctgcactaacatcgaaattttattatgtgtttgcctaccagcctaggcagctgccggagttgtcaggtctattagaacaggtgtcgaatatattagttctaacaggttacagttcgatttagaattattatcgatgacacgggtagggttagagttgacctccataacgcggcaacccttaaaactgagagagagttgccataatgtaaccatggtacttccatgtagttgcggttaggccacgactggattaatgctggtgtgggtcgagtgcagtcaacaaggtggcg

SEQ ID NO: 11857 - DNA, 1627 bp, Oryza sativa
  unsure (1)..(1627): unsure at all n locations
aacgggctaacttacaatctggtgcgctgtataataatagttcttgtaggctatttatcaaatccattttaagaaatatacatttaatatctataataaanaatagatagtctgatgtaataattattaaataatatgtttcaaactagccgataggcttataacttaaaactaggttatcacatctatttagtatgggtaacccgtacatggtctcggatatataagtggctcaaaaattacacaaacttgtttctctatgtaataaaccatccctacaaaaattcaattgaatttgataagttcttatagtgtgaacatgagttcttacagagcaattgctatgcacgtaatttattcgcacgatttaaggcgacagtgaaatttttaaagtatcatggattcagtctaagcatgcgagaagtgtagatgttggatttattagcttggttcataaaaaggaaggaagtaagggtcttcatgtctggtgagtttgatttgtctatttggtgatgccatctgttattcggctatgaattagattaaatcaaatttaagacgatagatggaggtgaacatgtattcttcaggtagtctatgatgtgccagttgggaaggggtccaattcggcttcggtaagatgactatggtgataggttagatggtgtagcactgttgtagctggagtcaagaggaagaagttatggggatagcggattcttatgattacggtgagcctgctgaaggcttgtcggggcgactcatcatgacagcgaacggatcaactcaagttcaagtacacaaaggtttgtgtaggattaaatagcaagaattaagccaaccaaaggaggagggtgaatagctggagtacctaaaaccaaaatttttagcggaattgaaagaagtacgaattaccgccccgaactattgtggtcgaccgaattacccccctaaactcgaaaaccagacatcgtttacatcaataccggacgaattatccccatcgacccaatccagagcggttttgtcctacatggcgtatgggcagcggttcagtaagcattttatttataaagaaatgtgggacccacctgtcatactcctctctcactctttctctctctcttttcctctctcctatctctctctcactcttcctctctctttcttgccggtcagcggcaggcgggggacacggagctgcggcggcgggggacgagaaggcggctggggccgtagccactacgaggagccgccccatcgcacggagacggattgaagctggtgctgcccgtggtgccgtactcgggcacagacaaaccccccggtggcatgcttcggctccccatcctcggcgtggggctgtgccagtccttctacgccggcgacctgctattcatctagcatacttggcgttggcgcacgctagatgaggaggatggcgctaatgctgatgatcatcatcttccctgtggcccggcctaggtgtcgttagggatgcaagctgggtggccctctacccgatttacaccgccggtgctcgactattatttcgttgctctgataaaacttagaacgccaaatgaaattcactttgcgtttgctcggaaaacaaaggcccgtttgg

SEQ ID NO: 11858 - DNA, 2790 bp, Oryza sativa
tggaatatgatttgaattcactggtaccccggttcattattatggcctaccagaatctggatctccaccaatttgtaccagccacggatgtcgcgcattcgcggaattttttttatttttaattttttttattaaaagttttacaaaaataatttttcatttttgaaaattgacagaagtggtcgcctaccgccctctgggagggtgatttttaaaaatcgccatcccagaaggcggcgaaagtgacgtggcagatggccgttcgctctcaggcgacggccgtcaacgaaatttgcaggcgacccccttgccgccctccgctagggcgattttgtactgtgcggggggccgcctgcaaaatgggcggcggggggcctggaattttgcaggcggcccccttgccgccctgggggagggcgattttatactgtgctttatatttttttataaatatcaatagttatcaaatctttttatattgaaaactatacaagattaaaatctccaagactggtaaaatataattttattattttttagggcctatttggaatgttaccgtacaaatttttgttagtgccaaaatataagcaagttttggcactaccaaatatttggtaaggtaaaattgcatttgatcatatttggtttgctgccaaaatgtaaaattgtagtgaagaatgttctacataatctcaaatctagattacgtattaccaatgaataggcttcaatcgaaatcaaacacaagtactattcaaattaccaaaatattggtagggcatgtttttggtagcaatccaaataggcccttagtcttacgcatacaaaaaatcaccaccataattaaacattgtaatgataagatagataagaagtgccatcgatacacggtacaaatttgtcgatcccgacgaatcaagcatgcggtaacctatcggccccttctaggtcggtcagaatgcattgcattctcgtggtccttcaatcgttgatactctacttgtgtttctgactctgttatcttctgtccatgatatgatggagtgacattgtcgatccatcgagtaaatccacacatccttggattgccctgtaaaaatagtaatgttattaagtttgggtagtaattttgtgcaaatcatagcggattttgtaaatggttagacatacaacgaaatcgttgtctacattggggcagacaaaatatctccttccaaatgtttgttcagcaaaggatgtagccacctgccagcgatctctgcacccacactttggacgctcggaccatttaggtaaccctaatggattgttcctccagtctaagcttgcaatttccacccgacgttcgtactccatccaagcatgaatgaactgtatggtcggttcaggttgcgttatcggcccgccacttgaagtaactctgactgtgtcaatccattgtacgaattgacatttccttacatcctcctatgtacatccattttgggatagttaagttaatgatagtactaaggagtgatgaaaagaatagttgtaattaccacgaaatcatcgtcgacaatgtttggacacacgaaacacctttgtcctcgagttcggtgccttacggaccttatgacctgacaacggtcaccacaacgacactccggacgctcacgccacgtggggagtcctaggggatttacgtgccattctaaagcctcagcagcaattcgacgttcatgctcatccttccgccttagttagtccgatcttgtttcactacgtgggtaagcacgtgttccgtcgttttgtgggttctccatgtctacccactcgatgaagttgcacattggacgatatgtctgcgtaagatgttacaattgtgtacgaagaagttagtttttttatccatttgaacttcgaatagatgaagcatacctgatcaaagttcgcgcattggaagaatctccttccccgagtttgtatcatgagggaagacttgagtatgcatccatccccacaatcgcacaaaggacggtcacaccatggtggaaaccaaccagcaaaaggatcgcttcgccagttgagacgctcaaggaatggcgcttccattttcgtgtgttgtgtgctagtgggaaagaagatatgaagaggttgccttcagattgtcaattatatagcgtcgttttcactgcaatatatgtgaactcaatgagatacattattcattagatgtgacaagacgatcacgcgtgggcgtgattcactttatgtcaacaggcaagcgccgaaagttgatagtgacaactcgagctgccgcttttcatgtgtgctgttgtggactgtgcgcgctactggatctgacactaccgtgaagcgccgaaagtgtgttgtcgtgagcataagttgttctagcaccatatgaatgaaaagaactatgtagacgagacaaacacaagtagtactgcagtagtaatagcaaaagtagtactgctttacaagtttgtaagccaaaagaaacggtcacataaggactgaagaggtagaacactactgacgaggcctcttacccctgtccctcctaccctgcgccctaatgtgcccctgggagtacgtgagtcggtccgggggtacggcacggccaacccgtcctgcctgtacaggtgtgacctctggctgctcctgagtgtgcgcctctggagctcctccaagctgagaggagcctagtacgtcgtggtggtgtgcaccgtgcaagtcgtcgtcgtagaactggctagtaggaccagtcctaccggcgtgagacga

SEQ ID NO: 11859 - DNA, 796 bp, Oryza sativa
agagttctacatggaaacgacaaggactactcggattgtatccatattggtttccctagttctacttggacaaggggacacctatgggtataaatacaaggccccctaggaggagaggggatacggacaatcgacacccaccacaatcaacatagacgccacaaagccaatacaagccaacatacgccaagccaagacgccggatatcgacttcagggataagcacggctagtcccctacggtgtctccggatactgtcaggagagacgaaagcgttatctctgatctcgccgggcatggattcaaggaggaagactaccctgtcgtcgactacgagtcagaccttcagaccgccatgacgacaacagttagataggctaccccaagtattatactggtgtgattatggtgaataagagcaataccggcttcggccaataggatgtagggttattatctgacaattcaggggcccgaacctgtataaaaatccttgtctctgtctcttttacctcagtctcgcgtataccctagtaccaacgatccccataccatgcaaataccggaatcgcgacatcaaacgtcgatagatccatttgataagctcttggcctgaaggaacataaaatttaatagctcgtcggacaacaaactaagattgaaacctacaaaaattaagaacacattggagcttctcatttcatatgttttttttctactgcacctccagtttactatattgacaacatactccttctgtctctcttgtgtagcaatgtgtctactgggctagact

SEQ ID NO: 11860 - DNA, 2999 bp, Oryza sativa
ctagtaatagtagcagtattttttggtacaatatattccaccaaaagaacgctgctactacgcaatagcctaacgtgtgcctgacttctgagacaaggttgcccatgtaacaacaacaaacacatacactttgtcatacaccttgtcgaagaggcggaagtaagcaatcctccatgttttcttgaacaagatggtacagaaaaccacccaaagaccagccacaaatcctgaaccaagtccagagtacaagaacattggctcagaatctctttcccttctctgttcaacaccatgctttgatgcactgctgttgtctgagcaatttctccgaagaggatacccacaaagaccagtgtttccattgtacatagacgggttttccgcatagagggtgtcgagttgaccccctgatggtattcttcctgtgagatggttgtatgacaagtctagcctgcttagagatgttatgtttgataggtttgatgggatttctccagaaagattgttttttgagagatctagtgattccaatgattgcatgacactaatgttgcctggaattcttccactaagctgattccatgataaattcaaatttttaatgccatcgagaagagttagctcctccggaatttcaccagttaagtagttcaaagacaaatcaatggtcacgatatctaatactatgggtagtttgtagtaaagtttttggcccttggtgtccacagacatatttgcaatgccaacattgcgaccataacgaccagaaattgagtaacgatcgaagaccattacgatatcacaatgaccacttttcttcatacatattaaattggacaaatgcaaaggtaaaacacccgaaatagaattatttgatagatctagttgaacaagccttgtaaggttggtaatgcttgttggaatatttccagagaaattgttattgcttagtcgtactattgctagattcgacagctctccaatccagatgggcaatcctccatagaagtcatttgatgccaaatccagcatctctagattatgtctactacgcaaaaatggcgggaactttccggacaaaatattgttgctgacaaatagcttactcaaaaacactggctggaaacatcgaggaaattccccctccaaaagattgtccgctaaatctaagtaaacaaggtgatgcaaatcacacatagagtttggaatatggccagtgatacgattggagaagagatgcagataagataagacaaggtcatctccaaagttcgatggcagaggtcctgataaagagttccttgagatgtccattatttcaagtgcttttggcaacaaaggtatttgaccggtaagcttgtttgatcccatatatagtctagataatgtagtcataacctccatgttcgctggcaagctaccattgatttcgttgttggaaacatctaaaagttgagcattcaaaaatgttgtagaaaaccagtttggaagcctatcagtaatacccgcaaatgacatattaagataagtaatattaacctgttgtttcagccaaccgggaaagcgagggcccatatggcaaggtgaaaacaatgcaacctcaagactaaatagaggtaaccattctgaatccaccaaaatcttcaaggaattaccggataagtccaatgtcttcaaacttctcatactagtaaagtgttcatctgtgatcactccgttgaggttgttactgctaaggtccaagtaagttaaattactgaacatgcctatctgaggaggcaagggtccagagagtttgttatgagagatgtcaagaatgaccaagctagttaagtgatccagacgatttggtagaattcctgatatattattgtctgacaaatatagttcattcaatctgttgtacgagcaccgcggtaatctctgtagcaactttgcaatgtccccatgaatttgactccgttcgagatgtatgattctcaagttgcatagatttgttaggtttgttgtcacgatgtctatgttacatgtggatgacaagtcaagaaatcgtagggatccaaattgtcctggaacgtttggaaactggccatagagtttggtcgacccaaggttaaggtacttgagtccttgtgcattccagaaccaacaggatgcaattggatggttgaaatagttgacagagagatcaagctcctcaagattggtcaggttaaagtgtgaaaaagattgatccgcataaacaaggttgcagtaagcaagatgaaggaccttgagagaaggaatgttgttattacattcggccaaacatggtccatgctgaggctcgtatggcttatgtcgaggtgcgttagagaatgcaggcgcgctaaccattggatatccgtgaagttgatgcctgtatctgacaggccaagatagtgtagatttgtgaggttacccagctggggaggcacctcaccggaaaatggtatgccggagaggttaagatatctcaagttttgcagagagcccaagaactccggaacacggccggtctgtccctggagctggttcttgctgagatcgatgtgctccagatacgtcaagttgagcagagagggacttatctcgccggccaggtcgtacccggaggtgatgaagtcgtagtcgttgctctggtcggcatacacgttgcggaggtgaagcccgacgacatggccgccggcgccgcaccggacgcctcgccaccggcagcaatcggcctcctcctccgcctgcccaggcccagcgccgtcgtacttccatgagtcgaggagacccattatatcttcggtgatgcctgccttgaacgtcagcagcgcgtcccgctcccgcggcgagcagccggccgccgtcgccacgttgccgtgggcgggcgccggacggcgtgtggcgccgcgtggcagcgcggccaccgccgcctccacttcatggttggtcgtggccaaggcggcgacggcgaggacgctgaggatcag

SEQ ID NO: 11861 - DNA, 690 bp, Oryza sativa
ttcttctctttctctatctcttccaaagccttcaaacgcttgtcgatgacttcatcaaggttgtctcccattaatatcttgtaatcttcacttgataaatcatcttgcttgatgtaacgaagagaaccaagatttacctcaactggtaaaacggcttcttgaccataaaccaactcaaaaggagtgactttagtggcaccatgtttagatatcctatacgcccacaatgcttcagaaagcacctcatgccacctctttgggtgttcctcaatcttcttttttactatcttcaacaacgtcttattactcaactcggcttgtccattagcctgagtgtagtaaggagaagaactcaacaatttgttaccataagattcggcaaaactcttcacttccttagacataaaagaagcaccttgacccgtagttaatatttgcggaataccgaatctatgtataatatgcttcaaaataaagtcatttaactccgtatgagtcatattcttaagcggcacagcttcggcccacttggtgaagtaatccgtagcaactagcacgaacctatgcccctttgatgacgaaggataaatttgaccaatgaaatccaaagcccaacctcggaatggccatggtttgatgatagggttcaacacggcggcgggcgccaactgaacattgccgaactgttga

SEQ ID NO: 11862 - DNA, 1202 bp, Oryza sativa
  unsure (1)..(1202): unsure at all n locations
gggcaggagaaaagcaaggagggtagaagagatgaatgggtaaaaacagagaaggaaggaggtaaagaaagaatagagnggccgtcctccatgccaccggggcgcacgcgaaccaacgtggcaggaggagggcgccagccatgctggcgccgccccaggaagaagggcgccagcatggctggcgccgccgcctctattcctgtttctctgtatggagttttttgatgttttttcacactcagaatcacgatacaaccaaccacaaaaaaaatttaaactcgaactaccacttagctaagtctgaaaatatctagcataccacttagtctactttgcaccttcactaaaattagaccataactcttttagtaaaactctttgatcagcatgttaaacataatgcactctaccactatatgaaattacttaatctaattcaaaatataaccacatgaaatgacatatataagttaaatagtacatagagatgtaatttttttatttttatttcattttttttgatatttttttcacacttacgagaacataggaaccaaccgtataaaaaataaactcaaacggacaaaatatgtgacatgtagaattttccaaaactctaccgaaacggacaaaatatgtcatctattaaaataggcgtaactttctcatacggactcggaatcaggcaaataatatatgcacggacatctacagaaaaagttacatccgattctcccccgctttgtcgggttcgtcgatattaaaacctccaaattccgcttgcaagattgtgttttcgaggagagaagtttttcggtggagctttggaaaattccacatgccacatatttcgtccgtttgagtttattttttacatggttggttcctgtgagttcctaagtgtgaagaacatatcaaaaaaataaaataaaaataaaaaagttgcacatctctctcctctgtactagttcggagagaggagaggagaggaaaaattctacatgtcacatattacgtccatttgagttcaatttttctatggttggttcttgtgtgtccctaagcgtgaaaaaaaaatatcaaacaaataaaacaaaaataaaaaatttcgggggggggggggggttccctccactttacttcacctccactctaactctctctcctcttataccctcaatctatatttcacttttccgtct

SEQ ID NO: 11863 - DNA, 7571 bp, Oryza sativa
aaataccatctccacactcgagagttttgaactggcattagttcccaataaaaaccctcagttgcccgacttactataacattgattgttatgtcacttgtctgtggatcaactctcaagcccctcattaaccatccttttatagaaggtacactcctctcagctggtctatcaattcccctttctgatacaataaaatctgacagatctaccccagttggcccgtaacggacggaatatttgtttgttcgacatatctgtcaacgaaataactagatcatattactctttcatgcaataaacatctacaacgtaatatcttcttgtgtaagccaatgcaatggtaatgtattgattccaaactagcagatctacgtagttaccgatatctacaatacgcacttctagattagtacaactaaaaccctaaaaatataatgcatttattcaaacaaatttttaaagaatacacactatttaactcaatagtcacatataggatctatgaatattacctacaatcggcgtctgaatccggcagggcttcgccccttcttctcttctcctcccctctcttctttttttttcactggaattgaggagagaagaatgagggctgggggctgggcagcaggccttttataggcagcgaggcctgccgcccagtcagagggcggcaaggggccgcctgcaaaatagccggccccgactggcttttttgcattcgggccccttgccgccccaccagagggcggcaagggttttcctgcaaaaaaccctccctccgtcaccgcccgttcctcccccgtttgccacgtcagcttgccgccccagaggtgggcggcagggtctatttttgtaatttttttggccgatagattatatttctgtaaatatttttttaaaaaaaatctaaaaccgaaaaaaattcggtttttgagggcatcatttgtgggctgcggtggtcattgggctgtatggccatgtagtaagaataagtctactctgcatccctttactttacgtcgagtttgattacatccctaatcccaaatacaaggctctacactatacaaaaccgtgaacttataggtcttatggtagtacagagcccaattttctcttacgtggtagatgtttagcgaaaacaccagtgatcgggcgcccaatcagcggtagaaaaatcgggcgcccgcctccacccgcgcgctcccgcactgtccccccatactattacaacaaatcacccgcatatcacggaaacgctctagtaaggaaatccgtttcattttttattccatcaacaatgtttcagcaagtgtactcgtgatgtttcattatgtatggatcaaatgttatagttaattgaaacatcctttcactatttgctgaaacattatttttatatattatgaaacaacgcccgaaaatgttttcattgcaaatgtttttatatagtgtgaagccaatcttgctacgacttcgtatgggatgagaggaaattcgtcatgctcactggcatgaggtggcgcgctccgtactgttatagcttcggtaaacacacactgcatccccatttctctactataacaagtagagtactccctccgtcccaagataactcaatctaggataggatgacaggactcatgccacttcaactgggactcattttttttagataatggaatatgatatcccggcctttgctcaaaaagagctacaaccaattattacaaagttccactccaaaagagagtgtagttcaagacaagttgaacacaccgaaccgaaacacaccgaaccggaaaagagaggacccatactaagaaaagcaaaacaaaatgtgtagctagaaggcctcgtcaaaacctaggactgaagttcgaagccaatgcatagaccattaacaaaatccttgcacgaacaggtttctccaaagtggtgcccccaaggaggacacgacgtgccaccgctcgttcagaaccgaacaaggttttcacccggagaatatggtagggaaaagagaggggtttgctaaaacgacgcctctaaggaggggaacgacaccaaacggcgttgccgtcatcagccggccaaacggctcggcaaggctttcgcccgcgattccctgcccaaacccacaccaccaatccgcgcaagaaggatgtcaacaacattgtcccttcagcgaatcggccaaggccaccgcccatagttcttcccgccgtcgacggcgcgcccgcacccggactcctccttccccgccgccagactccttccccacctccacatgccgccgccgtcgacgacgcaccgtcagccccgggtaatggccttgccaacccgccatcgccacagccaccactgtcaccagccgccaccgccatcgccacagccaccaccgtcgccagccgccaccgtcagccaccaccgtccagccgccaccgtcgccagccagcgccgccaggcgccagtcatccagattcagccggggtggcacggatctggaggtgcagcgcgcagcgcgggtcaccggcgtcatggaggaagctcacgcttcaatttggtgaggagaaagtctcatttgacatgaggcatccaactcaccttcctcactgtcgtatgatttgagcctgggtggatactgtatcaatagactatactatgtcaggacgggatccacttttcctaatctgttaacgagactatacctttcctctgctccagtccccttacgaaactttcgttattgggttagccatacacttcacatgtttctagcgattcacatggcactaataaactgagtaaggtcaatgcactaccccatttctactacagctagctatatattattttataaggaagcactagcggaccgatcactaagtggttagtacctccagcaaaacctgaaatcgagttgagttgaatggggttcaagtcaactagatgaagggtttctttgtagcgagggaacgctttacctttttttaaagaaatgtatgtgctcctcctctttctggacaagacatataaagagacccgccgaagatttgtgcttgtgggctagggtgaatatagcgggcgagtgctatgatggttgtccaactctagaccttacgacaaagaaagagccagaaaccttacttgaatgatccccccctccaggggtatcatcccagtaagcttctatagataaggcggaacgtccttagttcagcattatagcacagggaagaacccttctgaaaaggaatggaggtatatctttactcggagtgcaacgcagagatagagatcgaagagccggtggttcgcgaagcatctggcttaccggtcatctcccattcccgtcgtcgagagactaaaagaactatagcatgccagaaacggagagttctagcacgcacggcctttttcatatagcaccaggatgattaagacttttcgaggttgtccacgagcggaggcccctcgaagaggcgagcccggaaacattcgccctttactagaaggtaaggcgcgcagctgctggtctttcacttggaatggaacaggtttcacgggcacggcgttcatggccggagcattaacgagggcgccacgcctccctcgtggcggcgaggttcttgacacggtcaccggcgtcgcggcacgcgccgcagtccgccgccgtcgtcgcgaacttcgtcgcagccacatccaccaccatcgccaccgccagccacccccctgccaggtgtgcggcagccggcaccggagaacgctcctcggccgagccttcgctgcggcactgcggcctcctcgtgcgccggcctccgcagcctcctcaccgtccgcggccagcacacacgccggcctccagccgcgtctccccgcgcgtcgacccccaccgcctccgccgccgtggccttgctcgccgctagccgccgccgcctccggccagatccggccaccccggagaggggcaaccggatctggcaactccgtcacccgtcgctggagccagagccggagccgaccgccgcggagagccccgccgccgtcgccgtgaagagccctaccgcagcgccgtcgccgcgccatccccgtcgccgcgacctcgtcgtcccgccgccatcgtcgccacgccctcaccgggcgagatggagccgaggagaatggccccgccgccgccatcccagcgcgtcacccggctttgccggcgacgagctccggcagcggcgaggcacggaggatggaggaggaggggcggcggcggctagggtttcgcccgtgccaccctgtgtagctaagccaccttgccacctgctacttcgccgcccgctgttgtgcctgcgaccacttcgacttctctttgttctacaaatagaaaatataaacagatgcttgcttggtgattggctggacacgttttatgatattgtggagtttgttcaccatttcctagtggtgatgtttagcaagcccatgaatgccctgatgctttgtatgacaatatgacggaccatttcttagcggtgatgtgtagcaagcccatgaatgcccatgatgttttgtatgacaatatgacagatcaattttggaatgttggttccagtatgctattagagatattttaaacaaactacatgatcatcatcttaagatgccttagaatttgaggaaatcaattccatcccaataattccaccccctttctcacacaatctcatatcaattcaaaagaaaaaaacatatcaaaaatatttaataaacatcaccaccccaaacttcttccatctcagcgccgccgtcggtgaaatggggagggcggcgaagttggcgagcatcctcgccgccgtggtgttggcccgtcggcggtgacttatttactacttaaattttccttacaagtttatatatagttagtgtctaagcggtgacttatttactaaaattttccttacaagtttatatatagttagtaaaaaaaatatctatgcattgcaacaggattgataaacactttgttaatttaaacaacaaactaaaataaaacaaaacaaaacaaaacaattgcaaacacaaagtcaaaaaatcatatatagcaatgaaccaggttacgcccactttatacgtatcatacaaaaatatcccttgtatacacgtttctatagcctcacaaattaattgggtgactttcataagttaacggcggtgcattttgctatatcttatagatcaaaaattaaaattttcattattcaattagcaaaagctttttttactgtagatggaaagcatttgcaatgtaacaaaattgttgcataaaaattatttgtgaagggagaaaaaaaagaatagagagaaaaggaggagaaaagaaaaggagattggtaggagagggagagtatcagaattatcgagagaaaagaaagaagaaaaagagaacgaaagaggggcgagtgaggcttgtgggatggtgtggatcggttgggttgggctgagaggaggggttgcgctaggatatgagcgtataatagttattctagactcaaattgaattggatgcgaacggcatataaacaactcaaaaccaactcaaatacgatgacgtaccaaaatttcgacgaagcatcttcagtatttataatagtagagaagtaatggactggtttactagagaaatatcttttacaattttcgtgggcatgctttgttcggtacgagccatttgttcctttggtttcatgcaaactcctaccttttagataaacaccacatatccatccacttgattaaatgcacagctcgacattgttaatcttataatccaaagtttaatgatcgattgattgcacggatttgatagatcatgcaaactttagatcatacaaattaaatttgataaacgcataatggattttaaaaaggaaaaggtacgaattaccccatgaaactatcgtagtcgatcgaataaccccctgaactcgaaaaagtacaaaatacccccttgatccaatcctaagtgattttgtcatagcccctctacctctcttcctctatctatctcttggccagccagtgggtggcgacgggaacatggatgacaacaagacagggcgaggttgggttggatagaaacgtccccgcccccgcacgctagcgggttcacccggccccggagggaagaacgggttgaaattagtccacgcccctgggcccctccgggccccgtactccggccgggttcccgcatccccagtgcaaacggcagctgccagcggctgccagccagaagaaaagaagaatgacgagagtcacctgtagccggaggaaagcacctggaaggagagaacatgggatccacatggaccccacatgtcagcgtaatccacgccatcaccctctttctcctcttctctctttctaagcaaggcaaagcggcgggaggccggcaggcgaggcgggagagaggagggcggcggcgccgcgacggtggccggcggcgcaacatcggctggctcccggcggcgacagctgcagctaggaaacacgacgacgcgggaggaggggagcacggcgacagcctcgattcgttccgactccctcccatcgccgccttttccttttcctccaaatccaaccccccttctccggcgcggcagcgacggcgacgacaccggaggcgccggcgctccctcagctcgacaaaaggtaaccccagccatccctctcttcctccctcctgcttccgttctgaatgaaaaaacacgatcaatctgcagccatggcaaacctaggcggcgccgccgaagcgcacgcgcgtcttctcgctcaccgacgacgtccttgtttagggtggaaaataaagtctaggaggtcggtgccgcgcagaagcaatcgatggagataaacttgatttgatttgttagttcgttttgtttctctgctgctgggccatagtccggtgacaagcgcatcgctagcgctcgcgccaagcaaccaactcgatcaagttgctacagataaaatcaattggtttgttgtttatctttttattcatctgattttatctctcttccgctaatcacctcactcataatcgagcaccatatatgtttgtgcattactatgcatgcatgcatgcacgtagttgcttcaccgtccaaataacatagcttgctcttgattctcccgggcgaccgacgcggcggagccggatcggacactcccccgtgcgcccctccctctacatgcgtgtatgcaggctctaggccctaccgtattctctgctcccacctgccattacaacaaaaaaatccacatattttggaaacctcctattaattaagagaattcgttttattttttgttctgtcagggtaggttacggataaggcataccctctatactacgacttatggaatataccgataaccttcacgtgcacggatcgtttccgtatatgctgttaggaatttatctcaaactatggaaaatatctctatgagttaagaaactaccggagtcctactcggaggggatagaatctctactatatcgtgccagattacatatc

SEQ ID NO: 11864 - DNA, 2060 bp, Oryza sativa
aaaatacagcaggattaaccaaattaagattattaaaagactaatccctccatcccaaaatataatagacggagggagtaactaataagcaggagtactctactagttagagtacataagtggggatgtagtgttcaccaaagctataacggcacgacctgtgcttgatgatgtgaagcttgtcgccgttgcagcgcaccacctccacaccggtgagcatggtgcaaaaccttctatccctgtcaaagtcgcaccaagattcgctgcaggtctcgcggcgcgcgaccatgaacagcttagcgatgcacaatttgccgtcgccgaggtgcacgacgtatgaggcgtatggcgtctctagcactgcaaagcccttgcacccgcggtgcgccaccactggctgctgctggacggtggaggacaggtcccaggcaccaaagacgtcatcgttggcggcggagagaccgaaccagaggccgtgctcggggacgtactcggcgcggccgcagaagggcagcgcccagtcgccagctttgctccacgcggtgttggccgtggcgaaggagtaggtgccatagctctgggtggagaccaagatgtgggcgtcgccgaccaccgcgtacccacggatctctccgctgctgcctctgtagccggcggcgtgcacgcacggaggcggcggcaggggccgccagtagcactcgtcctccagcctgcccccattgagggggcgtcggtcacggtggatgagcgcctcgaaagaatgccccgaccgtcgaccctgacggtcgtcacccttgtcaggccaaggtgtcatatccatgaggtagagatcgtcgccgatggcgagcgccttggtgttgaatttgggcgctagcatggagggcaagacgcggacggagtgctcggcggggtcgtagaggatggcgcggcgagtagtccggtcgacgccgacgatcttgtcgtcgctcctgcgcatgaactccgtcgacccgcagaaggtgatctccgtcggaggcagggggaggtcctccaccaccgtcgccgccgacgacgactggggcacgggcagcgcatccttggggaagaagagatgtgatgggttgatgcggcgtagcctgtagggttgagggccgtagccggctttgtcgaagatgtcgaccatgtagaggaagcgacggatcatcgtcgtccctaatttgctaatgcggcggcggcggcggcgggggaagcaaaagaccggcgatgggatctcaatctgcggtgcggacgggtggctgcctaggtttttgaggaatttttttcgtttttagatttttttttaatatttacagaaataatctatcgacaaaaaaaattgcagaaatagcccctgctgccataatggtgggcggcaagctgacgtggcagacggtgggtcgaccgcgccgtctgccgccgtcggccaaaattgcgattaggcccttgccgcccatacaggggctaattgcaattttggccgcccataaagagcttgcggccgtactttggggcggcaagggacccagatgaaaaaagtacggccaaaagatttttctatgttatgttaataataaataaagaagtatttattggtaaaacttgttaatattgttataaaaatgtattgaagttggttgttgcgcaatttcatatgttaagtgaggtattattttgtaccttattcgacgtattagtactcggataatttatataggcctatcgcagtctgggtcatagaaacattatatggcacttaaacaaggcacaattatgtaacatgcaagaaatagtagtacaatttgcaacatgatacgcactatcttgcattgccggttacatagcatgcatattagcattcgcaactaggcagggcaggtagtggcaatagcttgcaacaccaacgacgatgtagtaatgggcacaaggcaagtcatgcacagtagcaaattttcaatatgtccaagcttgctccgcataataccctaatccctctacgctgaggcatctcctctcccttctctcaataccgcgcctttagctaa

SEQ ID NO: 11865 - DNA, 4314 bp, Oryza sativa
cttgttaatattgttataaaaatgtattgaagttggttgttgcgcaatttcatatgttaagtgaggtattattttgtaccttattcgacgtattagtactcggataatttatataggcctatcgcagtctgggtcatagaaacattatatggacttaaacaaggagaattatgtaacatgaagaaatagtagtacaatttgaacatgatacgactatttgcattgcggttacatagatgatattagattcgaactaggagggaggtagtgcaatagttgaacacaacgacgatgtagtaatgggacaaggaagcatgacagtagaaatttcaatatgccaagttgtccgataatagctaacccctacgtgaggatccctctcctctctcaaaccgcgctttagtaaccctgtattgctctggtagttcaagctgcacaacacggctaggtggagttagaacccttctggtgtctatccattctctgtattgacatctccttggtggttcctgggaggaaagaatagatgtaaagcaagcaaagttagtaaatgttgtgagaaaataaggattcatgtaattaaaatattcttaccatgaaatcgtcgtcaagaatatttggacaaacaaagaaccttcgacccaatgttgtaggatttatggaacgaagaacctgacaacgatcaccacacctgcatcttggacgggcttcccatggagggagtgccgtagttagcacccgccagtcgctctgttgttcacaacattgtcgttcataagccgcttttctctataagtatttctcattactttccgatgcgaaataccagcgaccttcttgtaaacaagtggttaggtcaagaacgggattttctgtatcgacccactcgatgtatgcgcaagccgtagtgcgggtctgccgaatagagtagtgttacgaagaataaagcgattgcccatacggaatgaataagcatatgcagataataaaatacctcacggtcatagttagggcacctaaaaaagcatacagtactggaaagtgaagcaagtaaacaaagagaagactactctactggccctgccccgcgccgcgaccacgcttggtcctccgggcctgtgctcgcacgtggtcctgggagtaggtgaaacgatccggtggcacagcacgggtagcacgagtgtcccgcggaggagtggcctgtgcctggtcctgcgtctgcacctgcggtgcgcctcccagctgtgaggggccaatgacgtcctctgtcgagccctgaagcgaagtcgaagtcagtgatgtcgaagagcacggtggaaggcagcaagcggtccgacgaggtccaagcatggtccagtggtggaccctgactcgacgtgccggctgcctgtgacgctcaccctgcagcctgggagaagtgggcggcctgcgtcatagcgaactgggtgaaacctacacatcgacaacgggacccttgtaagctaagacataaaatgtatgtaaattgattgtggaagtaatgttgtttttttaagtacctgtggggggcacaacagaagacctagccgaggaaggcggggtgctgaacggtgcacgaaaccctgaagcaatcggcaagtgaaacggctcacttatatgtgcgaggcatgtacagaaatagtaataaaaatacttacctccgtgcggagggggagtcggcctaggaacgtgcgcagctggacggggaccagtcggtacgggtggccgctgtacagctgcgtctgcccgagcaacgtcgtctgcacgacaggtgagcactcggagaatcgagcgcatcgactccaccatccgcgtgtacgtcgtcaggtgctcctctacgggtactggaatccccgcgctaaacgttggatcgtcgttgaaccgtcagcgacgacccggttgatgtcgtcaacctgcatggttaatttgttcgtaaatattcgtaaaatttgacgaagagaaagacatgaaaacataaaggaatggtgcgatgcagggtactcacagcacgagcgaagtcctggtcgcggtgcctggcatagaggtctctagtgctcgcaacgtggggctgctgctccaagggagcgaaggtgaccctagtacgggtgtgtggctggtaccagcgtaggtaggcctggtacgactcctcagtgtgtggctctccctcgtggtccacgacctcctcggttgcgagtaactagtcctcaacaaaagtcgccaacttggcgggccagtcgccagctgactgctgacccttgcgcgagtacctacgaattaatgtgtaatattagtgtgaaacgacagatgttacaaattattgcaacaatggaaagcgtagtgcaagatcttaccggtgaacagcagctgggacggtggtcggaaacggtactggaaagggctgacggaagccgaactgccgcatcacgcggaaaggggcgtgaggctcaacgcagatgtcgaagaccatcggaaccgtagtcatccagtacgcctggtccctggtgcagagtgtggacagacccaatggcgcacgagcctgggtagccgcggcactgtagggctcccacacgacgtcagtcggcagaaggcggtcgaactccataacaaactcaggatacgaccgcctaatctggacgtgagcccatcggcgctgcaatacgagatgatcgatgtgatgtacaatgaacttagcaattaacttaacaatacgataagatcgatgcaacgtacctgacgacggcaccacagagtacccatcgtagggtagtcgacctctggtcgctcctcgtacagtgactcctcgtacgcgtgctggtccacctcagggcggccgatcgcaatcctctcagctgcctagatagaaagaaagagagggcacccaccaaaggtcgcgctgggatccgtcttcgtgcaagactcacaaagtgcatggtacagagccgccaacaacgcggaaccccagctccactgaggcacctcgcctaccgcggcgtcggcgatgctcctggcgtagtgcacgagtcccttgtcgaccgcgtgcccgtgacggccacagaacatcacccagccaaaaagccagagcaagtacgcctccaaacatcggctgtaggagtactcgtcggcctccgcctgtagctgctcaacctgcaagcagtcgataaaatgttaggcaccttaactgcggactaaagatgtaatacgattgtcatttcggtacaaaaacactcacggtgaactgaagcaaccacctcttcgtaggtccagtgttgcggtggtgtgccaacagcttgagcgggaagtgcggtgcgcgttgtactagtgcgaaacgtgccgtcagatcatcctgccagtccacagccgtggtcactggcccaacagcgtctcccgcgagcggtagccccaacaagtacgatacgtcctgtagggtaggggctacctcactgcacggcaagtgaaaagtgtgcgtctttggcctccatcgatcgaccaaagctgctaggagggacctgtccacagtccatcgtctagccgggttcgcgtcgccggccgcagcctccaccagccgacacatcggtaggaggccggcctcacgtagcctgcaataacaaattaatatgtcattataaaaaatattacagtgcaactaacttatagtaaaacactgttcgtacctctcgacaaaggagtcgtgaaccgtgagtagctcaccgcacgtccgtgcccagaacgtcccaagctgagccccctgcaccgcagtaaggtgagaccggtgtcggtgatctatcgccgggtccaacaactgaggtgtatcctgacgtgccatctctgaaaaatatagtgttttgtaacaccctaaaaaaaaaattcgaccgacaaaatcaaaactctaaaaatacggattttcaaaaacttttcaaactaattgcatcatgccgatcttattcgcctattttacctggatttgatctcgaagattattaatcgtgagtaaagaacagttaatcaggaataaaccttaaaaacaaattggtaaaataaatataaattaaaaataaagattaggtgtggatagtattaaataaaatattatcgcgaccatatttgaatcaattaaatttaatcgcgatggaataagaattaaccctaattaaaactcaaataaattatataaaaataaaatgtgagtaatattaatctagggtgaattcattagttaagataacacgaatattgagtaaaatgcatatatgtaaaattaggaattgtggaatcaaatttatatggaaattacactaa

SEQ ID NO: 11866 - DNA, 15767 bp, Oryza sativa
ttgaatataaaatcggccacgagagggccgagtttatttctcataaaattttcacaattgttttcaaaagatgcttctaacttattctttaaaacaatcatagattcatctattgtatgagcaacttgttgttgaatagattgcgataaatcctcaaaagttaccttatcaatagtagatgaagacaccaaatctggcttgaagatcgtgccttgacgagtctttgtacatgtcttcaaaagctcgtcggcgtacttcttcatgtgttcatcgaaggccttgcgtgcttcctcatcaagactctccctcgtaaccggcatcacgttggatggatccacctccgacttggatggcggcgacttcgtcatggcaaagttgaagttgagttgacgttgaatagatttccccagcggagtcgccaaaaatcatgttggcaactttttataacaagttgacaagcacgatcgcagcaccttacgccttgcggtgatcttagagtcgccaaccacctcgatctagcaaaaactagaccaacatgggttttgataactaaacgggctagcggagccgatttctagataactacccgtctcgtgggaaaacggaaggttttcatgacaaacctacaaagagatgttgcactctcgcagcggcggtggacgatttacagcgcaaatcgacaaagatggacaaactaagagaaaactaaaagcaatatgaaaaacgattcgattggttgattgtagattgattagttacaattgaaccggccatgtcccttatataggggttggtcttgccctctacaggccctcctccacgtctaactcggggtagaaaccaaaggaaacccgaaacgtgccttcccgagcaaggaaaccttgagacccgacgaaacacattcggactcggacctgctggtcagaccggccacatgccgccggtctgaccggccctcaaccggcggtatgaccgctcaacacacagtggtcagaccggcccactcggagaaaaccggcagacttccaaactttggcaatttttcctattttatctctaggtgccaaatttgggtgtaaacacccttctctctcgcgctccgctattctcgtccgttcccctcacccatcactgccgcgattcttgcccctgcccctcgccaaccgtcgccgcacccaatccccaaaccctaccccgccgccggcacgcccctgcccctcgcctatcaccgccgcaccactccccaaaccctaccccgctccggcactgcgggttacggatgccattgcacctcctccattgagacgagccaccatggaggccgccatctttgctccccaccaggtcgccatcctagaactgctagcagtggaggcggaggcgaccgccgccactgcaccggggaggatggccgcgaacggcatgagctcgatatccaagggcggggctgtaatgaggaggtacacccatggaccatgacggaccggtgtgtggagcggatacgggcaaggagggaatcgtgcagctggtcagggcaagatcctatctctctctgttaatctcgatctcctcatgagattgctactaatttaatggtgatattttttctaaattttgtgccaattccaggagaactcggaacctatggagctccttgaggagagggagtacgtccctgtacttgattccctgcatcagttcatcccttctgttgaggctttgagtggcaggggcttttgatgctatgtgctcttggtttgattatatttttgctttgttttggtgcatgcagcaagatcatagagttgagcgggaatgggccagaagttgtggctcgctaactggcagattgcacaggcaaattcccatatgttggcagtaagttttcccctaaattttatcctagaaacttcaacgtttagttgccaattgaaatctgtgcaatgagttattattcgtttctcgcattttgctggtgaaacttgcttattgtctcttttttgttctgcaggagcgcaaccttgggagggatagagtcagatcatggctctctgatcattttgtaaatcttatggcatctttagcatgcagctgatttgtccccaattttttttccttgaagctaaaatcattgcaacatcagtttgcttgctcgagacctataataatagccaaaatatcataattggaggtttggagatgctcctatactggctggaaattcagctggtcacggctagtaagtttaattattttctattgtaatttgccatctccagattaccctgctccttgcaataaatcaatctccctatggtattagatttttttttctactcttccgtcaataaaaacgatggcacatgattggtggagctgtataggtgaacgacggcacacatgtgttcatacttcataccggcataggggcacattgcagaaaaaaaaaagagaagtagatctcaggttcaatcgccgctgcacccagggtctcacgcatcgatctgcatgcttatttgtagtcaaactaatgcagctccatggttctgatttgatttcatttgatttgctagtgtggagattatgggtaccccatacccacacggcatggttatccgactagttataggggataacttatatctatgtaatatgtaacagatcatgacttgggtgttacgtttccttgtatattacggaacggcctaaagtcctgatttaggaaaccgataccgtcttggttaaggtttctatcttgtaatcctgccccccatcctatataaggtgggcaggaggccctctagggggcatagatgacacaacctgatcgtcagatcaatacacacccggcggattcaaatccccaaacaggagtagggtattacctctcattgagagggcctgaacctgtctaaatcctttgtctctgcatccatccacttttaggtctcgtgcgctacccctttttattattgccgaaatcatgtttcgacagttggcgcgccaggtaggggctgcgttgagcttcctatcaacgagcgcgatggaatcaatttcatgagtcgccgacttcgtttttgctttgggagttttcacttcctttccgtcgaccacttcttcaagctcctcttctctgacttgatccaaatcagtcagggggcaaactcaatctgatttttatcattatttatcatattgatttttaatctcagattaatctcttgctattttttgttgttgttcgcatataattacgcggcactattgaggcgattgatgctggtcatggactcgaggcgtctcaactttccggtcgatcggccgcgagtccactctgccggcttgtcttcgccaccgccattgctgataacaacaacgacttcaccgccggcctgcctccgtcaccgccgagtggtgcctccgcctacacggctggcctattatgccgccgctgttgggcgtctacgacttcaccgccggcctgcctccgtcgccgccgattggtgcctccgcctacacggctggcctattatgccgccgctgttgggcgtctacgacttcaccgccggcctgcctccgtcgccgccgactggtgcctccgcctacacggctggcctattatgccgccgctgttgggcgtctacgacttcaccgccggcctgcctccgtcgccgccgactggtgcctccgcctacacggctggcctattatgccgccgctgttgggcgtctacgacttcaccgccggcctgcctccgtcgccgccaattggtgcctccgcctacacggctagcctattatgccgccgatgttgggcgtctacgacttcaccgccggcctgcctccgtcgccgccgactggtgtcctcgcctatacggttggttggtcacaccaccgttcatgggtgtccacgtcttcgccgaccggctggccttcgccctgccgactggtgtttttgcctatacgattggcggacttcgccgctgttaatgggcttcatcatctacaccattggcttggttccactggcgccgactggtgtttttgtcaccattgatggactgcttcgttcccacatcggctacttttgctgtcaccgagggaatattacaaagctaagtcatcatttattttattctttatatgatattttgtcttttccttcgcctcactacatcaactggttcgccgttgactagtgagtcgggggctatagatgttatattgtattttttaaacaattttcataatatttatcttgattgcttgcgacataatctgagtacaaaagtacctatcgagttatggagttctatcttcctatgctttccgtttggtttgccaatggatggttgcctttgggccgattcctagcacccgggggctcgttggatggaccgagtaacgcaaggtgctaagtattactcggaagaaatcaaaagcatagagataatataatttattttctgctcttaataattgcaaaagtacctgagtagtaaattctgatccgtgaaactttgttccattaatgacgaactcatgtcactcatatgcatgtttgggaaatgcctaggccgactcccgatgcttgggggctatgactagtcggacagagtgtttaaacgtacagagtcatctgctcggggaaatcaaaattgacaagaggagaaatacatatttataaatattttaaaatacttgattttttctcgagtattatatttatatcagatactactcatcctatatgtttgttctgcaggatccatatccagatatgcataaaagggattcatggctttaagcttatctcttacgctccaggaatggattagtcagaacaccaccaccggctcgcctcgaccgccgctgactggtgtttccgcctgcacggctggcctattatgccgccgttgttgggcgtctacgtcttcaccgaccggcttgccttcgccgccgccgactggtgtttccgcctgcacggctggcctttatgccgccgttgttgggcgtctacgtcttcaccgaccggcttgccttcgccgccgcctactggtgtttccgcctgcacggctggcctttatgccgccgttgttgggcatctacgtcttcaccgaccggccgcctcgtccgccgccgactggtgcttccgcctgcacggctgacttattatgccgccgttgttgggcgtctacatcttcaccgaccggccgcctcgtccgccgccgactggtgcttccgcctgcacggctgacttattatgccgccgttgttgggcgtctacatcttcaccgaccggccgcctcgaccgccgccgactggtgtttccgcctgcacggctggcctattatgctgccgttgttgggcgtctacgtcttcaccgaccggccgccgcatccgccgctaactggtgtcaccgcctgcacggctggcttgttataacgccaactgatgctatcttcttcacggctggctacatcgctgtcactactaataggcatcagtatcttcaacacaagctgcctacgtttgccatggctgccgactggtttcttcacttccatggctgcatgattctgccagtgttgattggccttaccatcttcatcgcctttcgtctcgtctgctgctgactagtgccctcgcctctacatttggtttatacagctaccactactgatggacatcatcgtcttccgccgccgactcgtgttatgccgccgccgactagtgcttttatcttcacaactgcgcgtcttcactaccggtttgcttctgttgccgacgactcgtgttcacttcatcacggcaatgcaactttgtcatcatggtagagcgacttcatctttattatcttcggtaccagcaaactctattgctgctacttcacaagttttgctacatcaccaaccatgatgttgttgtgatctcgacatctcggcatgcgatgccgtgttattttactacaacaagtggctctccaacattcatgatttctacttggacatcttcaacacatatcttcaatcaagcaataactattcgacgacaagaggctacagttctcgactctatgttcagttgtttcccaactaatcaaagagtcgggggctacacaaatacaaggctcaaaatttgacaaattttatgtcaagctgaagaaatcaattcatcaacccacgagtcaactccaggagtcattatcttcatctttgcttcggagcagacattctacttcaacaacttcaaatatttcggtttagacgagttgggcaacaacatcaactctcctccaagtgaagcatctacaacagttataacattaatttgatggattattgtcactgacatcatcaccagcacctctgcttcatcgaccctgacatctctgctgttgctaatggatgattatgttttcgccgacttattatttcaccttcacggttgacctactatgcaaatgctgatgagcgtctttgtcattatcattggttgctacactgctattggctggatcaccgacatcgtcatcttcatcatgtcggttgcgtttgtcgtcgtcaactacacaactttatcgctgagcgccttcatattcattgctggctgacctgactgccgccgactggtttcttcgcctccatggctatgcgacttcagtacttttgattggtatcactatcttcactaccaccaatatttttgccacctctggtgggcaatattctctctatattggttatcttgtctctatgccaactgcgtcagctaccatcaatgaacaattgtgactacgtgctcaggggcttactagctcaaatacaagtattatatcttcaatttggacttgctccggatacatgcaacatgaattcatgatcatgggtctattttatatactcaaagactggactatttattattccccgtaagggttatcaactgaatacttgcgccagtcgggattcgattgttacatctattttggagtatcccataagggataatcactaagatcagaagctattcatatgagctacgcttggtctatattacccggaagatttattactcgggagcatgttacatgcgtcatcctttaaagggtgtcgaaggcatattttttggcctaggcctaatatgtctgcaacccatattttcaggtgtggcatgtcacgttctttttgggacttaggcactttttgcttaggccaaagtgcgcgtgatcaagtgcccaataccttaaaatccttttataccgcagttacttaactttttaggagttggtacaatgcatcttaaaaggtgtcaaacagtaaagctttatatagctgtcccgctgacttttttatatataagtcaaggtgctgtttgggtttttaagcaattgattggatacaatatcattgcttttcgccacgtaagtgtgcatttttattgaccaatattatggcttaggctgattatatattgtggtcattttctaggcggttggtaaatcctttatgagtttatttactcggattttacaccacatatgccatatatttccaggtgtggtgaaaccatgtgtcttttagggactaaagcacgtctgttaaagcagtgtgcgcatggcgtatgcccaatactttggaaatttatttattcacaacatacaagcttctttatagctgttttgctatgtgaattttcaataatgtagccaactttaggttacattcatcatattttacaaaacagtcggtatatcacttggatcatattattcagggattcacgccgcatatgctacatattaatattaagtcgcttggttgactataattatcaaaaccactcggttggttggattatttattccttgactatatgtttggtttgttcgattaaccacatagtcgggggttacacctattaggtgcatctagtcgatgcacctgactatatttttcagccctccacagtcttcagatttggtaaaagtactcgggagaccatggcgaagatgattgaagcactcggctttggagtaatctagttcgagagaaggttatctttccgactgtgaaggtctcaggggctactgtggagattatgggtaccccatacccacacggcatggttatccgactagttataggggataacttatatctatgtaatatgtaacagatcatgacttgggtgttacgtttccttgtatattacggaacggcctaaagtcctgatttaggaaaccgataccgtattggttaaggtttctatcttgtaatcctgccccccatcctatataaggtgggcaggaggccctctagggggcatagatgacacaacctgatcgtcagatcaatacatacccggcggattcaaatccccaaacaggagtagggtattacctctcattgagagggcctgaacctgtctaaatcctttgtctctgcatccatccacttttaggtctcgtgcgctacccctttttattattgccgaaatcatgtttcgacagctagattttagaaatagcttaacaaattgttctattcaggtgtctcagcttctgcctttgtttcaaatgtgtttagctgttaaagaaaataggttaggcttcacttccgagattatgcacttgtttagaaaatttttacgatctgatagtcccagtttttctgcctttgttacaaattggcaccatagataaatttgcttgtgttaaaatgtattgccatcatagcgttgtaacttataccttgccttcatggaaaatagtagtttattttaaatggaagagagtaatgtgctttgtacaaattgatcttccagatgcataggtttataaaatgctatgatctagatgaataggtttcctgtctattgttgttcatttaaaatagaaccaaatatgctgaaactattcaacaaaaaaagtcaaacagaagaattctactgtcacactgcactttcaaaagttttggttgatactggattttattatatatcagaattaaatagtttacaagaatatgagtgagaattatattattattgatccgtttctgctgtttgccactgtaccacctatgcatgcttgcctattctcttaatgtacagtcaaagttatatgtagaggcaatgggctcgattgccattcatccaaattagaaattaaatggtgcatgctttctttggggtttgatcatatatttctgtattaagagatgctgctggctctatttggcctttgatctctcggtttgtttaacattgcagtatttatttttttctttccttgcatctgaacaaagatgactccgagctaatctctcagtttgtttaaaatggtatgaaatggtaaatggacccggttagctttgtcgaatcagtttattataaaaactgatataaaaattagtgtcttctacatcttaatgtgttatatatataacggttgtactcaaattcagggttttctaatatgggtcaatagggattgaggttctgtgagatggacctaactcatttacataaacaaaattgcagccatgtaaaagcctagcgctttcagttcaaataaataatttattatcatttgctattaaatgcttaatgcctatatatttgctttgctacatatttttgcctcagtagaaaccaggatattttaccaaatatgttgagagttaaattactaatactaagtgatgaatatgtctttataagcgtgtacctcgtggtagacgaacgcactgtcttcaatatggtgcttctcctgatatgtgttcgatatagacgttcatgtggcttcttgaggtgctctataaggaggaaggtgaccagtgaggagcagaagttgctgaatatttccaggcgatgcatgtattgcaaaaaatagcacatgtaaaactttcaggtgatatttgtatctgtatgtggtataaaaagttagatactatgagctattgtttgggtttggaaatgtttcactcagagtgatgaaaatattgcagaactccattcatggccaactttggaaagttattgacagtataataacattcatgagaacaatacaaatctctctatcgttattttattcgtgatcttaaatattaccttttggtttttgcattatcaattatcaccattgcgttagcacgggtatattacatgtataaaaaggagttcaccctctagcaatcttacatgtcaaatctatatactaatataaaaaggagaagttcacctctagtaatcctacatgccaaatcatcaggttaaatccctaccgtccattcgcacctcaggtgtagtccgtaccatccaccctctccgacgacgatttcaccctctccacgcacggtctctgcgcaaagaatacgcctcgtcaccctcttaacacgcgactcgctcctcctcctcactcctcctcgcgtcgtcgtcccattccgtcgccgccgccgccgccgccgccgtgcactccaccgcctccgccgcgcactgaaccgaggcgaggtcttccccaaccaccgccggagccgtggtcttccccatctgccgcgactggccgcagcaggagccgacgtcgtccccatccgccgccgccgccgccgcaatccaccgctaccctcgaggtcgtcgctttctttcaccgccacgcactgaaccggaggcgaggtcttccccagacccccacggagccgaggtattccccatctgccgccgccgccgtgcactccaccgcgatttctccgcccatccgctgctccatcgcgatttctccgccgctgcaacctctgccccgccgatcgcaccccatcgcgtcgccggtttctcacgcctgttgccgagtccaagttgatccgattggttcctccgtcgaggtcgcccctgccagagaggccaagccgatccagcatctgctccacctactggcccctccccgttctctgctcctgacaccgtcggaaatcaaccacaggccaccagcaactgcacctgcaccctgttgctcgcatgattgtgatgacacataatctcgatctgcaactcactgtctccattttctcaagccggaacattggggatattatggcaggagcagcgtggagtcaaagccctactccgtagagggctcgaggctgcgcggatcgcttcctctctttgaacacagctggggtgtgcgacatggctgtggtggaggatctgcccccacccaggtgaaccctcactttagactgtagattgcaacagctatatgtaaattacaataacgatttctctattaatgaacctgcagtttaatctgaaaatttaggcaaaatgtaaccgttgcagtcctttgttttctttctcaaacacaccattccagtcttttggaatgacccttagggcctgtttggcacagctacagctccagagctcagccaaacagtttcagctccaccaaaactgggagtggagatgggtggagctctctcacaaaagaactagagttgtggagcgttgtttaggaagctccacaactccacgccagacccaactcttgaagctaaatttaggagttggagctgtacgaaacaggccctaaagctgaccaatcacttgtgaaggaatcctctactttgcagaagcagaagcgttacttggcatatatactttgcagaagcagaaacacaacttggcggtggctggtttatttagcaatctctacttggctttgatggccagtgtggtaattaatttcagaaatctccgattcttgttgacaaaatttcttttgcaggttgaacatggtgatttcagacatttatcaatgatggattatctgcttgcctattctttctgttacatcagttgtgggatgtttttctgttaaattaatctaggttgctctcttgatctggtctagacagatcctaagcaaaggttgcaataaggaaaacaaaaggaaaaggtgagagaggggcttagtatacctgttgactgtagctgtgtcaattttagttcaaatgtttattggttttgtcatgtatactgcactgtggttcatgaagaacacgaagaatttgtatttggtctacttaattgatctaaattatgtagaacttcatgatttccttcagtgcaaaatatttattaaaaactgccaaatgtagttttttttcttttttttttatccctataaagaactgctagaaccttttttaccacgtgcaaaataacatttgcaatttttttaacaaagaagcagtcttacatcatgtgtgaggccaggtatcaacattttcttcagtgcaacagtcttttctattctaatctgctactagaagatcatgtgcctcacattttacaggatcattgatgatatgaatgcttaaggatgctattttgaattgttggttttctcagcaaacaaaagtttccatggttttatctgatttatttttattacctcacacttaggatatatagcacattgcattatgttatctgatttggacattcttgaactgtagccctttaaaattaacacttatattttagttaaagaatcaagttttatgacttggtttaagttatacatatctttcttcaaagtttaaaaataaaaattgtaaaatcgtatatgcctgccaccttatcttgcataagttgaggctgtttaccgtccttaggaaaaaattgtccttcaggtattggaagtataacatttgtatttgattttacaatgagggcatgaaactcgctttctgctggactcaaactgaaccattttggttgataccctaacattttgctctaccatataacttatttcactattacaactttatttagactgaaaaaaatttctggagtttggtgcatagctgcctgaagcctgaaggcttacaatttgtttagttgtgcttactatttgaatttattatgttcaaagtagtttcaaaatactaatgattcttagttattttttgggaaaaatcggttatgctcattcaagaatgtatgtctaacaacacatgtgatactcttttccaaaaattatacaaatacttattcagtttgagagtatttcaatgttcctggtttagttttcagttttttctccaagtagtgatattctttggttaattttgttttttttaatgcagctcaaaatatccatgtcaacttgaagatattgtggattgcagattgtgagggttacatttgaagttattgtggatgacacgaatcaattgtgtagatacttgtgttattttctcttacttagtggagttctcttgaatgcatctgaagacaactcttttgctttgagcctttcaagtgtttgttaagttgtggaaaattgtatccattttgtaatgttggctactttgcacctccacaacaagtgtccaagagggggtaaccaaaataggctagatcatgttagaacatattgttcttaaacttgtgtatttgtatgtttcatgcgacatttattggggaaaacacaataaactatcagggtattcacatgtttcttgctatttaccatatatggaaaacgtgcaaagtgcacgattactagttttggaaagtgtaagactgcagcagaatgtgatgtaagaagactttggtagtgcatcaccaaaaaacaacagctactgcaactaaccctttcgttttggctaccctggaagtaaacaggcataggtttcaccagagtaatccgggtatcaggcgcaaggcaggacaccaaactgctaatcttccatgaatgctatgcattccaactaaaacacacgtctgatgcacgactgcatgcaggactgcaactcaaacaaagccacaacagcctgcaccctgctggcgaaaagcaagaccaaagatcgttccatcaaatgcagcataactgaataaacctttgctcccctcattctgacagtgaggtgagcactggcaactgaaaataaagcatctgagcagaccaaaacagatactaatgtactagtatacataacagtagtgatcaggcggcatatgtctgcacattccatgatctggtatactattaagcttggcagtgaatgcatatacatggcattttcacctccatattcacaaagatagtgactagtaggctgaaaaatggacactggctaattcacttaatcagttgctgtaacagatgcagcttatacttcacataatcatttcccaccatagtaaccacttatttaactgttactagaacaacgccactaatatgacaatacacaaggacaagacccttcttgtgtctgttgttttacagaaacaggaattcgttgacaaaattagaaataacaatgtttaagtagttcagttattagatacatgacaagttatcaacttccaatgatatgaaaggaggtgtgctgctagcatcaacaacgatcacttgggtatctttgtattaagacttaagagaaatagcggatgataaccatcacttgtcccaaccattttccagcatagtaactacagatttaactgttagtgaaatgatgcccactaatacgatactaatatacaaggacaagaagaccattctagtgtttgttatttgacagaatcagaaatgtgtagataaagtttgagtagttcagttgtcagatacaagaaaagttatcaacttcaaatgatatgaagggggtgtactacctgcttgcatcaactactattgcattctgcagtgagacctaccaaacctatgtaaaccaaccaccaatcaggaaccaggaacatcagattaaataaagactttatggtcgaaaagaagcaccgtgcaatgactagcaagatcaagacatcacactatcggaactttataaatgactatcggaactttttgtgctatgccttagatacaatagtttcagttacacaatgatgtctgtatcccagtctggcatcataaaaatccacttgtaaaagtacatatatgtagtcacaataccattgctgacacggatcagatgaaagatgaactgaggcgtcaaattaatatgcacaattattataaaagtgcagcattattcctgacaatgttgtgttacttgaaagccaacagactcaggcagaaggagaaggaatcattatagactcacaggaggctatatcaggcaatactgttcagaaacttggattgaacgttgatataactgggacagtatgcaggggcactgatcgaaggcatgtaatatactcaattactcattgaaaaatattaaagtaggatgaagtaggatgtgcagttaaacctgcaagttgcaatgaagctgaagaatccccaccttcaaagagtttgttatcaaaatccattgtgtttgccaaacttatctagtatgacctttcttgcagttaaaacacatggaccaaagaaaagataactggatcaaggatttgatccagagaaatttatagacattcttgaagttaatcgcatggaaaatggtgactaaatgtttttggactggtataatcaacagagagcacagaaggatttgttaagactatatattttcattttaattcactcttatattttgttaagagtatatgtttgttaacagttaaaaattgcatacttttacatgcagcaatatgggtttttcacaaaaattgcacatttacccaatgatgattgaagaaataagtttttcacattgcctgagatgatccaatgctatatgcgcttatgcagcatgataaaagaatcaaaatcatagagacactaaa

SEQ ID NO: 11867 - DNA, 2070 bp, Oryza sativa
ttgttgcttgaggactccccaactccatctcccgaaggtattggcacatcatgagaccccactttgatggtaatcacctccgaagtccttgcctccaccttaacacgctttccttccctcttttcttcattaacctgattttttccataaaaccggctattatttggtgaagacaagcgctcatgaattggcctccttggtcctccccacctttggttgaattgcattggaggcatatgattgaacattggcggtgttgccccccatggcatgtagtaaagataaggataacccggcggcggcattgggtaaggcccccatgacatgtgttgtgaatgatgatatggaggtgattgcgaccgtcttggtgaatggccaaatcgctccctaggaggtgatcttggtctttttcctttgttgcgagctctctcatcaccttgcttctcatacttctccaaaagcatatccaaagtcgccttagtcttcctaggagctttagaagttgaagcctcactcccattctccttccacagaccaacctccggtttctttggcactatcatctttggcctaggctcaccaatgatcacttctttccccttagtagattcggcttgctccggccgaatcaacaccttcttatcattgaaattaattgtattcaccggaaaaggatcatgatcaagcttcatcttagaaccatcggtgaacttcaatcgcccttcatccatggccgattgaacctgtcgtcgaaacacattgcaatcattagtagaatgagaatgagaatcatgccatttacaataagctcgacgcttcaattcttcttgagaaggtatgatatggcctttaggtaatctaatttgtttttcttgcaaaagataatcaaagattttatcacatttggccacatcaaaactatatttaacctcactttgccgatcttacgaggagtcggcataaattaaaaggaacaaaaggcttattttttgtaatccatgaccacttgcaacatacatatcatgatcaccctcatcttcactatcactagcttcagagtaatcaattgcattaacattaggcttcttctcatatggtctaacaaattttttattatccttaacccggctttcctgagccaaagccttttgcatgagttgactaacatcaagaaattgttggccatcaaatctttctttaataggagcaattaaaccattaaaagcaagatcatccaaatctctatcagttatattcaagctataacatcggtttctaacatctctaaatctcttaacataatcaatgacagattcattatacttttgcttaaccgatgttaaatcagataacctaagctcagtttcaccagtatagaaacaatcatgaaatctttgttccaattgagcccaagtatgaatagaatttgccggtaaagaagtaaaccatgtaaaagcagtaccggacaaagataaagagaataagcgcaatttaaaagtatcactattagcctctccagattgcgctaaaaattgacctacatgctcccatgtggtcctactatcctcaccactaaatttggtaaattcgggaaccctatgaccacgaggatatggcacattatcataataatcaggatacgacttttggtaaaccttagcacaattcctagcttcaatcccaaatttatccctaataatcccactaatcaattcctccatattatcaagcctatgttggtttggtagtggatttggttgcctaataggttggtgttgcggcgcaatatgattatattggccttgcctagtatcaggaggataccccctagaaacatcattataagcattaggaatatgtgggggaacttggggattatttgcagcagtagatacaggaggatcaaaaattctaagatgatacaaataactagcattagtcattggatctaccccctgaatcggcactattgcgccggtctgaccggtccagggcccggtctgaccagcatccagaggagcggtcagaccggcctgagtcccggtctgaccgccggagtaatactcggtc

SEQ ID NO: 11868 - DNA, 6231 bp, Oryza sativa
aggaagctaaaaaaaatgtaaagaaatgaaactaccatggggcccaacctgcattggttaccaacacattaattgttccccatttatcaagagcctggtagattaagtaatcataaacgagtcatagagtgaagaattgatataaaagtatatttaaaagtgcatttgtattacataaagaaactgcacttactgctttcatcatagaatccacatcggcttctttgaaacatctcccccgaaggtaatagcctgaccaccacatgcttcgatctggaaaaataacattataattatctgatggaactaaggatagtgtgggaaaccaaaagtagttttctatagtatgatttgtatatttgtaggtagatttctctccaaatttcgcttgaactgccctttttgaccacggcggtatggagaactttcaaattgatctaaaataactacatttataagtaaaagtagttaaatatggttgaatcaaccacagtagagattcatctcactgtttcttgctaattattatcattattattactatctactagttttgaaaataagttacaatgtgccaatgaaacagatgaagataggaatgcaattagattttaaattgctctgggttgacttccgaaatgtgcaattgttttggagttgcgttatcataaacgtcaagattattcagcaagatttgtaaatgataatactttaatgtattcctgtatgaggctaaaagacaggaaaatgaaaaatagaattaaggaaatccaacaatgatgagaattaaggaaaaaaaagttatccaaagcataaactgattgcctgtagtaaaactaaaatgactaacaaatagcattagatagtgaaaatgtccacacacacacacaatggttacgatttagaatcaccttagggttatccttatgttaagatttgacattaagtgacaggtaaccaagtaataccaaacaaagtctatctacaaatactaaatttgggaatcgacaagctcacctctttggagacttcttcagcctcttttgaggatcgggcatagttcaccaggacctgaaaggcagtggcaagtctccgaggttaatcttatcattacacaaaatataaggaaaaagagaaatggtcttttgcattgttgagaagccaagcgggtaggcaaaagtgtaaaattacatcacaacatgtctatccctctataagatatcaaagacaacaaattggaaagcaacacatactagaactagaaccagaattccaacacgagcagtaccgcacaacacaagtacacaaacaaatcatatcagctgttgaacaagctgttcagactttagttgtgacgctcaccttgcacccagcttttccaagagccaatgcagtcgcctttccaatccccctggaggcaccggtcacaataacaactggagcttccaactttgtagcatcttgcacaagtgcttgctcaacagctgcaacatgggtctgcacgcctgcagatagcatcgcttagcattggataccaagagtgtaggttgtttgaatgagtttgaaaaggaggataaattcaaaacacagctttcctgaagaaagctcttgaaaagaatacatttagcatatgaaaagatgtgaaaattttaaattaaaaaaaatgaccctggacacagaacaaagacacaagtctatatagatttttttaaaaaaaaaaatacataggaacatctgttatttccaaaacaaggcaataaacagtaaactccatcttgacaaataccatgcaaatgtctgtttcaatcagacttagttcacatcgaatgttcaactttatcaatgatgattacaaagtggcatctgcaggctaagcatatcatatcattgaagtgtagtgaagcacagctacttttcctatgtgctctattacagatgttactggtcctgaatttgatgatgccatatatatgttgatgatacagtagtttcagagtacctccaaaagggcatgattccaagctatcaaaaatagaaaaataactccgctgttctgtttccactttttaatacatttggatgtctattgcactgtagataattaggaccaaatattgttaatagctcaacttccactgtcaaatgacatttgacaaatactgtgggatctgtagattttgtcagaaaaaaatctttacaagtacagttcaacatttacattcttatgctgaagcatttggaatcatcatacagcttctgacaaaagattaagcttttgttgatttgttgcataattttccactaagacacaatacatataacaaagaactgacacctatggtcatcatcaattccattccatggcacgtgaataatgctagaatagattgctgcttgttgggttgctggtgcaagcaaagatacaaaagaataatattttatgaaccccaaataaaacattgtgttcttaatgcaccaattagtgtattagatatttcagtttgctgataacaggattaggcaaaccgtgtgatattggggaaaaaacaaagtgatgctgacttccctaacaaaaccagaccgcaagccacttcagctatgtaaggaactacttcccagtggactacaaagtagtttatcatcgaattaagatcccaagcacatagacaaaagaataaaatctggtctaaaacatactcttgtatttttttttagcattaccatatcctatttggcaatgaatttcatatactagagtatgttcttaagattggattgtctaaagtgaaattcattgccaaataggatatggtaatgctaaaaaaatacatgattttgaactaacagaaacataggctcatcaaacataagttgatccataaatataaggggtactcctacattttacaccaaatttaagagagctctccatttgatgtcaacttgtaaaataccagcatgaaattttaaaaatataactgaaaaataatattataccaggcggagcatatccccaaaacccacacgtttcacccagcaagtgcggatcctaggctagcacgagcagcgaagcgttcgccacggcgttcccagatctccatgcccgagctaacccagcacaacaacgactaagtccacccgccgctggagcgagacaaagagaggggtgggggaaaaaaaagggaagtgcggccttaccggagaagccgccggaccgcaccgcgcgcgagcgcgcggccgccgccgcgccgaacgagacgaaccctcgccgcgccaccgccgcgacggcggcgccgcgcggggccaccgccggggaggccactgctgctgctgcccctgcggtcgcggaggtcgccatgagtgcgcgtagagaagacgcggcggaggaggcggaggcgaggaggcggtgggccacagggagcggcgtggcgggcgcgcggggggttggtacttgtagccgcggcggcgtcggagtcggcggaggcggcggcggcggagggaagtttttttttttttcttcctgggtagctcagcgacgagagggcgaggaagggtagataaacccgtcggtgtcgttggggggcggagcgcacgaggagaggagaggagaggacgacgggaagaatactctattggagccccttcacacctactccatccctccttaaaaaaaaaacctaggtttccacatctaacattggatttggatcgtccgtcttattttaaaatattataaaaaaattaaaaagataagttattaatcatattttatcatctaacgacaataaaaatactaattataaaaaatttcatataagacggatagttaaatgttggatacgaaaactcagggtttgtctttttttacagagggagtaaaatgaagtgacagattaacacataattaataaaatattagctatgaaaactttaaaaaatgattaatatgctttcctatagcaacttttatataaactttttataaagtatgtatcgtttaactgtttaaaaattgtgcacgtgaagaacaaggatattatgagttgggaattcgcgggaaataacacagtcgagatctgcaagcgaaatgccccctgatttctcctgattttctcagcccgttttggcgggtggcggcagctggccaccctgatttgacgtgaacaaggctgatgatacagatgtatctgtattctgcttgcttttgatttcgattggatctgactccttttctcttcgtctcatccagggcatccatccagcacaatgggttttctcttctttttttcgtcagttttaaggacgaacttggtattattacggtgctgttttgaaactcatcgaagaagatgaagattaagacgacgcacctaaaacgagaaatctaatagcgtattatttagttaagttttaattattacaaactctttttttaaaaaaaggattttacattgttttctattaccacctatatcctccgtaaaaaaagacaacttctagaaatgtatatatataaaggattgtctgatgaaatatatgcttcttgcgaaaaatttctttatagcagttgctcaaaaatatcaaataaatctattttcagctttactataattaaaagccaattaaccatgcactaacgattttttttttgttttgcatgcccttccttaatcttcatccatagggccttagtaggtcatatttaaggcatttttctaaagagctaattgagtttagccactcctcatttttctgttaacatgttttttcaaacagcccttgcctgccagacgtaggccttgtttagttctcaaaatttttttttccaaaaacatcacatcgaatctttggacatatgcatggagcattaaatatagataaaaagaaaaactaattgcacagtttgaatgaaaatcgcgagacgaatcttttgagtctaattagttcatgattagccataagtgctacggtaacttacatgtgctcatgacgggttaattaggcttaataaattcgtctcgcggtttccaggcgagttatgaaattagttttttcattcgtgtccgaaaaccccttccgacatccggtcaaacgtcctatgtggcactcaaaaattttcttttcgcgaactaaacatggccataatgagacatgtttttcaaacagcccttgcatgccagacgcaatgaaattttggtcgccattatatattgccatggaagaacatgtacgagacaatgagagaaggaactccttaataatgataatatggcttggaaaataaactaacttggagattcaaaagtgttagggaacaactccaaagtgtttttattgggcatacatgtatcaacatggcaataatgagagaaaatccaagaaatatcattaacaagtgtcaaatttcaaaaaatatcattgacgagtgagagttccgtaaaatatcatcgtgcaagctattttatcttagaaatatcatcattgttagggtttcgttagtagccctccgttaagtactatatgatgaacaatacatttaatgatatgggatggatggaacactaacaatgagaatggttttttttttgggacaaaatcgcgtgtacgattgtattcttatgaaactcacactcgttgataatatttttttaattggacgcatgtcaatgttattttttttggattttctggaaaaatgaagagtccatattgcaagagcgaattgactagtagaatgatgttgagtgttctcacgcagatatcgtgcgtaatgatgtcattttgtgtgttttttctttgtgctgtttaattcatgcaaacgatcccgcgcttctagttatgcgttgattggacgattatatagcttgttggtagacgctaatagctgatgcccaacgaatttggaaccttggtttatagtaatacgataatgctcaaatgtccccactaatagatactaattgtgtactacatagcttctatatagtttaatagatatatctgagatattgtacataggtggtccacattggagtgtcaaacaaaatcggcataagttattttaaaaagaaaatcagaatgaaggataacaatacattgaattatactagtaaaacatgagaaaacaatagttttagtctgttagggagggggggggagaacaagagataatagactattcttataatataaaggtcgtaaaatatttcacccccgctagcccatttaagc

SEQ ID NO: 11869 - DNA, 521 bp, Oryza sativa
tgccaaaactcttggacgcttgtttaaaagtaacttaagtgtagagccctgggaggacatattgagaagtgaattgtgaaattggaacaagaggagactgacattttgccagcccttcgactgagttacgtttacctaccacgacacatgaaaagatgcttctcaatatgtgccctgtatccaaaggatcataaatttgacaaggagtttttagcagacatttgggtagcacaagggtatgtggaggctgaagatgcatcatcttgctttaatgaccttgtaaatcggtcattctttcagaaagcagctggctatagtgatatgtacgtaattcatgacttgatacatgatactgcacagctagtctccaagatgagtgcttcatcatacaacatgtgagtgacctagctaaaatcccatcaaaggttcgccatctgtcaatattcaccaagggaaatatcagctgtacagaaatagtgactatttgcacacaaaataaaaaactgcggtccctaatatgc

SEQ ID NO: 11870 - DNA, 683 bp, Oryza sativa
  unsure (1)..(683): unsure at all n locations
atgttgaatcaacctactgaagccatgggtcctggcttatttaactccataaatatgagatatcttgtgcaataacgagattattaaataaaaaaagaagaagaatattttgtcctgggagtaacgtgaaaagaaaaaacacaaacctttctcgccgagtcagacgtcgtgaactccttccataaatcctaaaaaaggatgaacacaaacgcgtagcgcaattagtccaccgaacactccacagcagcaaagcaaacgaagagctgaaaccgcggaggcggaggcggtggcggaagactcacctcgaccttgtcgagcttcccttcgtcgagcaccttgaagagggcgaaccccgcgggcgtctcgaacagcaccagcattctcttnncctttctccgcacgagaacacctacacctggatacaaacccaaatcaaaaaaaaaaaccacaagatcgaaagcttgggtcaaaccgagcagctaggatatatacaccctcaagaaaagaaaatggcgcaaaccttggctcgattggacgcgaatcgacgatggggggaggagagcgcgaggcgaaggtccggctgcggcgagatggtggggagggggagtaggcgccgccgccgccgccgccgccgcgagggtttagagcgaggtgttgtgggatgcggcgggagagggggtgcc

SEQ ID NO: 11871 - DNA, 20170 bp, Oryza sativa
tttctttcttttgacagtggcctcctaccggttagaagctcaagaagaatgactccgaagctatacacatcatttctggttgtgagttggtactcaactagatagtccgggtcaatataccctggtgtgcctttgggtacagcctgagttctcttatcaatcgtcgaacatccaaaatcagacacctttgcaaccaagccatttgcgagaaggatgttggctgtcttcacatcaccatggagtattgggtgtggcaaagagtggagatgtgaaagtgcgtctgcggattcagcagcaatccttaggcgggttcccagtgtgacatggaaccgcctactcctctgaagatctagcagctcttgcagtgttttgttctgtacaaactcatacacaagcatcggtgcctcaaattggaggcaacagccaagcaacttgacaatgttgggatggctaacacgacaaagtatgaccagctcttgcacaaactccatcttcctgctctcgtcaatctccttgcacttctttattgcgacggcaactccatctataacagccttataaactgttccctgccctccttccccaatgacatgtgccttgctgaaattatttgtggcagtctctatctcccctctcttgtagagggtgaacccatcatttccatctgctttcatcatttctagcaatatctggcctccatgttgttgaaaaaactcatcagtctgtcttaatagagcctgtcgtttaattttttgtttgtgtcgaatcacttcccatcctaggaatccaaagaggacagccaatacactggcaacaacacctatggaaacagagatacatgattagcaaagtgttttgaaactgatatgtttaaaacagagatcaagcagatcaagatgaggtaacatagagttggaataaatgtgtaccaattgccagtcgtgttttcggtgataagaggtcttttcggcatcctccttgaattgccgcatttccactactacccgcatgacacacacaatcgaaacttccaggtttattgtagcaatctccatagcaagggtaattctctccatgttgacattcattaatatctacaatcaaatgaaaagttttttagaaaaatatagcgttacatgcatctataaaaataggctccttttagtacaaaagctaatcaataatgagctgattagcttttagtccttgttcatttttctcacggtcactcaccatgatccccttgcccaagtacccatatgcaaaaaaaaaaaaaagcaattatctaacaaacttgaatttgtataggtaatttttttaaaaaaagacaataataaaattgaatggattaataatgttgtaaaacaaaaaatgaatccggcaatcttgagaggaggtagggggggacagcggtccgcgggaaaaaaaaagaaatctaaaatggaaaaaaagtgagaatatgaaacaaagactagaaatatttttaaaaaaaaatagccttgcttttgatcagttagctgaaaattccgaaaccatcagtcgactaataacaaagtgttgtcgacgtcggacatcgagtcgtctagcttcttcctactctcgatcgctatcatcaccacgcttctctcccacgcaaaatacagccaaatggtggcggtggtttcagaccagcaatggtgacaacaaatgtatatacgtcttctccggcaatggaccttaaaagcgacggcgacgtttggggtatctgttagtgttaggatcagggattgaaattttgcttcgaaatttcggaataggtatgcaactatctcgcctgaagtttttgaatttttaaagtttaatgaatttggtaagaatttattcaaattcagtcaaatttatttaaagtttgaccgttttgtgctccacataaaaaaataaaacaaacatggccatggtacatatgccttgctaaattctcaacatagaacatataaaaatgaaataaaaagtgagaaatagagtagcagaaagtataactaacatttggcgcaatggatctatcaaaccattcgacttcaaaaccttctcccctatgtttgtgtttataagagagaaaatcgtgctcaaatggcatggcagctcgggctcgactttatataggagaagctattttcgctggcggaccacttaagccatcgccatagaaaataataggagtggtggtggcttaagtgggccgctagcgaaaataggttcatcttcgctggcggcccacatcaccacaccgccagtgaagactttccatcttttttccatcttcgctggtggtcccttaggtccgccgccagtgaaaataggaatatcttcacgggcggcccgctttactcagccgccagcgaagatatgttttcgctggcggcccgtacccacgacccctccttacatatttgtgctggtggtcatagcccatggccgccagcgaaaattatagggcaacgttataaaaaatcggtttttaagtagtgagagggaaactgtttaattatatgcataaccaaattaaaggtctaatgccctcaaatacgaaaagaagttgaacgaaacgtacttaagaaagctgcgtatgcacagctcactgcatgatacaggtatttcatactagttaggaaatactcgatcgagtataatcacaatttcaaaattctggctatatggagtagagggaaaattaccttgacaaccgttgggacctttaaggtaaggattgccttggtatccttcttggcacctacagatgtagcctgttgtatcggaggagttgatacactttgcattgtcgcttttgcaagcataggatgtgagatttcccatagcttcctcacaagtgttggcggtgttgatagcccaatcaagcaccaccggtgcctcgccgccataggtattgttgaactcgaacggtgaagtcaggtaggtggttgaaaaggagaagttggacgcttccatgagcacagcgtagctgcagggggttcgattatagatccccgacgtgttcatgctttgctcaaaccacacctggtagtaatcgaggccctttgggatggcagtctgacaacagcctttcccagaacaggtgccattgatcaggctcgttagttcacctcgccggcagacggagacacagccgctcatgtacttgcccacgtcatcctgatcggcgatgtatgccagtgttcggcacccaataatagtgaacttgttggcggagtccgagaacctgtacggcgtgtccttcaggtccacataccacaggtcatcgaagttcatctctcgggttgagatgttatagcaggaagaagatatacgagtcctcacgcgggcctgactaagctggacatcgatgctgaggagctcgacatatccaaggaatggcttctggacgccattcccggtgttgttgcagtcgacttcaaaggaaggcgacatagcgcagccgcttgaactgaggccgaacgggtagacgatgtctacaccaccgcacttggtggcgttctggcattgcgacgacgctgcctgcgcaccgtcgagtgtctctgcagccagcgccgtgctcagcagtagtaccaatagccaaatactatcataaaacgcagcgcaaatagaagccacagctgctcctcggtggggagacatggataagcgaatatctgtgtgcttttggtggatatatcgagcacactacttttgcaacctcagttttcacaaggaacggaggaatcgtatataaagacgagaggggtgtagcactatcatgtcctacctagctacttgggtgctaattaaccacgaaaattaaaacaaataaacaatgatatgtaaatttatgtacacacccgacgactttgacttggcaagttttcgctaaggactgttcgttccaacgtcgttttacactgttctctttaagagctgaactgttccggagtacacgtagtgttttgaaatagacatatatatttagaggaatatattttagaggaatatatgcatagccaggtctaaaaatcttaactgatatatactgatataaatattaagacttgataggtaaaagtggcattaccatcataaaaacatattattttgaataaccattataattaaatatgtaatttagatgacatgcaaagaggcccggagacgtaattttttttttaaaatggtcaggccattgccgacgttttatattaagaaggtgtccaattttaagaagaaaacgggatcaaaccttacgctgcctagttaattaggaaaaactgagcgaaaaccataactacaagaccacaccatagctaacctaacatatgctaccacgacggagcctaacataaggcatcgaccaaaattgccatagaggcgacacagcaacctacacatgttatcgttgccgagcttgccacccaatcaacacagcagcttcgacttcactgcgatgctacctcaaagctaaaatgaacaaacaaaattgacactgacgaagcacatcagcccaaactaccaaggagccacttcctacacatagctagcatcaacaaccctataaggagattgcagtgtatcatcgttgctgagcttcatcgcacccgtacagtgaagcagctccgactctacccaacagtaaccaaataaggatgatgaacacccgcagcagagcaagaaacgagaccaaggcggcgaaggcctcgtcaaacaccttaggcctatagagctttggaagtgttgcaggagtccaccaatggctaggttgcacacggaaggttcttgctgctagaaggatcgacgccaaaacgacgcctccaagaaagggaatgacgcctaaaggcatagtcgccgtcatgccggcccatggcctggcaaggttttcaccagcgattcccaatcaaagcccatacaaccgttgtgctcaacgaccgtcgctggaccaccacgccatcccttcagcacccaagcctagtcactgtgctgctggcccgagtgaccaagcgtgacccacgctaacacgcagaccacctccagccacagcctcacggcgccgcccatggccacgcgtcgctacggccagaacctcatgacgcggagtggaccacacgccgccgcctcgcatgctgtcaggacgggccaacgacaatgcgtcctagcccgcggcctcgccctcctccttcgcgaccatccagcgagcatgccgctccagccgccgctgggccgtggcacgaggtgaagcaaacaccggcaccgtcgcgggcacaagtggcgcgtgcgcgttggcggcgagcatttccgatagtttagtttaattaactaagtgattagtagataatgacggtaattaagatatgatttttttccgaaagattttttctactaactgattaaaaactttcaagttagatttgaaaacttttgaagtcaaattttaaaaactttcaaaactcaatttgaaaattttcaactcaaatttgaaaactttcaactcgagatttgaaaactttcaagtacggatttgaaaaaatatgaaaactttcgactcagatttaaaaactttcaacttgagatttgaaaactttcgactccgattcaaaaactttcgactcagattcgaaaactttcgactccaatccgaaaactttcgactcagatttgaaaactttcaactcagattcaaaaactttcaactcagattcgaaaattttcaaatcgagatttgaatactttcaaatcagatttaaaattttcaagttaagatttaaactttcaactcaaaacattttgaaaaaaataagtgtgctaaagattaaaaaaggtaatcagaaaaaaccgaaaaaaattgcaaaagaaaaagaaaaaagcaaatcgtgaaaaaaaaaagaaaaaatgggctgatgggccggaggcccgagagcagctggcgcgcgcgccggtcccctaagtttaaggctatttatgacatgacaagtatcagtatggtttccgatgagaaatcaatttgatcaaggaaaaaaaaataaaatagcacccaaagctgctgagctctcggcgccgtgcccgtccaggggttcgctgttcatcaccattcaccaacacggactaagtcataatctctcatgtttgcattgatggagtccagatcgctgcatgcttgcgttcatggttgccttggattattattattttctttttaaaaaaaaaaactagtccagatcgtagtattcgatcgaatggaagacgactgtaggatatctggtgaataaacgcatggtgctgcgtttatgtcacactgaccatgtccaataataagatatttgggcacaaagtgtgtataaggtccgcgaattgtacagtgctgcgtacgttcatcacactcatcattttcaacaagatggtacgttgagcacagctcaaaatggcgccaagcatacaaatcgtttgctggtcaagtcttggttgcatctggcctttcttcgtagcaatgttcaacatatcgtacaggaatcatcaatcaatatccatggaaatccagctacttatctacgatcagcgtgtgtgttccgtccctttccttagttcccagtcccagtcagtcgtgataacgtgcagcctttcctctgctttttagcctctaggtatccacatcaggaatttcgacgccccctgtactgtagtcgtcgcaaatcaggagaggcgaatcgacagcctaaccgatgctgtaaatatagttgctatatggtggtgatgatgcatgactgttggcattcgatattacttccttcgtttcacaatgtgaatcgacagcctaaccgatgctgtaaatatagttgctatatggtggtgatgatgcatgactgttggcattcgatattacttccttcgtttcacaatgtgaatcgacagcctaaccgatgctgtaaatatagtgctatatggtggtgatgatgcatgactgttggcattcgatattacttccttcgtttcacattgtaactcattctagcatttcccacatttatatctagatagatatctatctctatctagattcattaacataaatataaatgtgggaaatgctataatgacttatattgtgaaacggaggaagtataaatcttcctgctgctgattgcattcttagtgaaagtgtcaattaggcctagaggggggctgaataggctaattcaaaaatcaattaaaagcggaagcagtaattttcagatatttccgaaattttcggatatatccgaaaattttcggagtcagcacaaatagcaaagtaaatcctagatctagttgcctacaacaataatatgctagtacaaacagcaactagacctatagcggctcaaacaagcaaagctagtggagagggaggaagtaaagtcaccaaagatgaagctcacgaggttgttcccgaagttcgaatccttgaggggattctactctccgttgaggagctcactaagagccgggtcttagctaaccctttcctcaagaggttgcactaagcactcctccttccactaagggtatctcttccgtttcggaggtgagatccgaccttcacaaacttctcccggccaaccacaagtagatcggtggctcgggagcgacacctagccgcctaggagtcctcaacctccaagaataacaaatgaagcaaagaactcccggagatgatgcaagtgctcacaaatcttcatgaagtcaatgacaagcactcacacaaactcgaatccacaactctcacacacacaccaaatccaaatcgaacacgggtgagagggaaaacaagaaagcaaggctcaaaagtgctagagagagagcaagccaagggcacaaatgattggaatggaaccagcagccctcacaagtgaggggagggggctatttatagccacagcccagattctgcccattatacacaataattgagattttcggatatcccgaaaggttttcggacatgtccgaaaattccagctcagcaccaatagcaaagtcaacgaaagatttttcagacattccgaaaaaaaatttcggataagtccgaaaattttcagcaccaaaacatcattctggatgttttcggaaaagtccaaaaatcactttcaaacaagtccgaaaatacacaaaagcgacttttgcctttactgaagttttttggaaactccgaaaatcaatttcggaaaagtccgaaaatgaacagaaccatatttgccttcacagtcattttcggaaagtccgaaaatgtctttcggatatatccgaaaatttccagaagcgaaatctggttctgtgcattttcggaaagtccgaaaatggctttcgaataactccgaaaatttccagaacaactcaatttgaggagaaacactttttaaaaattgattttgagcactttgatcactcctcatatatcaatgcatcatccctcttaatagtgcggcattcctattgactcaaacaaaaagaaaagttacaatataccatttgtcctatgccgcatcacatctcatcaacgtatttggcgggatatgcattattctaatttattgaggacataataaccttcacatttgcttaaataaaaatgtcagtcctctttaatcgtattgtaattaatcaccaaaatcattaggggcctagatacaattttagttaggttgttccaaaccaagatataatttttttaagcccctggggatcgggacaagaggtactatcatactcccttcgatgtgtctagatgaggtggccggcactggtcaccaattaatacagactttgcgtgggctagcactcctgccacagttagtccgcgctcttgtcacttgtgccaccaccacgtcagacgtaaactatgacagtgtgccacgttatgccacctaggacaaaaccgtcatataaatcatcgatagatttcacttacactggttttaacagtttcgggatgctctatatccggttttgtgattcaggtacggatgaaacttggctcatagttaaggtaccaaaagtgaacttttccataagtgcgtaagaaggtgttttgcatgcggttcagtttttatgcggcccaaggactcccactcgagcctcgtctaaaagcatcatgggctgataagtgaatataaaaggaaaaagtccaatttgactccctcaaatataggtagaaatctaattcgtatccctaaactgtaaaaccgggaacaacgtatcctccaatggttaaaaccgtgcaacatgactcccaggctgtattgacggtggtatctactgatctggcatccgcgtggcagcctagtcatcacaaaaaataacaaaataatgtgggtcccacatgtcatcctcccctccctcaccttccttctcttttccattctctcttccctacacagcagaggggcggcaacaggcggtgctatggctggaggtagaggagagggcagcggcgagaggcagcagggcaccgctcgacaaaggtgcccgtctcgcgcagatggaagtggggatctaggtggcaaggctgggtcaaagcgcgccggcgagagcattctagctaggacatgttgaggatggcctggcgcaagagcgtgcagatggcagtggagagctcgccgtggaggttgatggcgtggggcgtgacgacggccaccctcctgcaacgacatagcaagcaatgcgtggccacccacatgggtcaccgcgactcaccgccgacgctcaccatgtcgtagttcgagagacggtctacagtgaggtgtggttctcttcgctggagaagagcatcaagttgcggagctccacaaggccaccgccaccgtcgtcgtcgcctggggactcagctattgaggtggatggctctagtgaaggtgtaggcgcggtaggtctggctcggcgcggatggtgagggagcgcagagaaggtggaggcagtcgaggagagcatgtggggaggaggcgggagtggccgaggagagcgcgtgggaggaggcggtggtgattcttgaccactccactccctaccagccctgccggccccgtgaacagtgacgatactcttgtcggcggggcggtgccgctcttttcggacacagatcttgctcacgccgctagtgcttgtcgctcgtccggcacgccctgtcgccgcttcccattatcatccgcacgggccattgctgtggagaagaagggaaggaagggctgaagggggaagaggaaggggagagagaggaggaagaagaggcgaggatgacaagtggggcccacatgctaagtcagcctattagactaggtcaacgagccatgtcagcataggatcaacatatttgatattatttattatatatatattgagggatacggattcgattggacttatatttgacggagtcagagtgaacttattaaaaaaaaaaaaagggaccacccgtggattggaccccaatctcgcctcttactcggcccaatcaaacaaggtccctggagctcgagaccggagcattttatcccctccgtacgaaggaattcgccggcggcgagcgcgagcgcagtggtcagtcgagtgatccacccgacatcggaatccaccggcgcttccccacgcttgcgccgcagccacctcgtccactccacacttgcctccgcgccacctctgcctcttcttggttccgcctcaagaaacaaccctaagccgccggcaaatcgccggccgtttcctttgaggtatatacgtcgcctccacatcctcttcttggttgagatgaccgagtaagaaggccgcgtattagttagagagatcctgttgggaatagtcccacattgctaatctagggggagttgaaccaacttaaaagtggggggagcccctcacctcttagagctagcttttggggtgtaacaaggctttctcctggttttgggccaacagatccaagaaaaatcgctcaaccatatgatgggtttactaaggtgcctgtgcatccaaatatgtcattccaacagatcctgttaaagttagttcgctttgtttgtacacttgtttgcaccggcaatttcagattttaattcatatataattgcagacatttgtggaacattggtttatttaaccagcattagaattgagatatgtagattgttacattacttcaaattttctgcctacagagtacagattcaaaagtttgtctatgctaactgatttggaggcaagtaattaaataagttactatgttcattaatgttttgtagatgaataaataaataaataggttattttcttgcttgttcttatttgtttatctcattatctgcgaagataagtaggcaaactggaaacacattcagcaaaaggtttagcatttcattactgtctgtatgcttcgcagacattttgccatgatgtggttcattataatttccttaattttgaccagggatctggatacctgctgaaccttgagattacctaactagcactgctgcgtttctcaatggagcatctctcggaggaactaatcatcgagattctcaagaagattacaaggacaagcgaccttaattctctttccctggtgtcgaagcagctctacactatcgatgcagagcaaagggctgctatacgccttggttgtggacttgcaacagaagatttcttagcactttgttcccggtttcctaatttgctcaaagtagagatcgattactctggttcaacacctggtaatgggaaccatatcgacaaccaaggtctctttgttctttcatcttgttgtactttgcttaatgatattaccttaaccttctgctcaaaaatcaatgatgctggtattgtttgcctatcttactgcaagaagttgatatctctaaagcttaactccctaccagaagtaacttcaagtgggcttctcatgctattttttggttgcaaggccctatcttctctcttcattaatgattgcaagggaattgctggcagcactgagtggctggagtaccttggcactgatggatcattggaagaactcgtcgtcaacaattgccaggaaataagccagtatgactttttatagtttggtcgaggatggatgaagcttaagaaatttgagtttgaaaataaggaaagcttgtggaaacactttggccccagccatgactcctcgcacaatgctaactgtgtgtatagatatgatttgtgctgtcagaatttggaggacttaaggctggctcgagttataacagagccagaaggcccagaaactggactacgttttctgctgaggaagtgcaaggcgttagagagactatgcctggagtatgttaacggtgttattgacaaggacatgattgtgctatcccagagctgcaagaaccttaaaagcatctcactttggatgatacctggactctaccatgaacctgatggcatagttttcagaacggatcttacagatgaaagccttgaggctctaaccaacaactgtcctttgcttcaggatgttgagctcgcgtttacaggtgttgatcactgggagcctccagaaataggcttcatacaggagggacttgtgaagctcatgcattattgtccaatccgtactctcacactaaacggtgccctcttcttcaatgacaaggggatgaagggactctcatctgcaccattcatggagacactcagcctcgtcgattgcaaggagattactgattctggaatgtgcttccttgtgcagtacccatgcctgactgatctcaagctccagcattgtcctggtttgacagatgttggaatagctgagcttgtacatgcgcagaaattacagtctctggttgttgatggctgctgtaatatatctgaaaatgctgtgcagtgtgcagctagatcagtccagtactttgtcaactctgccggatcatgtgctgcccattttaaaagactgcattgattgaagctgttaattcgttgctgaccgcacaccatcggtggatatctcagatggagctgttgcttttgctgttaaaccatatcgtctctgtgatctgatttttcagttttcactgtcatttttgaacttgattttactttgccccttttgttcctgttattctctctaagcataagagcaactgagcaaaccatatgatgatgtactctgcaggcatctcatcactctgtgtccacagctaatgttcagaagagtagtctccagcgatcggaatttttcactttggcgtcaaacttgttggtatcctttgcatttatcgtggttttcaacttgttatagttttagttgcaaatatatctttcatcaaatttgggaatgcctgatcagttcttacacataaacaacatttggctggtactacgtgtaatgtgtaatcttatcctgagttgacccacactcctaagtgagcaaacacttttttacagcgtaacatgtgagcaaacgtgctgctgtaacagttgtgcttcaggttccttcttttttcgacttcttttttctattaaggccctgtttagttcttaaaacaaaaattttcacgctgtcacatcatatgtttggacacatacatggaatactaaatgtaggaaaaaaaatcaattacacaattgcgtgtaaattgcgagacaaatcttttaagcttaattgcgccatgatttgataatgtggtgctacagtaaacatttgctaatgatggattaattaggcttaataaattcgtctcgcagtttaatgacagaatctgtaatttgttttgttattagactatgcttaatacttcaaatgtgtgtccgtatatctaatatgacaaccaaacctaaaatttttccccaaccaaacaaggcctaaatggtagatgcgtacacccctacacacacattatcgctaatatgccacctaacacatgctaaaaaaacaaaaaccagcagcgcattcctgatttgactaaattcatgtgaaaagtccacttacatgtgtgtaatattcatgaattcaaggactttaaactctaatgcgtcgagtcatgaagctacgacttcaccacatctctgtgctttaccaggttcccgtattgcaggtattttgttcttttctttcaatcttatatgttagggggacctataaccccacgggtagttataggtcatgcccatgtactctctgcattccagaataagttgatctaatacggaatatgtcggatcaagatctggtgcagttgttactatgactgcaactttagcagttgcagtgcagccgatggatcaaaaatcaacggctcagatggaaggaaaatactgttcagaaaacactgtagcaaatctgtactatagcgattactgtagcatcgatggtgcaacaggatgacagagcgaatccgggcgttggctcatcgatccaacggctataacatgctccgactgctaaagttgcagtcgttactgctacaacaccatatctcaattcgaatatgtcatattatactctaatctatagtacttggattatgacctatgggacaattttttatgggaaaaaagtccgtgttacacctagaaatattttattagatcacttaaccctaaactattttggctgattttacctcttaaattgctaaacatgatttattttacagcttagtggcatgcccccatatagaagtcatattttaagatgaatttttaagtcataggtgacaacactaccaaagttccaaaattctaaaaatattgagatgtaaactataatgcatctatcaatcctatcaaatttcaatgcaaaaatacgatttacatagaataaaaaggagaaatttctttacagggtaccatgaactattttcaatagtccaagggtgtaaaatgaggcagcaaatagtctgtgggttaagtgatcagttaaaataatttgagaatgttaaatggacttttttttttacaaatttaacttatgtgaataacaggctttcacagattctaaccaaaaaaagaagttttcttgttctttcgaaaaaaaattggcataagtaaattttctacatttcattaaatttcaattttctttccaaaaaaaaaaacgacccaaaggtccaggaggccgaggcccaattacgcgacacaaacaacgcgagttttttttgtttttagatttttttttttttaatatttacagaaatattatagcgccgaaaaaatttgcaaaactagaccctgccgcccttcgcaagggcggcaagccgacgtggcacacggcgccgtgtgcgtcttgacggcgcgcacgggccgcggggagccgagggcttgccgccctctgcaagggcggcagcttcctctctgcacaacggctggaaaggactcctgtttttggaaaacgtaacagcgaagtgtaggaatgcgagtcccgaatataaacaacaacatattcagtttacaaccatatagtacaagaatgtaaagaaaaataaagagatgtctgctctactggccgtgactcgcgccgcgaccccgcttggtcctccgggcctgtgctcgcacgtggtcctgggagtacgtgaagcgatccggtgggacagcacgggtagcgcgagggtctgggagtggggtggagggcgactgctcctgcgtgtgcaccggcggtgcgcctccaagctgtgagggaccgataatgtccgggaagtcgaagtcactaatgtcgaagtgcgtggcggaagcccacccgtgctcggacgaagtcccggtaggaccctgccaagacgtgccgggcggctgtgacgaagtcccggcgtcctgccagaactgcgcagacagcgaggccgacacacctgcctgtgacgatgaccccgcagcctgccaggagtgggcgcccggcgtcgtcccaggctgagcgaagcctacacatcgacgacgcgacacttgtaagcttacacataaattgagtatcaattgattgatgatgtacaaatagaccttgaatatacgtacctccgaagggagggggtgtcggcgtaggaacgtgcgcagctggacgaggagcagtcggtcggggacgcacctgtggtgctgcgtctgcctgagcaacgtcggcagcacgacaggtcagcgcacggagaaccgagcgcatcgagtcccgtatccgcgtgtacgtcgacaggtgctcgtctgcccccacctcaatccccgcgcctaaccgttggatcgccgttgtagcatcaacgacgaccctgttgcactcaacggcctgcacggttaattacaacgtaaatattcgtagcctttgtccaacagaaaggatgatgagacgatggtgcgatgcaaggtactcaccgcacgagcgaagtcctggtcgcggtgcctggcgtagaggtctctggcgctcgcggcgtgggcctgttgctccgtcggagcgtaggtgactctagtacgggtgcgtggctgataccaacgtaggtacgcctcatacccctcctccgtgtgtggctctcccgcgtggtccacgacctcctcggtagcaagcaaccagtcgtcgagaaaaggccccaacttggcaggccagtgaccagctgagtgctgacccttgcgcgagtacctgcaaattaatgtattgtattagggcaaacgacaaacaaagcaaattattatggacagcccgatgttaatgcaacatattaaatcgtagtaaaacggcttaccggtgaacggcagccgtgacgcccgccggaaacgggactggaaaggactgacggaagccgaactgccgcatcacgcggtaaggtgcgtgcggctcgacacagatgtcgaacaccatcggaaccgtagtcatccagtacgcctggtccctcgtgcagagtgtggacaggcctagcggcgcccgactgtgggtaagcaaggcactgtagggctcccacactacgtccgtcggcagaaggcggtcgaactccatcacaaactccgcgtacgaccgcctaacctgcacgtgagcccatcggcgctgcaatacaataaggtcagtgtgacgtaggatgaagttaacaatagtaggacaacattaccaaatactagcgacgtacctgacgccggcaccacagagtacccatcgttgggtagtcgaccgccggtctgttctcgtacagcgacgcgtcgtaagggtggtgctccacaagggggcggccgatcgcaatcctctcagccgcccaaagagaaatgaagagagggcacccaccgaagatcgcgccagggtccgtcctggtacaagcctcgcagaggccacggtactgagccgccagcaacgcggagccccaactccactgaggcacctcaccgaccgcggcgtcggcgatgctcctggcgtagtgcacgagaccccggtcgaccgagtgtccgtgactaccacagaacatcacccacccaaaaagccacaacaagtacgcctccaaacaacggctgaaggagtactcgtcggcctcctccggtagctggtcaacctgcaagcgttggatgaaatgttaggcactttacaagttacgtacataatacacgtcagtttaggtagaaagaacttacagtgaactgaagcagccacctcttcgtaggcccggtgttgcggtgctgctgcaacggctcgagcggtagacctggtaggcgctgcacgggtgcgaaacgtgccgtcagctcgtccttccagtcgacacccatgtcaactggcccgacagcgtctcccgcgagcggtagccccaacaagtaagagacatcctgcagggtaggggctacctcaccgcacggcaggtgaaaagtgtgcgtctccggcctccaccggtcgaccaacgctgctaggagggacctgtccgggtcccaacgtctcgtcacgtcgtcgtcgccggtcgcggcctcaactagccgagccaacggtaagagaccggcctcacgcaacctgcgaaagcgaaataataccagacgttaaaatgaacacattgctaagccccctccaccgtagtaaggtaagcccggtgtcgtgaacacagtaaaaccatacctctcgacgaaggagtcgtgaaccaaaagtcgctcacgtgacgaccgtggacggaacgtcccaagctgagccccctccaccgcagtaaggtacgaccggtggcgctgatctatcgccggatccaacaactcaggatgtgccatctctgcaagtaacgtgttacatgttagggtaaataagaaggtaataatataattgtaaaaacaagttatctgaaacggaagaatacttatagagacatgcaagagtgcagattattgagaacataactttcgttacacaaaggcacgtaacgagaatgaaataacataaaacaaaattacaagccgtaaaacataaagacattacatgcggaagtctaacaagtggttcgcaacacaacacaatgcgaacatatcgataagttcgaacgaaattacaagcaaagccttttgccaacatacaacacacgaactacaccacgtaaccggtcgttccacgtgaacgtctaggacggggtcgccttgaagtagtgccttcacccgtagggcgagctccatctgctgctgatcctgatagacctgcctccgccgcacttggtttttccttgtctttaggacaatacttgtaggtgtggccacgttcatcgcatttgctgcaccgcttcaccctgcctgcctccgactcatccatatcgttgcggatgcgccgagtcttcctccgtcccgccttgtctcggagtttcgttgggtcaggaatatagattatcagatcgttaatctttgtgaactccccagctacaccgaagccaaaaatctcgccactccatgtgtgatatattgcttgcttggagaagtattgtgacacatatactgcatcttggatgccacactcagatgccgcggaaatgacatgggtgcatggcctgtggagcagcgtcggctttctacaggagcagtgacatgtgccgtcgtctttgagaacgcactcctgctttactctcttgcggtagatacccctgcctgccttgtcttggcagagtacctcaaacctgtgttgttgggtaccttgcactagagctcgatgtttcatggcctttgcacgccactccgctagttttttctccatgaaagttccaaataaaatgttgttgttcggcatagagggaaaaactgcttggaaccgctccctgaaatacttgcatgtcccatgtaaaatgaactccactataccaactagtgggagtccacggacaccgcgcatcacccagttgtaaacttccgccaaatttgttgtcattataccatatctagcaccacctgtgtcataagtcttagcccatttctcttttggctcattctcaatccactgagaaaattttcgaatttgctccccagttcttctaaccaatgttacactgtctgttgggagagctccgagtgcttgaggagggtcaggtacagcggccgctggtcttgttgcacgctggtcactacatttgcctgtcaactcatctaatctcttccaaagctcattgaattttttctcctggttctgattgcatagcctcttgaacatgttcatcaactccttgttcttaaattgcttgaagaaattagctcccatatgacgcatgcaccacctgctttgtacatcttcccactggccagggtatcctctttccatagtcccaaactttaactcttctatcgctcgaagcataccggcgtgcctgtcatgtattagacacacattgggcctcataccaacaacttctgtcttaaccagatggaggaaccagtaccagctgtcggtgttctcgctctcgacaaaagcaaatgccaacggcaatacctgattgttcccatctaccccaattgccgttagtatctggccccgatacttcccggtcaaaaatgtgccatcaatacaaagaactggacgacagtgcacgaatgccatcttgcatgcatgtagagctaagaacgctctttgcagcacagtcttgccaggatgttcaattgaggggaatgtcttgagtgcacaagaggtcccagggtttctttgttggataacagatagcagacgtggcaaattgtcatatgaggcttcataagttccaaa

SEQ ID NO: 11872 - DNA, 20128 bp, Oryza sativa
  unsure (1)..(20128): unsure at all n locations
actttaattttcctctgatggagaaattattggtccactttttcattggatgtataatatgttagttagagataagagtcaaatataaattatagagataagatatatcctagagatagaatcctagagataagatagagtcctagagatagaatcctagagataaatctactcttacttgtattgtactctaagtctctatcccctatgtactcctatatataccccatgagatggtcgatgtaatagatcagaaaacatcagaatataacagtttagatttttccacatggtatcagagctgtagacaaacgtcgatcgatcctcggttccagctaggttccatccacgctgccccagggagatgagatcaatttctcactggggcaccgcaccgcatttgctagctagcatctccaatcatttacagattagtttactgcatatcattagatgcgttttccaataattagttttagatctattagctagccacagaaaaccatatgatcgtcaggagcaatgcggcaggtgttacaggagcagacaacgtcaacaagcatcataccatccggcctcgtccatggatcgatctgcatcggctacttcacaagaagcaagggcctgatgctgttcgtcgccaacatgtgcacacgcctgtgctgcacacctgcatcaagacaccggccgatcatctgtgacgtcttcgcggagtccaagtcaagccgccgagctctccaggacgatcgtcttcgccgattctacatcatcagtggtcttcatcaacttgccgctgccgactcgtccacatagatggacacctcgcgtcctctgatagattaatctgcaagacgcttcatcgacgacatcgaccgcatcctctacgacggcaacgaccgcgtcaccaacgacggcatcgatcacgtcatctacgacgacaacaactgcatcaactcggcatcactattatggtgaccactacacggcacaaaaggaacaaccaaaatggtggcctcatcgccaacgacgtcctctgacatatgcaagacgtctctaatggcatcatctgacatctacaaggtgcaagatgctaacaattgcagtttcgtcttcacaccatggtgtaattttttttttcgccttcggctatatgcggctacaccgacaaccacggctactacatgatcggctatatcgacgaatgtctacaacaagaatcatctacagaaactccagtccaagcgtccgtgtcatcgctatcgtccatgacactcccgctatgactgcgggagggaatagaggagagtcaagggacgacacagaaggggacgcaggcaccaggtggaggaccgtccatcagagatgcaatcgatgatagtgagtcgaaaaagatggagaaaaagatgaagaaatagaagattttaaatccagtcgcaatcgttcgcttcgctcccgttacgactgagggggaatgttagaagtataatatgttagttagagataagagtcaaatacaaattatagagataagatatatcctagagatagaatccaagagataagatagagtcctagagatagaatcctagagataaatctactcttacttgtattgtactccaagtctctatcccctatgtactcctatatataccccatgagagggtcgatgtaatagatcagaaaacatcagaatacaacagtttagatttttccacagtactatgttaggtttatttagttttgaccttgattgtttctccgcatatgtttttatgtgaatcatcatcaaagtcagatggtgagtcgaaaaaatgttgtggcgccgcctgtccacatgcatggaaaaagaaaaggaaaaccagcacaacaaatgaatgaatttttgtgtactgtaatgcaattcgtgactgtttatttttcatgattatactgtaacgcaacaaatgtgccccataatacatgcttaaatggaccaagaatacctgtaaatgtctaaccgcaccgaaattctattatattaaagtgcaccgcgagtgcacaagcgctactacagaaacgatttttctagacgagacactcgttgtattgcagacgggaccataaatgcccgcgtctgaaaaaatcgacctccatttccacatacgacaccttaaaaggccctcttgcgaaaatcgacttttgcatgcggaccctgtttttaccctgttccgtcttccatctaaccctgtttttaccctgttagaccctcttccgtctaaccctgtttccactacaccattaagatttggtttaaaagaatgaaataattataattaaatttcataatgccaaaatatccttcaggaaaccatatccatcccaaaccctatccacatatgtatctctctctctcctgctggcgagttgcggcaccggcgcttggtgtcttaagggaggaaggggatggtgccggcaggaagcgcgcggaggggatccgcaccggtgcccgcttgtggacgcaggggtggcggcggcgggaagcgtgtggaggcgatccaggccggcgcacgctagtgaagggaaggaacggcggcggtgagaaacggacggagggttccgtgcctgcgtcagatcacgaaggaagggagcagcagcgccgagcctcttcgacggcggtggcagcgccggcgcgtggtgaagctgcgcgcacagtcgggtgaggcggcgtcggcgtcggagaaggtagggaagggagccgtgctggagggaagaagcggcgccgccggcgcacggaggacggaaggaggcagcatcggcgccggcgcaggcatgtggaaagagggaaaagacggcggtggcgataggcatgcggaaggagggaggaggccgcggcgccagcaggatgaggaggcaccgccggcatgcacgaaggaaggaaggcggcaagcccgccgatggagctgtgacggctagatccggggagggaggggcgaccacagggcggttttccacagctgctggccggtgccggctcaccctctagacgctcgccgcattctccctgcgagtggagctgtggaggagagcagaagagagaaaagagaaaagagtagaagacgagaagagagaattgatgggtgggtcccacatataatagggtcgaatgattaagggaagaagcaacattttgtgcttcagtcaacgtcattagatgcccttaacagaatagggcataccatatcttcggatttgataagaagggccaaataagcaaagttgataaaaaagggtcaaattgatagttagctttcaaaagagggtcaaatgcgcaattgccccttaaaaaaagtcccatggtaaattgctggtgttatattgaagataaggactgaagagtatagcgaaaccatacaattcgcggttaattagggggcaaatcagaatgagaccacaaaatttagaaactaacaccgtagtcagcttaacactactaaacaatagttttttttttctgatgaccaaaatcaatcttggatgacggctagactaaaccacctacgaccaaaggccagagaaaatacactatctgcatatgcgggcttcatctgcgataaaaaatctatttttactggcagcaaggttaagtggaccgtcaaaaaaaattgacttttgcaggcggcaacattaagccaaccaccaacgaaaatgattttctaggaaaaataaataaattcccaaaaataactccaccgaatccaccgctcgcaacccgcactcgacctcctgccaccagtggcctgtttgaccccggcacccacaacccacgctcgagttcccatcgatggtggcccacacaaccccacctcccacaatgtgcactggagatctgccgccggtgccccgcgcaaccccgcgcatctgtggccccatgctcgagatccgctgtcagtaacccactatcgagatccgccaccagaggcctgcgcaacctggccatttgtggttcgtgcttgaaatccgccgccggtggcccgtgcgaccccaccacccgtagtcgctgtccgttcgcgtgacgccgtgagagaaaagatatggttaaggtcacttagtcctgccaggatctgcccgcccggcgctgccctgagttaggaaaggaggaaaggagggaggagggatcgagagggagtgagagaggagagggatgagaggctgaggataagacatatacaattgggaggaggaccatgtcttttatgtaggctgaaatttattttttatgtcggctcattgagaactgcttacgaaaatctatttttactaaggcaaattttactataggacgccgtgacttcatggatttagctgtaggacactatcagggttacgaataagatataccctctatccttggatgtacgttgtatactgatacggtatacccgcgcgtgtacggatagtttccgtatatattaaggaaatctatcacgtgatagggatggtatctacagatgaaaggagttctactcggacaagactgggtcaccatatcgtgaggggtccgatatcttcgagtcctacttggagatcaactgacccgcggtatataagggacccctgggcaggaccgaaggcatcgaatattaccgccaacacacccaccacagcctacggagtcggagcgtgcaggagccaagtcgccgggagatctagtcggaccaacttgactatgatctcgtcgatatcatcgagttctgctattctctttgtaatctgtggtttccatcatataattccataccaattggattatggctattacctaccaaggggcctgaaccagtataatccttatcttctatttgcttgatgtcgtactacgtcgatcctcgtaccaacggatcccaatacctttttatccggtctacgggtatcccccgtcgacagacacccttatcttctgtttgcttgatgtcatactacatcgatcctcgtaccaacggatcccaataccctctttatccggtctacgggtatcccccgtcgacagacacccttatcttctgtttgcttgatgtcatactacgtcgatcctcgtaccaacggatcccaataccctctttatccggtgcacatgtcagatcctcggcccacatgtcagatctccccttcccaatttcgagctcacgcgacaagtccgaccaccgcggcgatggatttctccggcggcgacggcgcaacattgtcggacttgtaccagagcacgcggcggctgctactccgcccgcgatgatgtggcccgcgtcaagcgcctcgcatcggtgcccacctcgtcctcctacttggcgctgatgaggacgtgcagcgggtggtgcccacctcgtcaaactattctaagtttaactaagtttataaataactacacaccaaattatttcattaaatcaataattaaatatatttttataatatatttgtcttgtgttgggaatgttattaattactttttgtacaaactaggttaaacttggagaagtttatctttgaccaaagtcaaagcgacttataatatgaaacggatggtgtagtatatatacattactagcaagactagtgcagtggcattatggaaaaaggttattgcatatttataaagtacaagatggagaaagtactttaaagcccaaacaaattaatgtattgtcgatcaatcatcacttgcattataaatctactcactagtagctttcaagaaagacttagggtaatcgtaattttaaaattctagctatgatgagattagaaggaattttaccttggcaaccatcctgtcgataaggatttccttggtacccgtttgtgcaattgcatatatagcctggtccattggaggaattgaagcactcgctcttgtcacttttacacgcgtataacgtgagatttttttgtgcttcgtcacagttgttcacagttcggatagcccaatccagtagcattggcgcccggccgccgtaggaggtgttaaactccggcgaagtcaagtagcttgttgagaacttgaagtcggacgaatccatgagcacagcgtaactgcatagggtggcgttgtagatcgagtccgacgtgttgaaggcttggtcgaagaagacctggtaataagggaggcccttggggatggttgtctggcagcagcctaccccagagcaggtaccgttggtggcgctcgtcacgtcacctcgccggcaggcggacacgcacccgctcatgagcttgcccacgttgtccttatcggcaatatatgccagtgttcggcacccgatgacggtgaacttgttgccggtgtcggacaacatgaacggagtgtccaagtcactctgaaatgtatttggttccatcaacttagatgcaggattgtagcagaaagaagatatcttattcagcacccggagctgactgagctgaagggagatgttgacgacctcgaaatctccgaggaacggcctggagttcttgcaggctagctcaaatccaggcatggcgcagcggcctgggccgatgctgaatgggtaagggatgtccacgctgccgcacttggtgtccgggcattccgccactgcaccgccggtgatgaggccgagctccaaagaagcgaacgctatggcgagccatagcattgttcgccctctatggcaagcaggcatggttaatttctttctggtggtgtacttttcttttttgcgaggtgattgcctagttgtgtgcacctcatacagttcgacgactgctcgtatatatatgaaggcaagcgtagccgctagcatccatgaatcatcttggatgtgtcgttcaccacaaaagtacaataaaacaaaaagatccaacgattcgtaccaagtcttcgcatgtactatatatttccgcaaaggtcgctataatgggttgacccgaaatctttatgaatgcccccttgctctctttgcccatggaaatattccaataatgttcagaaattggttaattatcgggttagacatggacatatagaacgacatttctgaacaatatggccatgtctaaatgacatgacgttttaacaaagaatcccacgtttagaccaaagcatcttattagagagcaagaaaaactacgggaggcaactcaacaagcatatggattaaaatttaacaagaggttgagtgtgacgtgaattttttatttatttcaacaactggcactactacataaacaattttcctaaaagaggcccacgttaggttgcaaatggatcataattgaccgcgtctgcagaaatcgacctccattttcgcatacggacatgtattgaaaaaaaaatcaattttcgtatatgggcgtcttaacaggcccgcacgcgaaagtaatatattttcgcaggcaggccacttaagagacccatgcctcttaaagacccgcctgcaagtctaatcttcctcctctttccctctcaatctattcaacaaaaagagaaaaatctcttctcccatctctctccattatcttctcctcacttcctcccctccactcattctaacctgctctcatcctcacttcccaacgacattcccggtgacagcgggggcagcgacggcgttggcaacggtcacgtgctcggggagcaacgtccgggagcagcgactgcgggctttggagaggccgggcctggccgggaaatgtgcggtgggctcaggaatggcagcgcgtgacagtaataggctcgggaagaagcggctgcgagcggccagatctgccgcctccagccccgcgacggccgtaatcggccgctgccgggccctcattggccagatccacgggcactagcccctgcgacggccggcaggcggatccgccgccactgggcacgtgatggccggatccgcgggcgctggccccgcaatggctcgatccgccaggattctaaggttttcttacttttaatttttttagaattttattttagtgcggacgacataagcacccacacgtagaaataggatttttacgtgcgggtgcgcagcccgcatgggaaaatgacattttttcagaccttatgttacaagcggatctccgttcacgcaaaaatgtgttttcgaccatatggaaaaacgacttctgtagtagtatgttggagcgcattttatatgattccgtttgatgtaaaaagaatgaagaaaatcttatacaagtgaattaattagggcaacgtaaatcttcgttagaacgagatattgttattttcattgcctttctcgagcgcactcctgactgcaaaattaagttatccatcgatttagcacacagataatttagacgccgctttttacttgcactcaaaatcaatacgtcatccacgaatagatgcacaattactttgatattaaagtcaccggtgaccatttccaggaagatgatccaacaaaattcttcgacggtctaagtcatctttgcatcaatcccacgatttttcaccatgtttatttaccacgcaaaaactttccactctatcacatcaaatgtttgtacatatgcatgaagtattaaatatagaaaaatactaattacacagatttcgtgtaaattgcgagacaaatcttttaagctaaattgctccatgctttgacaatgtggtgctacaataaatatttgcaaatgatgaattaattaagattaataaattcgtctcgcagtttacagacggaatctgtaatttgttttgttattagcctacgtttaatgctttaaatgtgtgtctatatatctgatgtgacatgctaaaacttttcacccctagatctaaacacagctttagtgcaaatcatctctttctgtaaatttacaatcactaaatcctaaaacttaacatacaaagatatcacattgtaatccactaacaatatgccacatcatcatccactaataattattaaatttaaatatcatgtaatccggctatattatttataggtttataatttataaaattttagagcttctaaattgcaaccacgttaaatcatcatcgcacataattcacacaaagaaaagtacaaattatcccctaaactattatggtcgatcgaattatcccccaactattgaaaccggacaaatatccccctgccataatccggagtggttttggttctacatggcaatccagtcagttaattttttattaaaaaaaatcaatgggtccatgtgtcatagtctctctcccctctaacttacttattccccttacacctctctgtatctctctcgggtcggaggctgtgaaggagccccgcgcactagcagaggccgagaatgagccgcgcgccggcggctgcaagcctgcgcagcgggggccggcctgtcaagctcactggtcgtgcctcgtcctcccgtgctcgtggaagcggcagctggcgctggactggcgtgaggaagatggaaagcggcagccccaatcggacttccacgggtagatgggcgatggtcgggggagagaggcgggcggcgctggcttgatcttcttcatcttgagcagcttcttgccgattagcgtcgacgcgaagctagtgcagcagctgctcggatagtggcaggacgaggggacacagcgtggtgatgttcatcttcagcgcgttgccggcgactgctatgaggtccttggacagcgagactcccgacgtgccatcgccatcctcctgctgtcgtcgccgcccttgtgagttctcaccgtgtgcaccagctcgtacttggatctcttcttcttcgatcgcttgttggacagcaggatcgccacgctgcccatccggaagagacagttggcgacttcgatggagagcaggccggcgctgcagcctgcagcccatcctgtcctggttgtagctggtgatgttgccctggatcgaacttgtagtggttcacagctatggcgaacagggacgacgtcgggttgaacacaggctgcagttgacgacgagtacgccaatgtccttggcgctcacgcctgtctggtgcagaagacggcgccgaacatgatggcctcggcctcgatcgagccacacctctgccatgcaagggttcgatggctcgatgagcacggcgatgaagctatgctgaggagggcgcgtctcaacactgcaacaacaagtgaaggtggaccacgggcggcagcactgcagtccgaggtggcaacgaaatggcaacccgaagcttgatggtgtagcgcatgctcgatgacgatcggttacagaagtcattgtagccgagaacttgaacggatgatcaagccaaagttgcgtggggctagacgacaaagaggaaaccggagtcgatgctgaagtcggagacacacagatgtcaacgaggcggtgggagacgcaaacccaatctttgatcgggaaaaaaaaaaggtgatacatgcagaagcagccgcaaacagtatggcagtgcctaacttttttttttttttgagaactcatgcactttattaaaagaaagcgttttagaaacacaaagcatgagttacattaactgctccattaggagtgaaggaaagagctcttttagtaggacaaacatctctggaacaaatgtgagaaatattagagcaatcaaaagctaagcagctgttagtctgagcttgtcttgctgactttgcaaggccatctgcaactttgttgagctctctagagatccaaatgattcgaacttgttgatcctgcagaaaatttttaattcttgaaagaattggtctcagagaccaatgtccggggttttgtatgtagtcctcgttctgcacagcattcactatctcactgttatctgagagaaaaatagggtcttgcagctgaagatgacgagcaatttgcatagctaaaaataatccttcagcttctgctagcaaaggagttcctgcattgagactttgagctttgatgacaatagcattgtgattgctagggttgtggatgaagatccctactcctgttttctcttccgtccaagaggcatccacataaactcttgtccctgcaggaattttaacaacagaatttcttatattattctcttcagcccgattgaagtcttggcaactgtcttcttccatttgatgaacactttcatatgtctttgccattgcctgcgcagcattgcacacttgttgtggctcccaaatctttgttttgaagttgatatcattccttgctttccaaatctgccaaagcataattaaaagattgtatatattgatgccattagctgaaagataggcaataatatcttgaacagagcctagagaagaaagattatcagctttgagattaaagtcagagatgaaccaacataaacgactgaaattacagagaaagaagagatgcaagtcatcctccctttgaccacaggtccgacaattgggactaacggttttgatcctgtggtgcattctttgagcagttgggagagcattactcagcagcctccatccaaaagttttgactctgggaggcatgtacctgtgttttcagattaatttcaaaagattttttgttaaattactgacctgattttgattggggtacatttcattgtaaattgtcttgtaagcactcttagctgaacaaactcctgagggtgtgtacttccagcaaagcctatcttcctcctctccctgcataatctgaacctgcataattgaatgttgagctgcactataaaaaatttgagttattttctgagcatcccaattcttattctcatcccaaagatcagaaaccttatcaggcatgtgaaaaggaagattatcaagattaagatgatcatgaatgttttttcaaatagagcaccagggttggctccaaatagaaatatcacctttagaaagttgccacactgaagcttcctccaagacatcccttacctgaagaatagaagaccagaaagcagattttggcatatctgttctagccttccaaaaggaagtgtttggaaaatattttgattttaggacagaggatagaagatcatttggattagtaagaattctctaggcagattggacaaggatacttttatttacagccatcaaatctcttatgcccaagcctccctcagaaacaggtttgcaaatgtctttccaagacctaagagccattccttttttgccaccatctgcttgaattcctgtccaccaaaatttccttataatagcagttagtttagcaatcaatttttttgagaaaagcatgatggacatgtaataaataggaatggaagcaaagacagatttaatgagggcaagcctacctgcatgagaaagagaattagctttgtaagtagtaagcttgcttttaaacttgtcgacaatgaaactgtaggcagcatttctgtcttttgccctcaccagaagaggatgccctagatgctttgtgctggagttcataagagaaacaggaaaaattgtaagaatattttgtcttacctcttcaggagtacttttgctgaacaggatggaagatttgccccaatttggagtctggcctgatctgagacaaaaggaattgattatttcagaggttttcctgacttcctcttgttgggcctgccccacaatgattagatcatctgcaaacatcagagaatgaatggaaggatcattttgtcctaactttattcctgaaatgtggttcctttgaattgcatctgcaagctggtcagaaagttcattaatcgcaaggacaaaaagataaggcgataaaggacaaccttgacgaatacctcgatgagctgaaaagtacccgtacgattgaccatttataacaacagaaaaattagcggagttgatgcaggaaagaacaagacgaacgaaattagcatgaaaccctttacgacaaagagcgtccgctatgaatctccattcaatcctgtcaaaagctttagacaagtctatttttaaaagaaaagctttttgattaaaagaggtgagattaaaagagtgagcaatttgctgagcaagcacaatattattagagatgcgtctccccttgacaaaagcctgctgagtgtcacaaataaggttaggaagtttattctgaatgtaattagccaaggacttagcaatgattttataagaaacattacaaaggctaatgggtctaaaatcagcaggggacttaggattagaatttttaggaacaagaacaatattagtagcattcatacctgattgaagcttacctgtttcatagaaggagcctaccatggcagtaacatcgtcttttatccaattccaggcagctctataaaatgcaacattgagaccatctggccctggggaggcatctcttcgcatttgctttagaatttccaggatgtcattttcagaagggatttcagggggaggaaaaattacatcattgtcattttgatccatagaaggagtggcatcatctgtattggagctttgaaagagattttcaaagtaagaagtgaagacagttgctatctcctcaggatcattaattattgaattattatggataacactagagattctgttctctctccttctcttctgggttgctttttgaaagaaagaagtgtttctgttacctttctggacccaatgcttcttacttctctgtttgtgataatcggccagcttctgcatggtaatatcatgttgttgcacaatccttttctcctcaaagtacaaatgttctctgtcgggggaactctgaattttcaacagatcttcttccaactgatccaattgctgctgaagaggtttcttctttttgctccaagaggttaaggatcttgctaacaaggttgttcttctctgaaaatgacagtttacagactgcagccaggctgaatgagcatgctgattaaaatctggttcaagcagccaccaattttcaaacatgaaagatcttttaggcctcctgttcttcggattgagaatggcaatgatgggagcatgatcactatacaacatgggcaagtgataaacagtggtatttggataatcaaaacaccattccacatttgcaagacatctgtccaacctttccaaaaccagatccttaccctgttgcttattggaccaagtgtaagctggaccattataacccatatccataagccccagattattgacatgatgcttaaaaatattaatacgattctgattaggaggggccaaaccatacttttcattagcatgcatgatctcattaaggtctcccatacaaaaggtaggtatgtgactactatgtacaacaaaagaggagatttcactccacatggcactagtggccctgtgactaggatcaccataaatacaaagaagattgaaaataggaccagagttcttatagactccataagctaagatataattaacactagactgaactatagtaagatccatgtcttcatcccacatcagccacagaccaccagaagcttgatcagcaggaaccacatgactattagctacatgaaaatgatggatcagatcagaagcagtgactttagagctttttgtttctgaaataaagattaccttagcattagtagagtatattaggcgttggaggtgttgcattttcctactgccgaggtgaccccccatacctcggcagttccagcttaaaagactcatggcgcccttgacgccttatgggctggcgccattgcccatccatcattctttccacttccatctccaccgtttccagcactgggatcaacaagctgaatctctgaaacattgcattccctaggatctgtagccagtatcagcctggagctagctccagcatcacttgcaccacccccttgagtatctccggcagcttgatcaacaaagatatcatgatgcacctccaaagcactccaagtatgcttcctgctatgaaaattgttaatgctttgaggggatcttggagcatctctttgaatgacatcagaatgagcagcagcaagaggtctccaagaagtggaggtcaccattccaccaccataacctcctctctgatcccatcttgtagctctctgcccacctcttctacttggaaccctgattggtgctgaatgatggttagttggagaagcacttcttgattcaatccctccatgttcttcacctcccacaatcgagaaggaagaggcagctgaagtagttggggagcaatggcgtttggtagattcatgggctgcttcatgaaaccctctcttcttacttaaatgttgtgaggctgtctcataaatcttggtagctcttgtgcttcttctgtgttgcacttcgttggtgccaatagcagggttaactaaactgttctgatgggcacttgcactgggtgaaactcggtgaaccaatggaacagactggactggttccatctgatgcaccttaccagcagtattgacattctttgagttgcagctgacatgatcctctatagtacttgaaaccagcttctttttctctgtacttccatgtaccaacatctcttcggtaccaacttctggtatactttgtatatcaggttctttgtcttttttctcacattgtttgcctgctgtggtagtgtgaacagcttgacttgggggcccttgaacagtgctgcagccagctaaagtcaaagctttctcactcgcttttttccaatctagcttgggcattaatgactggctggtcccacttcctctctcttgctgcttctgctgttcttgaatgttcttgaattgaggagaagaaaaatgttgcctgaatttttccacaattgaatttttgttggattcctccatatccaaaaatgcctctgatggcatataatcgatctgagtgatccactttcccagtttatccttaagatcttcctcgaatgcatctggaaattgaatgataattctttgtctttgaggacagacctgaacattatggaagaggagaccacaaaaagtacatattctgggagttctttcataatgcagaaaagctttaagttcagatttatcaggaagctccaagataacatgatcaggaactggtttttccacatcaatcctgattctaacacaaacaaatttctgattcctcagcaaactatctggatctattggttcagcttttgagatttgacctatgttttcagcagccaacttgacattcttaacatttctaagacttgggggaatgccatagatacgcacattaaccataagatgcttgaaagtgtaagctgacataggtttaattttctcatccaaagaaacccattcaagcagaaaaacatcactgccaaaagaccacggttgcttttgccaaacccaggacagatcttcataattacgaaaatgagccataaagagattgctttctacctgagagatgtcaagataaactctttgccaagcttttgccattgatttcttcaaagcctccaaagggatctgcctctgctggcctccagaatgtccaaccttcatgaggaggttgtgagtggtttgaactgttgccgtttcaggagactgttgcaacctcactctgatctcctttgttggtgtgattgtcatcgcttccagagaggtggcaatctctggaagttgagagtggactacttcatgctcatcctccaggggtggatccccatccagatccatgaccccctacgaacgccaaagcagaacaaaacaggaaggggaagaagaaggtaaggaagagggattgaacgagggaatgtggaatagaatgtggatgaggaggactaggttagcattgaagaggaaagagggaaattgaagaagatgggaatagggcagcaaagggctgactacagtatacactgacttaggtggtgtttagatccagggacttaactttagtccttgtctttagacactaatttagagtattaaatatagactacttacaaaactaattacataaataaaagctaattcacgagacaaattttttaagcctaattaatctataattagagaatgtttactgtagcatcacataggctaatcatggattaattaggctcattagattcgtctcgtaaattagtccaagattatggatgggttttattaatagtctacgtttaatatttataattaattttcaaatatccgatgtgatagggacttaaaagttttagtcccatctaaacagggccttacggcatagagccgaccctcgttagcgcagtgcctaacttcaatggtgcaaagaccaagtagccgagcaggttttcaatttcgaaattggtttttttctggggtggaccaaaatttcagaaattttttggctgaaattatttaaatgttttactgattttgaatgaatttaaataaaatttgaccaaattcataaaaatttaaaaaacccgaaattttcggatgagatatgagcttgccggtcatggacgaaattaccgaaatttcggaaatctcgaaacaaaatttcaaaaccctggagccgaggcggttggtccatggtggccatccccacgctgcggcggagtccagatggcgcctgccgcttcccgagagggggaatggaggaggtggtggctagggcgaaacgactagcacgcccccacctatgtctcgctgttccgggccgtcgcgctccacgcccggaacggccattgctattccctatcgcttccgcgtctattgattgcgtcgccgacgcgcggcgggtcatcctgttcgacgagttcagcttcaggcctggcggcgtctcggccgtgtccgtccacgggtgtcatggcggatggccgaggcccgagaggccgaagctccaggccgccgaccctggcctaatggggttcatcctcatctcaaactccctcttctttcagatcaacaaacgagtccgactacgctgaggccaccggcggcgccttctgcccgctcaccatcgacgatcggcatggcgctgccggaggccaacattgcgcagttcagctcatgcttcgccggtggactgaagcagctgtgacgaacagcttgttgcatttcctgcttcttactgctacgaattgttgcagagttcagaatttgttcagtttaggtgcttctgtaatgctagcggttggattgcaatcgttgatcaatcacataagcgattgcaaatttgcaattgtcaatcaatgaaaaagtcagataagctgtaaacttttctacatttttttcagagatggggcagaataaggcctgcttcgatcagcttctgttataaaaagaaaacactgaatattcggttgtatactgcatttcttcttagtaaatgcacttttctaaagaatcttgctcgcgcctcttgcagaagacggaaggggagaggaagagaaagaaagagagaaaggatagagggggagaaaaagaaagacagagaggatgatatgtaggccccatattttttttttgcgaatgataaatgggtcctatatatatgtttttaattctactaccacctaaacgtcacagacaagtcaatactgtcatgtagatgtcacgtcagcgaaaccgtcctctggagggttgagatatccagtattgcggtttaaggattcgaaatagatttggtcacaagttaagggagtcattgtaaacatatttcaaagaataaagacaccataggtcccgggcccaacagaggcccaggacgcgagggttttatcactctccgttgccggagtccggtgagaaaaggaaagaactcgccgtcgccgaccgcgggcgaggtggccggcgtcccctcgagcggcgctctcctccacctccgcggcacatccatctttttccacgaccgcctccgccgcgccctcctattctccccggcgatggcgccgcctcttcttggttcttcagccaccctcaaccccggccactggttcctcggaggtatatacgcatatatgtctcgtctctgctcctctaccctgatctttcagttcttgtttaggaactcgagaatcgagatgaccgaggaagaagccagtgcattctgaaacaaaaaaaaacccctctaatctttggttcagttgcatatggtggctttacttgggcgccttcggttccanatatgttagtccattaaattcttgttgcaatttattggatgcttctgttatatctagtttacttgtttctaaaaccttggattactcaattccctaatcaattagtacagtttattttcccaaatataccagtttcaggttttagtttgtataaaatgtaggtgcattttattaattgatttgtggaatacttacctgttcttttgaacaagcaaatccaagattttaattcgtttatagctgcaaatcctttcgttttcaattggtactgtaaatcatacatagtttgttcgactaattcggttctaggtttgaaaagttgctctatgttaactgattttcagagtttctaccttaattaatcatttcgtggatgaatagataggttacttctttaaatcgaatcgtgaagcacaaacacgtacagcaaaatgcaaaaagttttaaatttcatcagtataaatatggcacattaattttccatcctgtattcatgtgattcattacgatttcatcaattttaatccagggctctggacacctgctaccctttgaaattacataactagcattgctgcatttctcaatggatcatctctcggaggaactgatcataaatattctcaagaggattgcaaggacaaacaatctgaattctctttcccttgtgtcgaagcagctctacaacattgatgcggagcaaagggccactaatttgtgttggtagtggacttgcaattgaagctttaccagcacttttttcccaattccccaatttacacaaagtagagatcaattactctggttgggcacctggcaatgggagtcagatcgacaaccaaggtctccgtgtgctttcattctcactgcccttgctcaatgatctcaccttaagcttctgctctgaaatcaatgactctggtcttgcttgcctgactaattgcaagatgttgatgtccctaaaactgaactccacaccagaaataacttcaagggggcttctctctttagctgtt

SEQ ID NO: 11873 - DNA, 13170 bp, Oryza sativa
ttttgctgatgcacgtgtaatacacgtgctacatcacaggtctcatttccgatggcccaatccacaagcagcggcgctcgcccacggtaatgatcattgaacgatgaagaagtagggtagttcttagagaagttgaagctggatgcctccatgagtgccgcatagctgcaacggctcatgttgttgatctccgtcgtgttgaagcccgagtcaaacatgaccccatagtactgtagccccttggggatggctgtctggcagcaacctatcccggagcagacaccgtctgggagcctcaagaggtcgtctgccttgcatgtggccacacacccggttgttaacacatcgtctgctaagaggtaagcgagcgttcgacacccgatggccgtgaacttgttgccgaagtcggataatctaaatggtgtgcccgttaagtttagcgaccagcccgtaccgttcatcccgccagaagtactattgtagcaatagttagctatgtgcatcctcattcgtacctgaccttctgtcagcgagatgttaagcagctccacgtctttgtaatacggcttgccatctcctttgatgttgcaggtgaggttgaagccgggcagggcgcaggcaggatccaggccgaacgggtaagggatctctaccccgccgcagcttctcacgcaggtggctgcagaggcggccgagcaatatgccgcgatccctccgcagagccatagtagtgaagctagcatgtggaatggcatggatgatttgtgaatcttctattcttccacgctgttgttctgggtaagtttcttcggaacctatagctagctaaatatatatgagtcggcgattctaaataattcataagtccaattagctagagcttagctcgatctttcataaagacgcgcgtaggaaacgagagatcaagctacgtacaaccgtgtgatgctttgacttggacctgttctacttctaggcttctaggtaggtctatgcatgccctcgcgtaattctacaggtctatgcagagaagtatttcttactagataactgattactaattcaaagtttctaacttggcaatttcctattaattagctagtggagtactcaacaaataatttttcaaaggcacgtgtcaataatttttatgataaatatgcatagtctatcattttgcaaggatttctgatttcttccataaataaatactatgaaataacatgtctcacatcaaacaattattcattgtgcattttacaaatgtgctaaagcaatgtaaaaaagagggggggggggattttatgtttctctataattatgacatcgatggaataaagaaagagatatctgtattgttcgatctcgatggctccagacaaagaacggttgagatttatttgttgtggagaaactataaaaatattcataagaaaattcaaataagtccaaacaatctaatttcaaactttgatagagtgtccaatctatcaacaagacaaatctaaaacctcagaatattccctcttatggatgttaatcggatcgagaaaataagtaaggtatacaccgtttgatatattgcgattggttcaaagctccatttgcatatttaattagattcaaagtataatgtcttgtggaatcaatcaaactccatgtggaaccggtaaatcaaaagggccctcataaaaaaggtaaacaaagaatgctacatttttatttatttttaatttaaacatgggaggagccgcttcctgttggctgatctctgttaattaggcgcccggccgctgctcaccgtggcaaagtaatatacgtgatcaggtctactcgttttctaaattcctctgtctctctacatacttgcctccgtcctaaaataagtgcagtcgtcgaaatccgtgtccaacgtttgaccgtccgtcttatttgaaaaatttataaattttttttaaaaaattagtcacacataaagtactattcatgttttatcatctaataacaataaaaataataatcataaaaaattttcaaataagacgaacggtcaaacgttgaaaatgaatagtgtaaaactgcacttattttcggacggagatagtattatatatgattctcagtgacaagagacacgatactatttcgtttctctgccaaccaaatatacatcgtcgccgtaactcgaaaatgttaaagaagacccgcggagcttgctttggagtttggatacaccacccttaattttcatcgatctgtgcatgcgcatggttaattccctgcgagctgagcctgtattcatctagagtttgttgctgttgcttcagaataattacaaaaatggccttttgaacttgtctcatcattgctgcttctaaaaaactgtccgtgtttttttggttgctaccggatcatgagaaaaaccggaagtacagccggccgaagcatgtaccagaccacccaagttaacgcgaaattaatggctgtgtccctgtgtcctcaaactcgcactatctctcacgttccctcgtctcgttctcacctgtcaaacgccgactctctctcagcgattgatgaaccagaacaaaaattactcaaaatcctctaatttttaattaataagaactaaaacaacttaaaaatagataagttaccaggtatccgtagacaccgggaaggtacacataggaatgccactccgacagctgttccgaatgtccgccgtgtgacgctggtgatgccccctatcgagcgacgccatgtcgtcctggtatcaaataccggctccgtttcatattataaataatcgtttaactttttttaggtaaaatttcttaaagtttgatcaaatttatagaaaaatataatagcatttttaatacaaaacaaacatatctctactagtataaaaattgaagctgtttctgcagtccgtcatctgtgtttgagtcggttagaaaaattgaagatgtttctgcggttcgtcattcgtctttgagttggttttaattttatattttggttttaatctatatctcttctttatttctactattataaaaattgaagttatttttgccggtgttttggtacaccactgtgtatgaggcggtttttaaattcgttcacttttggaaatatatatccgtatttgagttgtttattaagttcgtttgcttctcgaaatacatatctggatttgagtcgtttattaagttcgtttgcttttggaaatatagaagagtcgtacaggaaatctctttaaaaaaaactcacatgctaacttgacgatcggacactaattacagctcatgattttaagcgaactccccgaataaaattcaccttaattaaactatataacaataataatactaaaatagccttcacccgtcgcaacgcacggacattttttctagtctctaatgttgtaaaaattgaagatgtttttaccggtatttcagtacatcatccgtgtatgagtcagttattacgtccatttgcttttggaaatacatattagtatttgagtcattttttgaatatttgagtcatttttaagatcgttcacttttggtaacacagaagaaatcatataaaaaatctgtttaaaaaaactcacatgctaacttgagacgatcgaactcctaactgcagctcatgattttttaaaaatatatatccaagcgaactcttacagtaaatttcatcttaactaaaccatataacaataataagattaaaattaacttcacccgttgcaacgcacgtgcattttttctagtattataaaaactaaagatgtttttgccggtattttggtacgtcatccgtgtatgagttggtttttaagttcgatttcttttagaaatacatattcatatttgagtcggtttttaagaccattcacttttggtaatatagaaggaatcatataggaaatctgtttaaaaacactcgcatgctaacttcagacgatcggactcctaactgcagctcataattttctaaatttatatatatccaagcgaactcccacagtgaatttcattttaacttaaccatataacaataataagattaaaatagacttcacccattgcaacgcacgggcattttttctagttatgaaaatatactaggttagattcagtggtggatctaggaatacttttgagcctgggcaagtctaacaacgaaaaacaagtatacataaatcaatacaaatatgtataccttttatcatatacgtatgtaaaattgacggtcatcgagttctaatttaggataggaaatctagtgtacgagaatatatcaaagagacgatggatatataggttagactatggagtttgtactatcttattgaaagaaaaaagactgataccagaaagttatataattttgcctttagatctcagttgtgatggtgtgaaattgaattaattatcttgaaagtaataggcatttagttaagcatggtaatcaaccactttatacctactattgtatgcagattagctggtgactaaacagcgtaactaagtgcggataaactgctgcatagtggtagagcccgggcacttgcccgcgctggccgggccctagctccgccactgacttagatttaatgacactaatttcatattttagatgttgttcaattttactataaacttgatcaaatttaacaagattcgactatgaaaaaattcaaacgtaagcgtacacactaccagaggttcctgcaacctgatcgaggtggtgcatttttttcaccggctctggctcggtttgggcttgcaaattcccttcttggagctaatcgctatccgatgcatcgtcaggcccaacaaggccattcaacgttgagtgcaaagtgggcctcaatcacgcctgttcaccgtcctaataagtctcaatctaagtgggtagtggggtaactgacactttcaatatgagaaaaggcattgtgagtgtaagatgttagacaaaactaaccgtgtaaacagatgtgtgacattgcgtgattaacactaagactactacagaacatcacataggtgccggttcatagttatcgattcatttaaaaccgacacttgttaaacgtttcccactttcacgggacaaataaaaagaaaccggtacctttgaggaaatataggtgctagagtattatatgtgtcaattctttaaaaactggcacctataaaacaaactgagccgatcgagctaagcccatccttttgacacaccttcaccgagtcacagtccacatccggccttatcctatctcgttgcactcgctcacatcgccatctcccacgccttcttcttccacatcaactccgccctcaactcggccgccccgagcacctgtgccaccccaagcacatcctcgcccttctcctcttctccatcctctctatcatcgccattgtcgtctttgttgctgcccccatcccctcctgcttgccccaactactcccagatggtggcacggatgaaaccatagtgttttcactccaactaactactcctagctagcggtgttccacagttgcggcggtggcgtccccaccccggtagctatgacgttcccacccgagcggcggtagcgcggtgtggatcaaggtgctcgatggcatccccacccaggctgtggtggcatggcacggatcgaggcacttagcagcagcacggtgcggattgaggcacacggtgatggcgcctggcagatgcttggtgcggagggacttctctatgacagtgggtgcatattttactctatggcgtgcaaatggactccattttgtttctgatatatttatcttgttctttccctttgatgcatgcaaataatatgtgtaatggattttaattgcagtgatgcaaaattcttcatttgtaccaaaatttgcgatattgaattttaattggagtgatggatggatggtgatatgtggatatgggatgggaagttactcgatgcattcgaaactcctaaatggcgatcgctcgctaggggcgatcgggtcgccctcctctcctccacctagttttctttttagcaccgcagtactttcctattttagtaaatttatacacctaaagtttgtacacctcaagtttacacatctaaagtttagagacccaaagtttataaatcaaaagtttatatatccgattcaaatttgaatttgaattcaaatattttttatatatagtatttctatacatttaaagtttatacacctaatgtttatagacccaaagtttataagtcaaaagtttagatacccgattcaaatttgaatttgaattatattcgattcaaatttgaatttgaattcaaatatattttatatatagtatttctatacacctatataagtcaaaagtttacatacctgattcaaatttgaatttgaattcaaatatttatatatatatatatgtagtatttctatacatttaaagtttatacacctaaagtttatagacccgaagtttataagtcaaaagattacatacccgattcaaatttgcatttgaattcaaatattaatttatagacccaaagtttataagtcaaaagtttacataaccatttcaaatttaaatttgaatttaaatatttttttatatatagtatttctatacattaatttttctaactttattttttattttttttaaaatttatggtgtagtaggaagagaagaaagggaggatcggagagaagtgtataggggggcatggggatcaatcactccaagcgatcgatcgcccattagccacgccccgatgcattggcttgatttgagccaatggatgcatcgagcctaaatcggtacctttgattcctcttcatcagtatcgcctgtagggtgctggctgggaaatccaacacacatgaagattttccaaccggcagccatctctgtttatgtatagtaggaacaaaatgtaagttctacaaaaacgacacctgtaggtcgacacacgacactcaatggcacaaccgctccaaacatggaagttgtcgacttatttagagggggaaaatggtaacatattgtcgatgagaagttcctctcatgtctgatgcaattctccaaggcagcagatggatgcgaatagagattatttggataaacgagaggatcaatgcgccagtcttaaagaaaacaagatatatttacgattacttcatattaactaggcacaccttgtgatacaacaaagttttcagagggacatactactacgtaacaaacataatctatagctactatataaatggagatacagtaagacaaatgttattggcatataaatagaagcactcgcaatggaacaacaaaacatgtagtaattgtgcggtcatctagcaaattctatgttcattgaggccaccctctcaaggtcgtaataatctgtggatcgttcacctgtgaaatactccgatgtgtttgcaccggaacttgctatcagggccaatgaagaactaatacctgtaagtaccccttggtcttgttgtacttgtcccgccattcgccggcgcaattcatctgcaaccgtgctcattgttggtctgctctcgctagtcattattaagcactggcttgctagagttgccagatcacttatcaatcccatgttatcttcgtgcaatatttctgcgtctatgagctcaaggaagtggccttctctcatggcctcttgaaatattaacgcgaggctgaccttatccacggataatggcattcgccgggttaagagctcaagaagaactataccaaagctgtaaacatcactcttatcggtgagctggaagttccgaagatactcaggatctagatatcccattgtccccttcaccacatcatagttctcatccgcggtcctaattttagagcacccaaaatcggaaacctttgcgataaaatttttgttgagtagtatgttggtggacttgacatccccatgtaagatgatagggtggtcgactgatgagtgtagatatgcaagtgcttcagcagactcagcagcaacttttaggcggatctccagtgttctgatggatggatcattttggatgtggattagattgtacaaagtcttattttggacaaattcgtagacaagaattggaacatcaaactgaagacagcaaccaagaagcttgacgatgttttcatggttgactcgagaaagtatgagcagctcatctgtaaattctgcccaactatcctcatcaaatcccttgcacttcttgattgcaacagggttgtctggatgaagattaatacatcccctataaacagtcccctgacctccttgaccgattactaacatgttgtcgaacccatttgtcgccgactcaatttgatctcggtcatacaacataaatggaatgttgttatctctgctcatcatatttcttaacaattggcctccacgtagatgaaaatactcttccctctgtctcatgagttcttccctctgtctcatgaggtcttttcttatgattcgttgtttatatctgaaccattctatcccaagtaaaatagttagagtaaccaaaagggacgcacaaattcctgtcaagataggtaaacattttaaacgcaaataaatcgacgaggaattaggcgataagtagtgacaacaaaagataaacatatggatccatgttagtataaatgcaagaacttcataatttattcaaacatatatatctaaacaatgcgagattaattgaaaaagtttttgtgtaccgatagctagccctccgtcgcatggtccggtgtgtgcattgcctcgtgtaccgaaggggcaagtacagtcggagcctccatctttatttctgcattttccatagcaaatatacttatttggttccttgcactcatcaatatctgcaaaacaaaatacgcgtgatgttgtggaatggaattcagtggtgctaatttctgtcgaaacccttgcaatttatcgtactacacagactaatttcacaccatgcgtttaatattagtattccctttgttattgacatggatgtaaccgtcagattataatagtagacaaaattgactacatgtatcccacacgcatgccatatatatactttgtgtaaactttatgtagaaattccatctgtagttagaaagtttagtgcgtaaattttactagaaataataaaatgttgacagattttttttaaatgaacaatttactaggaaaatttctatgtatacactttctatatagagagaaactttatatatgtaaattttgtatatctaaatttacaaagaattatatctataatttgaaaatttagtgcataaattttactaaagattaaaaaaaatactccaagatggatttgccggctctgtcttcgaagttgctcataggggtagggtttgcatgagtacgtttataggggtgagtgtgcatgtgttgtgtgtctgtattatactgtgtaattcttaaaaaaaatactgatatcactgaaactttttcaaaaaaataataatacaattagaacaaatatctgatcagaaaaaacaataaaaatgaaacgtcgatcttttcccatggcgtggaaggaaaagaagaaaacagaaaatgcgttttttttctgtggcgcgccttttcgtcgttttctgttcgcttttctgttcgctgtccgcggccagcccatcttaccaccaccgtgagtgtttccacctaatattgacaaatccaaaactctttttctttaaattaatgaccaatcttacatcctactccctctacctcaaattataatacctataatttttttacacagtattcaataatatactttgactagtattttatttctttctatgatcccaataaatatgaaattagcatcgcataaaagtattttaaatatgaatttagagatataacatgcataatatgcatacttattatagatatagttagtacgattattagttaaaactatcgagtttgatttttttttaaaaaggggtgactataatttgagacgaatggagtattaataacagaacacagatggaaatgatcctaataacttctttatacggtagagaacagatgcggacgcaaagctgataggaaacgcggcgcatgagatcgactaattcgccagcaacgcactggccgctccagtcagtacatcctgatttattggcgacgaatcggcccactccaatcgaccaggctccgatcgctcttcatctttaatcagcgcggcgattgaaacccatcgacgttactttcattagccatcatcgatatcaactacaggtctacagtttatttaccaagtaggaaggtagcccgcgtatatgcgcagacacttttacttagtggtgtttgaaattttgttatgatgtttatgtataggttctttttgaaaaatacatctttttttacttttaaatatctgcatttatcaataatttgttagggattgttttgaaagttggtttcgttcattggacatacggacgtgcgctaagaggccaagaggggggcatggttttagacatttgtctacatgcatgcgtacctatgcaggtaagttggaccgacgaggacgttgggacatttgacggttgtctgtgacatcctacttctcttagaatgtggcctttgttttttttttaaaaaaatgtgacctatgttgctcataaacattgtgtgtgcttgagtacaaccaacttgtaagtcattgtcccttcaactatatcattttcgggctaactattttacacaaagtgagaacaaaagtgtaagtggggtgatatttgaaagtgggcgtactagttggatgagctgggctgtgttgttatagaggataggttgttacaaattgtaaactaaaattacttgaatcatgtcgtaatatgtcgcaagaatggagctggttcatatgaaactataatttatattacatgtgtttagatttttttaaaaaaatatcatattaattaaaaccataatatattttttatactaaagatgttttttagatattaggatatattagtttaagaaattttttattaaaaatgtggtaatatgatatctttatctaatttattaaattaagacatacccacttactcttgtttgcttctcctacctccatccataaatcgaaggatttaaattttatggtagattatcagggattataaatactactcgtaccatccaaccatctctcatttaatttttacccaatattactttaaccaccttataattctccaactacccctatttaatgaaacttatttaatgagggcaaaataccccctgttgggcttcttagtatttttttcattcctccttatttcctataaaattatatgatccattttaggtagaagatagtaattaaaaagagcttaattcgtagacggatttatttgtacctttgtggattgatttagctttacctatttgacctcatatacacgatgagagaaataattaagttggtagaaagtcgtcacatgtttagtggtacatagtaatgtgtccaccaattgtattttttaaaaaaggtggttattttgtcagcggtaatttttaggattttcttttattcagtggttaacttaattgccgtatggagaaaaagaggcgacaacctatgggctcgtctcgtccgtgaggaggaaagtggatacatgctcgtccatgaggagggaagtggatacgtgcattgtacatatgaaatctgacggtcttatcaatcaataatctttttaagatatagatctaatagtttaaaataaggtacacaggtttgggtaatacgattttttttctcagaatctcttatatttactttagtttattagagcatcatgtggtggcttaggaacattcatagaaagccatgtggtatcttgagagagtttataggacatttaatgaaattttagtatataataatagataatttatgtcatattaattaatatattaatcaataattaaataatttgtatgtgtagtgccaacataattttttatgggttcgccactgaacaattaagttggtacaaattaatgagtccaccaattttatttttaaaaataaggtggttattttttcagcggtattttttaagattttcttttttcctatgatttacttaattgccgtacggggcaaaaaaaaaagaggcgacagcttctgaggagggaagtaaatacgtgcgttgtatatagagactttggcagtcttattgatcgataggttttttttattaagatatagatataatagtttaaaatatggtacatcggtttgggtaagacaatatttttctcaaaatctcttatatttactttattttataagagcatcacgtggtggcttaggaaagtttatagaaagccacgtggcagcttgggagcattagtaggacgtttaatggactttcagtaataataataaataattcatgtcatgttaattaatatatcaatatataattaaataatttgtaggtgtagtgcccaaatatattttttatgggctcgccactcaaaaggaagggtatatatatccaattgatgtcccaataatttttttctgagttcccactgaagattaaggatatatagatctaagtgacgtattataattttttatatagaagcatatatactaagagaatatttagctatctaattaaaattttatagtatgtattggttgttagctagaaaataggaaataggagagatggaaagggacggagggagtacgtacatacatgtgcaaacatattttttttctttttgaaacgtattaggtgaacgtgtgaacggagaggaaacatacatatttttttcttcaatataagatttagtggtgaaaattaataatttaataggttaaaatattgggtccaccggtttaaatgaaagtgccacgtggcggtatatgagcgtttgtaggagtgctacatgtcaacgtaggagcgtttgtagggagtttaatggacttttagtatataaagatagatagatagatagatagatagatagatagatagatagatagatagatagatagatagatagatagatagatagatatgtatatatac

SEQ ID NO: 11874 - DNA, 1353 bp, Oryza sativa
atagccaatcgtacctttcaccacgtcatcgtgtccatcagctgccctaattttggagcacccaaaatcagaaatctttgcaataaaattgttactaagcagtatgttcatcgacttgacatccccatgtaagatagggtggtccagtgagtgtagatatgaaaatgcttcagcagattcggcagcaacttttaggcggatctccagtgttctgatggatggatcattttggctgtggattagatagtgcaaagtcttattggggacaaattcgtacacaagaactggaacttcaaattgcagacaacaaccaagaagcttgacgatgttttcatggttgactcgagaaagtatgagcagctcctgtgtaaattctgtcctactattctcatcaaatcccttgcactttttgatcgcaacagggttgttcacttgatcaagattataccctttaaaaacagtaccctgacctccttcaccaatgattgatgtcttgtcaaagcctttggtggccaactcaatgtcatctcggtcatacagcttaaatgaaatgttgttctctatgttcatcatatctgttaacaattggcctccgtgtagatgaaaatactcgcccctcttcctcatgatgtcttgccttttgattcgttgtttgtacttgatccattctatcccaagtaaagtcgttagagcaaccacaagagaggcacaaattcctagcgaggagaaggtaaaaatgcttaagccaaatatatatgtacagggaattgttcaaatgaatcaatgcaaaacatgaaattcataatttattcgaatatagcaatcaggcaaggttgaaaattttgtgtataccgatagctagccctttgtcgcatggtccattgtaggcattgcctcgtgtaccaaacggacaagtacaatcataacctccaactttatttctgcattttccatggcaggggtacttatatggttccttgcactcatcaatatctgcaacagaataccagcggtattaagaaacggaatttagcgttgctttgttagaaaacagagcaattcaaatcatgagtatatagtgtgtacatgtgaatgtgtatccaaatggacttcctaaaaaatgtttttttaaagattacaaaatctatgatttagaaatcaaaatattttctaggaaaatattcttatactgcaccttataagttaaaggcacatggcagatgcaatggaaataatttaaggtatgactctaagcaatacaaaagcaagactttcgcaacatctaaaaattatctctaaactttagcgctatacattattattcatcattcaactttctaataaacaatttaa

SEQ ID NO: 11875 - DNA, 654 bp, Oryza sativa
  unsure (1)..(654): unsure at all n locations
agcgaattcaatatcatgtcaggaatgaatattatgtttcgatgttaggtaattttatagaaggtattaagaagtaccaaattttgaaatataaaatttgatatcttcagatactccaaaaaacttagtgtaaagtttagatatctcgagttacttttgaagaccgtatatttgaggaagggctggtgtgtgtaccaagaggctgaagccggtgacgccggcgaaggaggtggcgatggaggcgctggagagctcgagctcgccgaggtggccgacgaacatgacggagatcatctgcaccacgttctgcagcagccacccggcgatgagcggcccggcgaggtacagctgcttcctcacctcggccaccaccgctagcctcgagctcccttctttcttctcctcgccattgccggcttcaagaagaggctcctccatgcttggtggcgccgncatggccacgcccccccaagcttagcttcttgctctgttctaacttcaaacagaaagatgagtgtgtttacaattacagatgaggtgaactacttacctgagggtgtgaagcacagcaaatcagtcaataatctgacaaagccttaatagggctttgcgataaattggagggaactgcgaggaaacgatgcacactaactt

SEQ ID NO: 11876 - DNA, 1138 bp, Oryza sativa
gtacccatgaattcagaaccccagagtccgcacatcctcaaatacaaagcacttccctagttagatgtaggttagacttcccgttcgagaaactctaccttctacctgccctcaatttatgcacgattaatgaatgccacctgggtggaagcgagaggtggaaatggaaggtcttagttcggaggtgggatctctacctgatagttgcattgccattcatgatgatcccctggcattcgtccattcagccattcaccattcacccattcaactggaattttggttgaatgccggaattgtgtccacaaattgtggatggatagttggttggctggctggatggctggctggatggctggctggatggatggtgaatggctggcggcggttcggttgctttgaagcatttgttgctatctaaattccatttaaggtcgtaccttatcgcccagcatcatcttattctctatttgtattccctccatctttcagatacggatgtagccttggatgtgcccgtgcccaatgaagaggaagagcgcaacatgaaacgtaagtacaaaagtaccggacacccacccagatcccaatagaatccgccaaatcctgcgggaaattgtaatcccattcaccagctcctacatttaattaacaagagaactattgtatttatctaacacctggattatctccacctttcatttgatccctatttatagattacgctgcgttgctaacgggccgcacctcctatttcctcaagggtgaggaaatgaagtccatgtacaccacctacaatccgcagaatgtggtggccaccgcccgtttcctgttccacaagaagaatctatactactccttctacacctcatcgcgaatcggtcgtccgcgtgccattcaattcgttgatgatgcgggtgtaatcctggaggagcatcaactggagaccaccttggcgggcactctcagtgtctatcagaatgccacgggcaagatctgcggtgtctggcgacgagttccacgtgattacaagcgcatcctgcgcgacgatcgtctccatgttgtcctcctctggggcaacaaacagcaggccgagttggctctggccggaaaggtggccaaatacacggccctgcag

SEQ ID NO: 11877 - DNA, 1921 bp, Oryza sativa
gaaataacattaattattagaaatcaacaattataactttgcaaatgtagactgcatcatcgtaaacgtctataatgtttgaagaaagtttactgcattatattctttacacatctatctatatattatatactgaaaatccattaacatctgctatatactaaaagttcattgaactccctacaaacgctctcaaactgtcacatggcgttttacaaatgttcttaagacgccatgacgatctaataaattagaaaaaaaatcctaaaagttttgataaaaaaagaaaaaaaaccattgatattcctttaaataggtggacccaataatttaaccattagatctttaaaaaaatccagtacccccaaccccgccatatgtgggcacatatgtaagtacgtagtccttcaaccctctaactctcctcggagatcccactctcctgtcctattttcgagcccaacttttcctattttctaacaaacacataatgtataaataataataatcggatagttaatgatcatgactctcaaagttacatgcatttttctcaatttatttgcattttgttgtgttatttacaattaaatacataattcaagatccatttacccatatttactatataaaattttgataacgtagctgttctgactacaaatatttgagtctaaattccagattcaatcaccaccaaagagcttggaaccatgatacatactctgggcctaaactcaacggaggcggagttgcaagatattattaggttgtgttcattagatgggtttgggagctaatctctcccacacacgtaaaacgaagcagctcattacattagaatattattaattaaatattaattatttattttataaaatggatttatatgttttttaaagtaatttttctatagaaaacttttagaaaaaagcacggcttagttgtttggaaagcgtgcgcacgaaaaacaagggagctaagttgggaaaggagtgggaagaacacaaccttagtgaggtggacaccgatcgaagcactagcatcgactttccatgactttcttagcctaatagcacgctacatgattatgtgaagcacaaaggactgagatgagggccggagggagacgttccgcatctccgacaagtactagaaaacagtgtcatttctatcgctgaggagttcaaaattaaattcagaaaaatagcaatttgattaaaattctcattcaaaaatttagaaaacccaataaaactataaaaaatgtataacaagattccatgtagaatatgaaatatcaacagtccatataaaaatataagttataaatatctgaaatttggaataataaaataactattaaaaaatgagtccaaatacaacacgatacgaaattaagtataaattaaaatccttaaaaagaaaaatctagaataaaacaataatttgatttgaaacaaattcgaaattagaatcactcaatcactaaattcaaaatataacaaatatttttttaaagaagttatcattattgattcacatgcataatgaattgcatatatatatgaatcaattaaaaagagaattgacagggttgtaaaaaaacatttattgccaataaaagtttatcgagatttcttaaaaaaagatatacaatgaacaccgagttaaaaatagaaaacaccttactttaatttcatttcagtttattttgttataactgctttcagacaaatacacatctcgcgcgggctatcatcctagttatattgaaaaggtttgactcggcattgaagctgactggtgagttgaatatatggattgaaatggacaactccaagtggcatattatcttatgtttcttttatatatatatatatatacctctgttgattactatggtcatcaagcttgctgg

SEQ ID NO: 11878 - DNA, 1953 bp, Oryza sativa
gtgatcttaagccccggttggtgctaccaaccgggactaaagtcccacccctatatatatgtcttcttcctcctccagctgcccgagcaagcttcaaaatttcttcaaaaaagaggggaggtcatgccaaaatttctattgaatttattttggtgattacatacaaatcggaggtgcctaaaaggtttgcaacttcatcctccaatgttttttttgtcatactacatttgcacctatgttttgcacactttttttgtctccaaaatttagttgtaagttgatgagagagaaaatgtgtgtggggaagaaagaatatatagaaatttagttcatttgctaaacaaggttttataaaatagttgagaaggaaaactctagtgaaagttaatattaaataatagaaaacaaactaaaataaaaattaaaagaagtaaaacacattaaaattagtttaaaactttacaaatagtttttaagaattatttggtgtaatattttatgatttttgtatgaataaagatatcttataattattgtatgactgtcattattgtaagaataattatttgtgtgcagttttttttactcatgtagatggatcggcaatggatgtacgctgaccggcggtccaaagagtttattgacggcgtgcactattttttgagagtggccgaagctaacaggcaaaggggttttatttgttgtccatgcaataagtgtaagaatcagaaggagtattctgcatccaggactattcatttccacttgtttgagtcggggttcatgccaagctataattgttggacatcccacggagagcaaggtgttgaaatggaagaagatgaagtggaagacgacaatattccggactttgctcagtatgttggatttgaaggaaatcaaacgggcgaggaggaaatagctgctgatggtaacgacgttgcggatgatcttggtcagatgttgcaggacgccagggaagactgcgaaagtgaaaaggaggcccataaattggacaagatgttggaggaccacagaacttcgttgtacccaggttgcgagcaggggcacaaaaagttggataccactctggagttgttgcaatggaaggcaaaaaatggggttagtgacaaggcatttggcgatttattgaaacttgtcaagaacattcttccggggggaaacaaattgcccgagacaacgtacgaggctaagaagatagtctgcccgttaggactggaagttcataagattcacgcatgtccgaacgattgtatcctatatcgcggtgaggagtatgagaacctagaagcatgccctgtttgcaaagcactacgatacaagattagacgggacgatccaggagaagttgacgggcagctaacaaagaagagaattcctgctaaggtgatgtggtatttccctataataccacggctaaggcgtttgttcaggaacaaggggaatgctagaatgttgcgatggcacgctgaagagcgtcaacaggacgggatgctgagacaccccgccgatggttcgcagtggcgaaacatcgacagaaaatttaaagaatttggaaaggacgcacgaaacatacggtttggtttgagtacggatggcatgaatccttttggagagatgagcagcggccatagcacttggcccgttacgatgtgtatctacaacctcccccctggctatgcatgaagaggaagtacataatgatgccgattattattcaaggccccaagcaacctggtaacgacatcgacgtgtacctaagaccactggtcgaagatcttaaacagttgtggaagaaggaaggtgtccccgtgtgggacgaggacaaacaggaggagtttaacctacgagcgctactgttcgtaaccatcaacgattggcctgcacttagcaacctatccggacagtccaacaaggggtacaaggcttgca

SEQ ID NO: 11879 - DNA, 2298 bp, Oryza sativa
gcggcgtggcgacggcggcggcggcgtggcgttgtggggccgtggcggcggcggcgtggcgtggcggcggtggcgtggcgtggcgtggcggcggcggcgtggcgtggcggcggcggcattgcgcgcgcggcggcgaaggcggcggcggcgtggcgacggcggcggcggcgtggcgttggcatgcggcggcggcgttgcgcggtgtcgaaggcggcggcgtcgaaggcgacggagagagatcgagatcggagagatcgagatgcatgaagggagatgcggcggctctcaccctagagatgcggcggcagcggaggaggcggaggcggcggcgaggacgacgagctcgagacgacggcgagatacggcggcgtcggcgcggggatttgccctaggcagtggcggcgaaggagagaggccgagagagatcgatcggccgaaaacgtttaagtgttggtgaagaagacgagggcgcaccgggaatatatatacccctggatctttactcccggttgttctcaacaaccgggagtaaatatcttttcccgctatttcgaaattctttttaaacccggttagggttaagaaccgggactaaagattcccgctattaattataagtcatatgattttcgcttacatatgtgtttataaaatagaagttaatgcattaacattatttaaagtacaaagattgatgacaattacttcgaaaaattatttttgtctgtaataaattaagtggataaatcgtaataagcaaatatatgacttataattaataaaaattccaatatatatatattcttagcatatatatgaatgatattattatattggtaaaaactctaattaagatattaatgtacatactgcatgatttaaaattaataaaaattgtaatcatcatatgtacttagcgtaggaattatattaaattaaatgctaaaaactctaattaacatatgtaaatgccacatgcatgatttaaaccttttaaaaattcgaatagtcatatataagtagcatatgaaagatagtaaattaaattgtgaaaaactctaatatatgaatgatagttttaaaaatatattaaatttaatacttttaaaaattctccagtcaattataattagcatatgaatgatagtaaattaaatgttaaaaactctaattaacatatgaaattgccacttgcgtgatttaaaacttttaaaaatcctctagtcaattataattagcatatgaatgctagtaaattaaatgttaaaaactctaattaacatacatatgaaattgccacctgtgtgatttaaaacttttaaaaattgtaagtatcacatataactaacatatacatgatttaaacttgttgaaacctctagtaatcgtgcgtaattaacatatgccatacatcaattgatttatatggataatcaatacatccaaaatagtttacatcgtgtacacaataattacggcattacatcggcggtgacggttgaccgcacgtactttctcctcactattgttccctccttgtgatcgctgcgtgagtaaggggtcgcttcatttgataggaggatgctagggtcaatcgtcaccgtaaaagggggttgcccatccaactgatcgtaatcctcgtcagtcttgtcctcaactccgacgatttttcttttgcctgggagaaccacttgacgcttaggctcatcaggccctctgcccttctttcctttgctagacatgtccttcacgaaaaagacttgcgttacatcattggcaaggacataaggttcgtccgagtatccaaccttgttaaggtcaacagttgtcatcccactgtcatcaatcattacgcctccaccagtcaacctaacccattggcaccggaacagaggaaccttgagaggaccatagtcaagttcccatatgtcctcgatggcaccgtaatacgtggcagttgttccatcgtgtcccatggcatcgacacgaacagcgctgttttggttcgtgctcttcatgtcttgggctctcgtgtagaatgtgtacccattgatctcatatccctggaatgtcgcgatcgacccagacggtcccctcgccaggaaggcaagttgttggttgatcgactcgttacccatgagatgttgtcgtagccacgcggggaaagtatcaatgtgatgccgtgtaatccatgcatcggacttaccgatgttcctggcgcgaactagagccaagtgctcctcgatgtaaggagctaccaatgaagagtgttgcagaacagtgaaatgggctttacgg

SEQ ID NO: 11880 - DNA, 1333 bp, Oryza sativa
gtaggtcgtaacgcttgacagagaaaggattgttttacataatgtttgcaaatgattttggactacagagttaggtctttcgtcccttgatttgtaaacaccagtgaataaaattaggtgttggaagttcagatacgtgtttgaaggatgttctgatgtgccaatttctgtagcgaaatcagtaagatttcttcctagcgcgcaatttagagagaaggaaaccgctgctacttggtaccaatgagagttttgccccccttgacttattttaaagaagatttgtggtgcgcctttgtatttttatctcaaaatcccttgcacatccatgagttttgtcgcttccttcgtcatccaaacttttcgtccgtcctttatctacgcctgttacgagtctatctgctgagaacgtaagagtccgcgttagatttggtgtgtcaaatacgtattggattgctagtttctacgtacgatttgctaaacaaatcttctcttttgagttgagtttatcaatctacagtttttctcatcagcatttctcgatgctaaatcatatctcatgccagtacttgatcccaagagaaaaatcatctcattgcagaacttgatcccatgaaaaaaaaagaaactacttcctctgtctacaaaatataagggattttgcacggatatgtcatatcctactctctgtccagattcgttgtattaggatgtgtcacatccaaccaaaaaccttatatttgtggacatataaagtactaatgtatggttactttttttcccggtgtattacaatgtctaatcaattatagaggagatgaatgcatgaaggaagtagtaggggtgaaaacggtacggaaacggacggaaaccatctttatcgttttcattttcatatttttttcgagatcggaatcggaaaccctggatacgaaaacggaatcgaatattatcaaaaccgaaaacggagtgaaaacgaaccggcgcaaatacgataacgaaaatttatcggaataaaaaacccctcaaactgataaatccaattctcaagtctcaacggtcaacaattcattgtaaaacacaatcatataagtccaattattaagcatcaacagcacatcacaaaacacaatctatgaaataaattatctatgtttaatagagtaatgttgttgataaattccaatgcatggaaaaatattctgatgtgattttagattttcataacaaataatttttaaaaaataacaactaaacaccatggtattcactattcagtgcttaaaaatgaatccacggtatttcagtcataaaatttctggaaattccgagaaaa

SEQ ID NO: 11881 - DNA, 9941 bp, Oryza sativa
cggaatcctgaaagtttccgtaccgttttcaccccaggaagcaatagggtgcaaagggaacacatgtgacattaacgttgaaagaggtgtgctggcagttctacacaaatcgtcttccttacactaaaaactggtttttactagcagccaattaacaaggttgcttgcgaaaaccgatttcaacatacaaccatgttaagccgcctaactgcgatgatttttttttctctaaaaaatcagaaccctaaccgatttcaatatacaaccatgttaagccgccacagcaagatctaattaacctcctcaccgttggagaagctgacaccattgcagtcctcaagaagggatgatccgtcgtatccgtggcagcaggcggtggatctgccactatcgttgccaggatgaaaatgggattttgaatcaggcggtacgatgaaaatgcctattatgtacattgaaaatgagattgtgccgtataaaatagtaggtagtacgtatagtttcatctattggatgcatcgtcgattttatataacaccttttataccataattttcagcttttacaataacaacagaaattttgattatatattgtatacttacacgaagtcaccaacttgtacaatcaatacaagttttgtccttagtctttgcgatctttctatattgagagctcaattttcacacaaatcaaaattgaagggaatccaaacaaagaacgaaccaacacctcctatctccacactatgcatgcgtttgattagtggatgaaacaagatgggttgggttgatcctattttttaagttgtttggttggagaaaggtgtggaatgaaatggtccttgatgggaatattatgcttagattcggataacggaatgaagggagtatattggacatggtcgcgtggtcgcattttctatgtaattaataaaaattgaatttatatttcgtagagaacgatgagaacgtttcttctaataaaacctagtggatgtatacatacaaatatatcgtacaaatgataaaattgatgatttgctactctttaggttgctaccatgtgacaatgtcgagtgggactctcatgattcaatgacgtgtgggtggcgtggcgataaaaaaaatacatcaattctcgagtggaaaaataatcgaatataaatctccggacaaatagaagaaatgatatacatcaaatctatttcaaaatcacctcaacatgaggcttcgaccaagttctaccatgcttaatctgcgcactgaccgagatccaatcgtccagcctccacggccgatcgccattgctcaccgtgttccacccccagagcccgtcttcctcgacgcgcccgtcccggacgagcaccacgcgctccaatgtcgcgcacacccgcaccaggtacctcaggaaccgcgtatgccgcggcgcgctcgccgcgaaccccaccatgcgcacctccctcagccgccggtgccggaacttgcgccgcggctgccagtagatcggccgccccaggtgttcgtccggcgagggggcgggcgcggagacgtggatgtgcagcgactcgagcgccggcgccgcctcgaggaggaggcgcggccacgagacgtcccaggtgggcggcacgtcggcgacgaggagctccctcaggccgagcagcgcggcgccgagcgggcgcgggaggatccaccgcttcggcccggtgaagcggacggcgagcctcgacatcgacgccggcggcgcgcccccgaggagggagtcgaggacgcggtggtggggcggcgtcgccggggacgtgggggcggcgaacgtgaggttgacgtgcgtgaggcgcgggacggcgccgaagctgagctccaccaccggcacggtgccgtcgccgaggcacgcgaggcggcggagctcggggaggccgcgcagctcgacagcccggaacgagcagctgtccacgacgagctcctccacgccggagcgcggcgcgtcgattaccagggcgtcgcccgcgccgcggcagcacaggaggtgcaccacccgcaggcggcggcacccaccgaacacggcgtcgtacgcggacatcggggtggacgccgccgtgtcctgcaggacgagccgctccagcgcggcgtaccggtgcagtggcggcagcgcgcagtggcccagcgtcaggctgcggaggcgcgagcggtggcgctcgtcgtcgaggaggtggtccgggaaggcgtacaccggcagcggggggtcgcgcggcgcggacctgaggacgacgacgtcgaggtgctcgacgccccactccccgacggcggtgtcgatcatccggtcgatggtgccggcgccgtcgtaggtgcggaagaactcgaggtagagcgacctggcgcgccggcggcgagcgccgggcgcgtccaggaccccggcgaggccgtcgaggaacgcgcgcgtggcgcgccggtccaggcgtttgatgtacggcagcagcctgccctcgacgtcctcggcgtcggcggcgccgcgcgccctggctcggcggaggcggtcggtggagtggaagtagcgcggcgagagcacgtcggcgacggagaacctgagcgccgggaggcggcgcgggaggcgcgcccggcggcggggcgccttaatcctaggcgtggcagaaagatttttagtttggatgacggtgggaagcagctacgtacacaggtcgcagagataatataggcggctcggcgagtcaccatcgcattccgattccgactccgatccctatcctaacacgcttgctgctcttgttgacgtgctgtaaggtgaggtaccgaaaacagagcgatagtttagcgtatcattagctaaataaactttaaaaatagattaatatgatttttatatgaacttttttattaaaaaagttgtgtaaaatatagtttaagaaacatacgcgcaaaatataaaaaaatagaagttgagaaaagggagaaaaaaacacagcccaaacgatggttactgttgagcagagctgcttgattccgctgatatgatagttgatgaatagataatgtctatgaactggttttttttttttgaaactttcaatttttaattttaaaaataaactcttctaaaacttatttttaaaacctagatcttttgacctgccaaacatggcaaaacaatactaacacatcatctgtagtgggcgtgatagttttattatgccacaacagcaaaaccgacgtggccaagaaagatttatttttacaattaaaaatttaaaaatgttttagaaaaatcaaaaaatcgcaaacttgttggttgttaacaacaaaatttgataagatgtacgaagaaaacaatggattcgatgcggatttggaggagataattcggtttctaaaaacagcgcaatgcatcgactagaaggctgtaccttcgacaccccactctccaacggtgatctcaatcatctggtcaatgatatcagcgttgttgtagatgcggaagaactcaaggtagagtgccttggtgtgccgatgatgagcaccgctagtactgggcgcatctaagatcccagcgatgccatcgaggaacgcgcacatggcacgttggtcggagtgtttgatgtacaacaatagcttgccgtcgaaacaactaaaactctcattcctacaggcataagatgttatgttgatgtttcttggttggataataaaaaatgaagtatctttattcatgatccaacttctcatgctgccatttggataaaggctattagtgcaaattctctttcacctttgcatgcagagctttcagtgttctgggtggcttataaaacttgcaggtgtttaagcttgatgaatgtcatcttcctcactgatagtgcaacaattgcgactatattccatcaaaataatttacaggagaacccaggacattggagtttaaggccattactatcaaaatttcagaattttccttgcaggagcaacaattgcatgtcaagtggatccctcggaaggcaaatgaagttgcggatagacttgcaagtaaagctagaagacacaattctagggctagaaactataattattgtctacaataattctcatacttgttatcactctacatgtccaaccacaagtgccctagtaaacctctgtcttgaagagacgatcataactcatgtactttgtttctaatttctagtgtaataaaagtcattagttctaaaaaaaaagggaggtgcctagaggtggccgagaaagctggtttgttcggtgtttgctaccccttcatttttttaaataacccacacaagacagcgcacaatttcgtactaatatagtagaaaacaaaacaagtctatagccctggaagactatagctagaaaaaaaataaccacaccacgcgtctacaaccggatccccgctagtaaagagtaaacatgaacacaacacccctaatggaatgggtcttcaaatgacaccaccagcgaagaaacggtgtcgagaaacaccaccgtcacctattctgagaacatgacatggttttcacctaaagaaaaccatcaaggagagaagagattctacaacaatgccccaagggaaaagtggcgcccatgagtgtcgctattgttggcccaaaggctaggctttcacccgtaatcttcatgccctcccatgccacgtgcacctgtccgtatcagcggccaccaccaactgagcaccttcaatgcatagccaccacaccagcgccttgccgtcgaccatccattaagcaggattgcaggatccagctcactcaacctccatccacacgattgggttgaggaggaagaggatgagagagaagagtggatctcctcttcctcgtactaggccgccagcgtggccatcttgtgacggcaaggcgtcaccacgagaggactagcgtatggatcagagtccgttgcatgccctgcaaacacccacctcacggcatcgctgacgcctccacctcgggcagactgcccaccttgctatcgcctcgccccgaagccatcattcgtcatcggatctcccatgtggtagcgcctcaacggtgccatcattcctgcctccatccatcgacatgttgccactggacaccggccacgccgcgatcgcctcccgttgggctccagctgtcgtcaccaatcagcatgggttcttgctacccgcgtgcgccactgccagagcacgacagccctcgctgccgcgcttgcctccaccagccttctcttgcgcctcatcggtctcctgctgtctcgtgcgctgctagtcggctcctccggccagatccattgcaggggcgacagatctagccgtgggtggaccagatcctatcgtggcggcatcggatccgtcgcctagcgctgcgcagcgtcgccgcctcgtcttccccacacatcgcatgtcaagccgccttccccgcgccgaggtggagcgccgccgagggtttgaccccacattcccctacaattttgattttcatgaacactgagttctcgatgtgtttacacggttcgtgtaagccataaactaaatatgtcggagaaaacgttgatgccatcaacttttagccaatcttctatttcttcctatagtccaaagtagaattccaccttcatatgtgctcgctactttctaatggacactcaactgactaaaattcgttttgtcattgtattttagctttggtttacacgtaaccgataagtttatacacattcaattatatcctcctaacaaattcgtgtatcacaataatttaactctactcctgattaattcagcagagagagaacgtgtttaggccggagatgcagatctcggtttgatctaggccgttgagtcccgatctgacgccttgtagagcccaacacaccggcggctctgcatctcgaagcccaccggccgaagcccccccccccccccacacacacacacacacaccggcgccgccgcccctactccgatggctactccggccagcgagcccgccggcgcagggacgccggagccagcagcgccgttctccgccgactggaaggagcggatcttgctgcccgccgcggtcgccggtgagccgcccccaacccaccccccgaagaaaaactcgccgcgggcgattccaaagggggagggggattcgctgacttttgggatgctctgtaggtgtggtcggagctggattcgggctgctgtcgcggcaccgggctcgccttggcgccgcccgcgccaccgccacctacgccgccaacctcgccatcgtcgccgggtgctacggtggtgagctcctcttgttacgccggggcgtctgatttgtttagctttttgttgcaaagtctgtagctcttgggttgaattgaatctctaagtgaggtgcggttagataccccgatttggattattggagtagtatttcttcactgaacttgtgacttcgataatctactgttgtggtaggagagaagtagacttgctatacttcacttctcaccatttcttagttatgacttgaatgttggttgagattattaaatttaagctactagactatcattacaaaaaaaccgtgagtaactggatcggacttaaactcattttggaggcgggttgcctgggaacatggcgcagatgatgatataatgataggcatatacaaaacgatttcacatttctagtagtgtctcagtttgggatactgaattactattcttgttaaccattgaacaaggtagcctttctctgcgtaaattagcatagccatttttgctggggaatttgatgtggtgccttgagaattgcgatattgtgactttgtgagtgattatcttctaacatgcctccagtccctccatagtaaggtttctgattatccattatcctctaagcatgctgttaatcgtgctatcaacatccatgaagctatttcacaacatccatgaagcaattgtgaataaaagaatgattgtcttagtttgttgttaccattgtctcactttgatttggcaaagattcaatgcctaagtaaatctctctttgatctattgtctatgatatgatcttaggaaaattaagctcatcagatatgagtaagtagaattgtggcaggctggcagctatgatcttttaaatgcaatgccctcaacataacctttttagtgcccacaactccttttttttcctttttcctagcacttgatcagttgaaataattcggggttttattgctcaagattacaaaaaaactggagaaatttctggtcagccaaggaacataggttgtagctattgtgctacatgggttctggaaatgtttgacatatttgaaaccctacttgacatgtttgaacttgttttgagctattattgcttacatttgtacacagtatgaagtatgaacatttgttgtccttttcacatcagaatctggcattggttttaattctgcttggtactacaactgtacaagttctatcttgtggcttttaatctactatttagaatacataacttttttagtgggatttagaatacatacttttgcactgttcgttttggactatgattttcattttagggaacatattaaacatgtttgtaaaaggtggaatagcgtcttctcatttattgcagcacttatattttctgtaagctcatgttaataagggacatggagcctctggatgaatatattatatatcaacatgtttatgtaatgcatgtgcttgtttccattcaggagcacgtgaacttgcaagagatgctcgggcttcaacacctgatgatcccatgaactccgttgttggtgggctagcaagcggagctgttcttggtcgattacaaggttgatcattatattgcacaatcatatttggacttttgttctttccatatttgaaagtatctaatttaatcttttcagtaacttcgtattttaggggttatcaggcaggtttcatgtatggtactaaaatcaacaacttagatcagaaagcaattatattatatatttccacatgctatctttacaaaatacatatagcagccataaaatactaagctagtaagctagagttcaccaacagacttgatagccatcagggtttgtgctttaatctgttcaggcaacattttggaagctagaagttatgcctacttcggataacatctgaacaaaagttctagtgcacctgtaacgtggggcccttttattttctcaaaattggcatagtgttgtacatggaagaaatgtgtgctggtcccggacaccatcatgggtaaaatcataaaaaggttaatttattgtaaattgtgatgtgctcatttgttttcactggttttccagaattttgtgggatgtgggtactggtaaggctactattactgaacttgagtgtctttcagttcctgtcttctgttagatgcgggattgcctattgtatgtctctttcttatacatctccagaatctttgtaacatcttctactcttgtttccaaagaaagctctacataaaagctttcaatttgcatccttcaacatcactatagttaattgcacttattgatatcactctacagtgaattttagagttaatttactatgatgcatagtgtagcctttctgatgtattagcagtcttagtttagttccattcaagagcttaagatatttcaattttgttctcatgggttatctaaggtgggtggtcttgctgagctccaatctaatcataataagatcttcagttccatttaaatgaaaggcatcattgttgtctttggtagcccttttttttttttaaaaaaaaaactattatgcaaaccttggattgcttcattctaccatttaatccatctttcttccaagcttgtgaacaaattatgaaatatatgctttcaacctgctattactagattctccagttatgcatatgcttgcatgtccacttgactattctgttcaattaaatttccacttgactattgctttagattaccttgaagtttcatagatagtccaatgtgatttgccttactcaaattatcaacaagtctgatcattttataaaaatcaacccttctttgtgatgaataccttttggccttcagaattcaaacttgtctgaatttgtttgctgtgatgcaagcattttctaacttgtctgaatggcattatttgttttctaccaggcagcttggtggaaacttttgggatatatatattgtctgaaaactcgcataaaattatatcgcaatgttcatgtttgtgccctggatctcatgatttgcatttgctcactgtcgctgcaggcggacactttggggcagttaagtatgcagttacctttgcagctgctggtaccgcattggactatgctgcactgaagctgagtcctcaaattaatggcaaatggcatgccctgaaagaacatttttctggagacaaagactggtttacgctccccgaatggtcgcctattcaggtgttggatgaggaggccttggcgaagaaacgagctcgagaagagaagttgttcgctcagcgagctctcagtaaacttagcaaggaggaaccatagttacagtgctacagtactgctatagacttgatagttttgtcaaggcgctatgcgtcacgtaaaccattatagttctagactgttagaacattcaaattttggagttttttttatcttttcgttatcctttgtaagcttttcacggaaagggagaaaccatgttggtcattgttgtactggaaagggttttagcttccaaaacatttgcttgtctgctgtggtgtttgtaatactgctggtaatctggcaccttttggaagtaaaactcttttgaattcacataaaatacaacccagaatgtgaaatttaaatgcgttatttttcctgtaaaataccattgactatta

SEQ ID NO: 11882 - DNA, 8538 bp, Oryza sativa
caatcttaagttatgcatagacaatcttgaaagctcttctacggcgtggattcaaagtgagccaaaatgcgtcacaaaaataagaacaagggttaaaacattaaaaaaataatcctgctatatgcaatgatttagagaggcaatgcacaatgatttagttctccttcaggctttagtcactttatacaaaaacacaaaaaagaccaaaaaggaaaaaagaaaaccaaaactattttatatataaaaggcccactacaagtaattacccactaggcccataaaggaccactacaagtcattacccattaggcccatcaaggcccatctaaaatttctagggtttcctcatcctcgatggggtttatccttcgagcacatatataatccgcacgccgccgcctccctctctgcttcgcactccattttccctctccccgctcgccgccgccgccgccgccagccaagctcgccgctcgccatgggtaagcctccccctcctctccctctctccggttcatctcgattagttttagctctcaatcccttccggatctgaccgtttcttggacaaatgtcagcccggatcaaggtgcacgagctccgggggaagaacaaggcggagctgcaggcccagctcaaggacctcaaggcggagctctccctcctccgcgtcgccaaggtcaccggcggcgcccccaacaagctctccaagatgtgcgcctccttcctccttctctctcgctcgtttgttggtgtggctggatctcgctcacgggttcttggggtggtgaattttttttcgcagcaaggtggtgcgcacctcgatcgcgcgcgtgctgacggtgatctcgcagaagcagaaggcggcgctgagggaggcgtacaagaagaagagcctgctcccgctcgacctccgccccaagaagacccgcgccatccgcaggcgcctcaccaagcaccaggtatagaaacaactcgtgtctcttctctttctttgtcccattcgaatgcatctaccttatactaattggatgtgaattacctcagttattgtttagggctagatgtgctgtgttacataggcatttttcggtcaaattgctctagttgatgttgaaacagttaccaattcttcagtgcaagctgtgttttttttatgttagattggattagtagaacacatgtattgggaatcaagagagctctttaggaagaacgatttttgcacggatttttatgagattttattgtgtggcttgcctagttgttgctggtgatttgcgtatttcggttactactctgttagctgtttgtagtttaattgtgataagctgttcgcaaattgtcatatgattgctgtaaagctgttggtctcaccttgtaagagtatatagtgctgagtttggttattttgtgtatgcatgtgacatactgcggaatgataattactgcttgtcttaggtgatacatactcccatccattaaatcatttagtcaggctcacaggcttgtttaatacccttttggttcaatattcgcttcttgttttgttatttttgctgtttgttattggttattttcacactaggctttaatcatatggcatgcatgtcatagtgtgtcctctcctgtgtgccttgtttttgttgtaacaaattacagggaccatgcaattccctatttgaatcacttttgagacctgagcctcacctcctttaggaattctggtcatagcaggatttacatcgagtttaaagctgtctctttaggtcttcagctgcatttgtattatgcatctggtgtagtttagaatttggagattttatttatggtgcatgtaacttaggtcgttttatgtttatggtcttgtcttgtgaaatcctctagtttgatctgatcctgttaaaatatttagctaaatggtttgggcttttggtactgaatgatttgctttactattgtgcagctctctttgaagaccgagagggagaagaagcgtgagaagtatttccccatgaggaagtatgctgttaaagcttaggttattaggaacataaatgttttaccggtcaagttttgcccagttgcctaaatttgatgttttgtgtggacatccattgtcaccttagtacaatgtatttggtctactgcatgaagtgcgtactattttgccttttaacgttgttatttggttatagctgcctgtcacctgtctgttgaaaatgtgatggttaccttaatgtttaagagattccacttgaactatgtccctacgtagttcaaccgtggatgggcattcaaattcaatctataccaaaggtagtgtgtgctagtgctgaactgaggagcacattcttcatctctggtagttttgctgaaacctgatgtgcaaattatagtagttactaccaggtttcacttttttttgattgaggtggattcactccagggctgcggtgctttttgtgaaactttgatcaaaatatggcttggaattggaattggtagatatatttgttggttcgatgaagagtaagcaaattgatgggagaattgcaaatataacactactcttgcaatctaattcgaaatagcccctaaaaaacacaaaactgcaaaattttgccactgaaattggtgtgcacacatctatttgccattgacaaataagaagacaaaaataattcataaaaccaatataagaaatacagcaagagttcataaaaccaatataaaaaagacacatataagaccgttttagccccttcttaaccctctcccactcaggaaccctacattcccatatcttttcatctcttcatgcaaatcaacttgcactacaacagaaaccccgacgcctctcaaatcctttcatctcttcttgcaaatcaactgaaattgatttgtcatctagtttatctcaagtaatcaactgaaaattgattcatctagctttagtttatatcaagtaatcaactgaaaattgattcatctagctttatctcaagtcgggtaggaattaatgacggacgaaattagcaacttcgatcatcatttatttcggttggcatgttcttttagaaagtaaaaatgattcttatggattattgtatggcatgttccttttagaaagtaaaaatgattcttatggattattgtaacggtatccgtgatagtatgtacgagtatgtgtggataatgacttgaaatcatgctaggaatcatgtcgtgtaatacgaatagaatcggatgttttaggcaacgatgtacatgatatatccacacggattttgcgcgtttcattcgcttggtatttacatcacacggacctctttcacatttcgctcatgaattgtgacttcgcaatgaatgttacgcgtgacaggaatcggatatacacgtaccatagttttgacaaaaacatcttcaatttttaaatcgcaggcgaggacgacgtagtcccaaatcccaattggacattcgggaagagcaaatcgtgcacgcgagggcgtcgcaggcccaatcgggcatgcggaaattcacacgccttagtccgtttaattgtcttaaagttaattgtactatcgctaataacatatatataaaaggtttattcataaataatttttatttgctagtaataaacgatttggataagcatataaataagcgtgacaataagatagtacctctccgtcctataaacaaacgaatctagaatcggatatgacatatcctagtactatgaatctagataaatatatatccagattcgtaatactaggatatattacatcgggtattaggctagttttttatgggatagagtaactgagtaagtgagttcacgggacctacttgcaccgctgattgcgaggggaaaagtacacgaaggtccctcaacttgccatcgagttacaaaatcgtcccccaacagcaaatccagatatccggcgtcccttaactaatcaaaaccggccacaataggtcctttggtggttttaacctcggttttatcctacgtggcggctgagtcagcgtgagacccatgtgtcagcgtggccatgctagcctcctctctctctctcccttctctatgagggcagcagtgtgaggtgggagagcaggagggcgtcggttgctggtgacgggcggcgtgacggcggtggggggaggagcggcgggcgggcggtgggggacgggcagcgcgcgggctcccccgtcggccgcgcccacaaggcagaggaatggtggccaggggagaggagcggcggccggcggagtggagttgggcagccccttcgttcctctcctttcctcctcactctctcactcttctctctggactgggcaggctggccggcagtgggaaggaggttgaggatgatgttgtacgacacggcgttgaggtggacgcctcgcttcggggcgagcgggagcatgtccttggtggcatccgcgcgaccattggaaacgagggcgttgaggaacaaatggaatgtggcggcagagtgggagtagaaggctgggacggcgcggaagacgacgactgcagcgtcggggcgagaagcggcgccgaggtggttgatgacaggggcaaacacggtgggccggagtgggccgccgtgggagtgcaatgcggcgaggagcgggggcacgagtgggaagaggcgcgcgcgggcgaggcggtacaacacgcaggcggtgaaggggtggtcgtggaggtgcctaggcgccgtcgcctctccgccaccgcgctcgcccgccgacaccgcctcgccctgccgccaccctcctcttctctcgtgtctccgccaccgcatcgtcggccgcctgtcggacctcctcgctctgacgaccttctccccaccgctggctggcctgcccagtccagagagaagggtgtgtgtgtttgtgagagagagaggaggaaaggagaggaagggagaggccggcctgctgacgtggcatcatgacacatggggcccacgctgactcagccgccacgtcggacaaaaccggtgtcaaaatcaccgagggacctagtttgcactggttttgtaagttggatgatgcgtcatatctagttttacggttgggggacgattttgtatctcgatgacaagttgagggaccttcggtgtacttttccattgcgaggactgggggagagatggcatgggctttaacatgggcctggcccactaacgctagacgcaccggcgcacactatgctcctcctcccccctccttcccctacacgactctactcgattcgaccgttccgccgcttccgcagcctcccccaattcaaaaagaggaaagaaacgctcctcctctcctccccccacccccccgctcctctcaaatctcctcccatcccccagatcgatctccacaaccccaaaaacaaaagaaaaaacaaaattctgggaatggagcagcagcagaagcaggaacccggcggcggcggcggcggcgtcagagtcgtcgcgaggatctgcccctgcgcaccaccgccaccaccacccgacgccgccctcaacttccaggtcgccgccctcaatgaccccgccctaatctccttcatcccccgtcgcccaaccgcatccgccgccaccgccgcggcctctgggtaagataagaacaaacgccttactgtttggattttgggggatttttgttttattttatcgctgatgaaatttaaccacacgcggttgcggcaccagccgaggagatggccccaaggataagcagcagcagcagcagcagaagtacagggtcgatggctgctacctcagagacgatcccaaccaccgcgtcttccacaacgaggtcaagccgctcattgatggcagaggtggaggaggaggaggacgcggcggcgccaaagcctgcgtcgtcgcctgtggtgatgcggctgccaaacgtcacctcttcatggtattattaatttattattatgggttactagctggatgaacttgagttgcaacggaattaaaagaagagagaaaaaaataatcgtatctttaccatttcaaatattaatccaagaattcatgttgcagttggagtttgatatcttccccccttaaatactttgtatagaaattctctttattgtttgttgttttcagatcacagtttgatagttcaatatgtcttgagatagtggttgcaggtttaggcagattcaccaccacttgagtcttttaaaagagtacagatgctaatttttcttgcattacataaatactgtatttacatgctaccccagctgaggctgagcctgcctttcgtcagaacctaacaccatcttgcattcctcagttgcaattgtcactgttaggctactcactctcctcatctgcaggggtctcctgatcaacctggcttgttcaccatggcaatggcgcaactcctcgactcctccaaagccattggtgccgctgtcactgtctcatcctatcaggtgctccaagatactcacatcctcgacctcttggagcccaagaaccatgaggttctcatactagaggatgccgacggacagactcacctcaagggcctctccagggtacagcactactcatctttcctgaattgtttgtatgcctattaaatcatagcaaaattcatttagtattaactggatccgtcatattttacaggttggtgtcaactcaatcgaggagttttcgcagctttgttgttgcgctaccaaccagcagaggcaccatcccgctaaagattccacccagttacaggattggggacaccaagggctgattatctacgtctctagctttgatcagcaaggcaaagaatgtgctctagctaagataaacttcctcaacctggcaggtctgctcttctcttttctgcacccaaccttctagctcctcattggtatagtgtgttgcataaatattgtactgcatatttcgatcatcaggctatgtggatcccaagcagaagaagaatgaaggtcttgctctactaaccggtaacaagtctatgcatgccttgatgaatgttgtccaagcactgaacagcaaccagagatttgtaccatatagacaaagcaaagtaactcgtattctgcaagattctttatgcaagagcaagacgagcggtagcgtcctgatagcctgtttggtaagctactaacagctaacactttccttttgtatagggctgcaccaaagaaaatagttatcaaactagtttgactcttacccatgtaagttctacaagtatatttacctgtgaaatgcaagttttagcatttggtcacggtacctgtcggtgattaggattcgatcaatatatgtgcgtgctatatgtacatgttgctgataaagtagtttagcataaaacagaaccttcatgcctgatagtattgttcttcactaagtcaccaaactagtactaccttttagtccaaggatatgtcggtgtgataattcgatccagtcctcatttgccatatgctacaaattgttatacagaatatgtactaaagcatcgctccatctacagttagctttgactggttgttacatatttgcatatgtaccatagctttcctgtttgaactgatacacaataggtgttactctcccaatctaaatatatgtttccttgttcttgcttgttgtaggctgaagattgctgccaagattcagtttctactcttgccttggcttctcgctcgagccaagtggtcaatgaacaatactacagcttatccttgagtgctaaaaaatcatcaaagtcaaatatgaacttacctaccgatgccaaaaccttgtcaaggacgtttattcacaaaacaatgtcgatgcaagagaagaatgcccgacctggattcaataatagtggtgtaaaaggcggacaaactcctactgctaatagaaggtcttaggaatttaatatgtgaagtaaaagattttgagcttggtatttcattacaaagtgtagctaattgaggttttatttcacgcaggactcagccaatcattagttcaacgaaaaaatctggaagctcaatctgtacttcaattaagatgaaggaaaattatgctaaacctaaaataagtggaaggtactcttgtgaaaatagatctatcattcttttttttctaaaccagcttaaattgtttttttttgttgtcaggaaattattttgtccaagcaacaattcattgaaggtacaaaactgactatcttaattgttatactctgttgcggtttatcagacaagtaacacatgggcatgaaattgcttttatcgtctaattgactaatcaatttcaacttttgaactatttaggaggagaatgctacggatgttgcttctacagtggtaacagaaactaagtcagcaacagtgagaatacaagctgatgttagtataataagcaccctactatgcatttttggtgattatcagttgagttattttatcttggacctccttacattattgtacaggaagtacaaccattagtaggcatggaaattcgagct

SEQ ID NO: 11883 - DNA, 577 bp, Oryza sativa
aaactccatatcagtatacaatttagaactaactaaactttggaattaaaaaaagaaaatataagtagaagtttgagtctatattgaaatacaatttataaccttaatttataaaaataaaaaataaaaaatattgaaataagagtttacaatctatataaaaatacaatttagaaaaaaaaatgaaaatttggaatagaaataaggaatattggtagctagccgcgcagtttgcgcgggccaccatactagttgttattgaatacaaatccagaataagcctgtattcacttcgattgactgaatgaatgttctttgtttctcaaacaattgaaatatactgattgtcttgcaaatgtagcaccaagagtatgcgtgaagatggaggatttgaggtgatcaagaaggcaatcctaaacctatcacttcgccatgacttgcatataagtgcatatggtgaaggaaatgaaaggaggttgacaggtttacacgagacagctagcattgacaatttctcatgggtatgggttcagcgcccttttatatctttatggtttaaattctatttttaagctat

SEQ ID NO: 11884 - DNA, 1119 bp, Oryza sativa
cttctttctttatgcatgtatacgtgcatatatgatgaaaaagagagcaaaaaaaaaaaaagaaggatcgatcaccggtggggcccacaagtcagcattggtgtggaccccaccagtgacacgtggcaggaggaggggagtatgttagtactgaccgtcggatgaaggaggcgatgaaggcgtcggggttgccggacttgaaggcgcggaggaacgcccacatgctgcccaccatcggccaccccatctcccccggcggaaaccttgacctcctctccgcccccagcgccgccacgcgaacccagtcgtgcgccctccgcaccaccgcgtcgaccagcaccacgccgggcaccaccgccgccgccagcacccacaggtcccccgccgcccacgccgccgccatgcccatgccctccatcaccatcgagaacgatctatcgatgaaccaacgcaacgcaacgaaggaacgaaacgcacgcagagacgagtgtcgccaaatgctaagctcctccctctcaatatataccctggcgactgcccaattccctcctttatttatttatttctctaattttaatttacgcggaaaaaaatgcgtgcttagcttttttttttttcgagaggacaaaaagggctttacataattaatcaagatgttctcgatttaaaaaaagaaaccgataactaggttgatgatgtttgtgatgcattatttggcgattaattaatttgttctcgaaccctcaacacttaattactagtagtgagttttgtatgtatagtagctcgatcgatgggattattcatcgtgagcatgtccagagatcctttgtactttcttctttggactcttgtggtttggtttcgatccatctaatttatcgccggcttttcttgtaccctagcttaataacaacacagtccatcaattccagtgatcgaaatgcaaaactgattaaccatggttttgctctccatatgtatctagctcaattaatttgtatgtagcaacgactccatttacatggccacacatggatatattacgtatctcttctagctagtagttgcacggtctatttcatccaactcgtatcacgttgagtttaataaagcttg

SEQ ID NO: 11885 - DNA, 2811 bp, Oryza sativa
accgccattactacccctgttggctccgtcgatccagagaagggaagaggtgagggaagggaccagtagcatggtgtagatgaatagtacggcgccggccagcgtcctattacttcggtcggccggatccgacggcgagaaggccggggtcgctggatccggtggccttggcctcctcacgggccacgacgacggctaagaaagggcaaaaaggtggcggcggcgcgtgaagagcagcggcggaggcggaggtgcaagagcagagagctgcggaaaccccgttgccggcgagcgaggtgagggagaacaagagctccgacgcacgtggcgctcacggccggctccgccgacggggacgggggcagggccgtgttccccgtgccggtgaacaccgcaccatggccgtcaccgttgagggacactagctccttcgcgccgaaaccacccgctatggtcgacgctctcgagttccgcaagtgttaacaaccaaatttagtaagatatgaaccaggttcaacattggaatcgaagcggattcgacaaagagttagattcgaagaacagagtatgcatcggctgtggtggcatcggttggagtctgcatcggctgagatgaatcggacagaggacagctgatacagccgatggagttggtatagccgattctgatgaaaatggcttcggggctgtttctagaatcgattgacgtgcttcacaaggattgccacgataaagataaagctctaaataagacaactgtatctattaattaggatattatgtaatttccttagagatatgtttgggcaaaagtccgccgcaaagacttagggtatattagagtttgttagagataagagtcgtgtccggcaaggacatattttgtatctcgggtataaatatgacccgaatccatgtaatcaattaacatcatttcaatatactctttgcgcatcgccaccctttttactttcgttctatttcgacgagttcttgctttcgtgttgagctacatcgattcgatcttcaactagaggtaaacttgtcatggcggcttgcgatctcgggattagtgcttccatctttatgacactctaatcctgtttatgtaatttgacaagttatcatatacacattgcaatctttgttagttgtgttatataacttgttatgggctggttcttactgttaggaagtgatcgatagtgttatgtttcgttattaagttagattatattgtgtatctttcatctcttagaggttttcatcatctttcctagatcttatacttgtttttatgcttaatgtttaatcggttgagttcgatctattaagtaatatctataattatgatatctagcttgttttatgatcatcaagggagatagcatcggggtttcagcccatcttatctggtttagctactttatatgttatatgctcgattgatatgctaaatatgtcctttatattaagatcttattacatcagagtatattaggcttcccgtttgatatattctgcttgttttgatatcttaatatagagtggtatcggagtattagccggtacatgctagatatatttgatcagctatgctataaacatctatataatcagtactttactatatatttcgacttaagtgatttatacgagacatggtgaccgatctatcccaatcacttagtttaaatatgtattgaagtagggattatatgttgttaatatctatagctgatcaagtagatttagtcttatctcattcattaatgactgttgatcgattcagatatgacatcggctcgaagataaatgatatgtcattgactcatcggcgactggccgatcggctatcgtttatggatttaaccgcggttttttcttgtctttattcttgttgattgcaggatcaaatcaactggacgctcacgaacctaaaagcaagattttagacctgcactgaagttaagcagatcttccaggccagtgtgtgttttttgcatcaacacgcttttggcacgcccagtgggacaacttttctcatggcagaaaaacaatcaccggcatcgacaggcaagcctccaaaccctccgggggccaagcatccaaaacctccggggaccaatcaatcatcatctgaggttgagactgggaacatcgtcccagtcaccatagacaagttatcaccagaacagaaggagtttaagcaagtgatgaagagtgctcagcagcaattcatgaactcgttcaaggaaacctgctagggaacattcattcagaagtaaaaggtgaaggtggttgctgccgatgaacctgaaacaagttcatcctaaggggactaaaggtgttgcgaatggctcggatgataaaggtgagggtcctcaagatggtacggtcgaggagcctttgagatgcaacaattttcaagaccaggttgactatgctgttcaacatgccttgatcaactaatcgggggtgattatcaatactttatcaaatatgattaagtctgtggttgatagcacgatagctgagcatcaaaacacggggccagtctttctaccaggtggcgtctttccacagtacaggaatttggtgacaggcaaccagcaacataccaccaatgcaccaccggttcagccgacggcaatggtttcagttccagcaccagctgcaccgtcatcagcacaaaggcaggtgattaatcctcatgtcttgaccagagagcaaccacagcatgttggacagaacattaatcgactgacccaggagcaggtagtacaatgttcgcgccaactcagccgactg

SEQ ID NO: 11886 - DNA, 566 bp, Oryza sativa
cgtttaggattttcttccctttggcatgcaatatatatcttgtttggagtaccatactaccatgtggtttaacagtatgttaatttgtaattaaccaatctaatctacctgctgttcgttcctctgttggttaatttagtagtgacagtgttctggatcaagtagctaggtaggtgcagtagtgataaaagatcaaacctttttgtgctttagactttagaggagccatcagaaactgcaattgatgcctttgttatcctgttcttctgaactccaaatatgcagagcagtttcctgaggtaaacaaattcaagtcgattctgaacaaattagttgttgttcttgttgtgcaggaggagtttgaggagttcgccgagaaggccaagaccttgcctgacacaatttccaacgaggacaagctgcttctctatggcctctacaagcaggcaaccgttggcccggttaccactggtatatataggccttctgctcttcttgaaacgatgcattcatcaattgagctaattaatttgctgctgttcaagtgctaagattccatatgcttt

SEQ ID NO: 11887 - DNA, 585 bp, Oryza sativa
tccagatctcaattccccgatccatcgtcaaatccaaaccctaatctcaaatccctcccaaatcaaatcttctcgaaaaagtctattttgcctccctcgagttcgtgggccgatctcctctcccccggcccattccctctcagcccatctctcccccttcctccatccttgcccgcacgtgcgaggcacgtgcgccactcgagcgctgagcgctctctctctctctccctctccctctctcttctccctccctctctgctctcgctgtcgcttcccgccgacgccgctcaaatcaccacaccgcccgttgcttcccgcgcgcgcgcgccgtggtggccgaccggccggtcgccgccgccgtcagcgcctgccgcgcctgagcccgcgtctgccgcccttgtcgccgctccactccaaaccgccccgctgtcatcgtcgtcgtcacgacccgggccctgccactaccgcgcgcatgcttccaagagatggaggcagagctcctcctccctctgccgcgccgccctctctccctctttcttttcccaaagtggcaagaggcaagcctcctttccctccttctttcct

SEQ ID NO: 11888 - DNA, 768 bp, Oryza sativa
taccagtttactaattttggttgatttttcattgtaatgttcaaaaacctgtaaagtgatagataattcggaaatttggttatacggttaaacttttgatatggccatgcgcagcacaaatagttttaaatcatactttggttaaacaatgcatatttcttttgttttatttatgtattaattaattgagttagaaaagtgataagcatatgtatatttacttttgccgctaagataatttctattatgtgagcacacccttaatttgtatcctaaattcaccactgtacagtagaacacactagcctatatatctccctctcgagtgcagcgtgagttgacgcgccaaggcctactagcaacagagctgcaagcagagtggcagtgtgagtcgtaccgagagttgaagcacacatagccatctctctcgttgtttctccacgtaagctttttgtagcactagctttctagttgcaacgatggggttcatcagcggcgaggagctcgccgtgacgctggcgccggtggccgtgtactggctctactcggggatctacgaggcgttggggagcgtcagggctctggacaggtacaggctgcactcgaggagggacgaggagagcaataacatggcgtccaagaaggaggtggtgaagggcgtgctgctgcagcaggccatccaggtcgccatctcacttgccgtgctcaaggtttgtcgtctcacaaccctcgacgttcagctagctagcttttgattgttgagtgatc

SEQ ID NO: 11889 - DNA, 670 bp, Oryza sativa
agctgctgtctaataatgctaattcagttatgttgccagtgttctcgaatctttgtagtatataacaaagctgtttcctggactgtgctatataaccgaataatggtttggtagtgattgtcttctcacttatcactaaggtgttcttttacttcattctgaaagaatatcacttcaattataaattcttatggtttctggttttcagtctgaatatccattaagttctatagctttacaacagcaccgagactgactgaagaatgtgacgtctatgatatgcaatatgcaggtggcgtttcgcaccaaggttttccatccaaacatcaacagcaacgggagcatttgccttgacatccttaaggaccaatggagcccagcactaaccatttccaaggtttcctttctcgcttaacgctattttacttttgcgaggcggttgcttggtctctcggcgttgggctgaacgaatcccgcaaaaacatgtgctctctgcttgctttcaggtgtggctgtcaatctgtccctgctgactgatccgaaccctgatgatcctctggtccctgagatcgctcacatgtacaagacagataggcacaagtgctagaacacagcgtggacctggactcagaggtacgccatgtagcacctcaaatctctgtggacatgt

SEQ ID NO: 11890 - DNA, 2509 bp, Oryza sativa
agataccaacaggatagagaacgcctattgctcagcaaaatccacctgttggagcccagtttgtacctgaacagcatatgtataatgtgcaacagcctccgcagaactatcttagcggtaatttcaatctccagtatccacctcggtcacctcagatccaatatcaagcaggaggatcacctcagccctagtttgttccccagctcaatcagtttgatccgatacagcagcagatgcaaggagtgccccatcaaaagccttaggccgacatgattgcagatgtgatgagggagtagtttgggcttaagccaaaggactctggaaatttgtatcggcacccttatcctgagtggtttgaaagagttccactgcctaaccgatacaaggttccagatttttcaaagttttcaagacaagacaatgtttcgacatatgagcatgtcagccgattcttggctcagtgtggagaggcatcggctgttgatgctttgagggttcgattgtttcctttgtctttgtccggatcagcattacatggttttcttcattgccttacacttctgttcaaggttgggccgatttggagaagcaattccatagctcttctatagtgggacccacgagatgaagctctctgacttgataggagttaggcagaggcatgatgaaaccgtgcaagattatatttagagattcagagatatgaggaacaagtgttatagttttgccttgacagattctcagttagccgatctcgcattccagggtttgatagctcagatcaaggagaaattttcatctcaggaatttgaaagcttgtctcatcttgcacagaaggtgaccctacatgagcaaaggtttgtagaggctaagaagaatttcaagaagatcaatcatgtatatccttatatgtatgattccgaagtggcagcagctgaatgggtgaggagcaaaaaggttgtgccatgtcaatgggtgaagagttttggaaaagaggaaaggtatgactttgatatcaccaaggctgataagatttttgatttgctacttcgggagaaacagatacaacttcatgctggtcacataatcccatcggctggggagctagggaagagaaaatattgtaagtggcataactctggttcccatgctactaatgattgcaaagtctttaggcagcagatccaagcagctattgagggagggaagataaaatttaatgattcaaagaagccgatgaaggtagatggacatcctttccccgtcaatatggtgcatacagctgggagagcagccgatgggggaaagaattcggagttctcaattgaattcagcaaggatgtcacgcccagaaattcatgaaccagaatttctaagctgaatgtgtattaaacccctgtccaggaccagccagggtacacaaacgacaattgttgacatacagatccacgtcttacaacaatataaaagattacaaatgcagcggaaaaagataaaggcgagctaagcctgaagacttgactcctacagcggacaactccattccacaggcatccttgacggcagcgacgaaaccaacctcttcgagacgtcttcaactgagaaggacttcaactctggtgcggggaaaagagagcaagactgagtactacccactgtactcagcaagtcataccggaagaggaggtatgatgcatggtatatccaagggaggctaaaggttcttttgcataaagctagcatttaaaagcagttgttgaaagcggtaaaacagttgcagtaattaaacaatattaaccaatcactgtccaacgctacaccacgttgcaacaggcccaaccaactacttgaactacaccagttcattagctaactaggggtgagactaatcacagtgaatctggttgaccgcccataaccgcgggcacggctattcgaatagttttactctgatcagaggtgtacaactgtacccacaagacacagccccacgacacattcccgtgcaccgacatgccaccatgacataccggaaagaggccgtgacaggaccctttgcataacccctgtaaccgatcgcaccacaccttagggttcgcccccgtccccagcaggcaacgggcagccccccctttcgtgccgcgatgaatccggaagccgatcaaccggacagcccggccgacccaactccatcacgcccacccttgcctgggtacgtcggctagagaaaagctacactacaagcccagccgttgcccacgctggcttgtggtaagcacgataaattcttccagggtttcccgcgaaccggtccttaatcgccatgggcacaactagcaaaaccatgcacccacagcccaccatgtagtgtattttaattagccaacaccattacggtggcactaatccaaaactattgccaataatcaaagtctatgctttaatgtgattccccttttgtgtactagtagaactaagcatggctaagcatttcctaacccaacatcta

SEQ ID NO: 11891 - DNA, 1414 bp, Oryza sativa
  unsure (1)..(1414): unsure at all n locations
tggttgccatctgcaccaaggttttcaantgtaccatcttgaggaatatcacttttgttacctagccagttcagtaccttgtcccctagataactggcatacctataggggcccttttggggcccccgggaaaacccccacccctttttccaaaaactttggtaactttnttggaacgaatgagttcctnctgcgggtctcctaaaagaatccatgaatttgttcttcacgttgctcatcatctgttcaagttcatccctttgctcagctgtcagcctatccaatgtgattggaacaatattggttgggtccacttcagctgatggatttttggcccccattttatttacgggaggtttgactcctgttcccggtgatggtggtggtttttcggccatcgggatgaagtcgttgaaaactcaggtcccaccgggcgtgccaaaagagtgttgatgtaaaaacacgaggcctgggagatctgcttaactctagtgcaggtccaaaatcttgcctttaaggttcatgagcatgccagttgatttgatcctgcaatcaacaagaaataaagncaaagaaagtagtagtccataaatgataccggtcgaccagccgccgataacgtatcatttgtactcgagccgatgtcatctttgcatcgataggctgtgcgaggcaataataaagaaactaaatctattcaatcggctgtagatatcaatgataaataatcttcgtggggttttcccccccggngaaaattttaattaaattaaccctttaaaaaattacagagttanatttgggggataggatcgggtccgccatgccgagacagtataaatcacttagaccgaaatatatattaacaagaacactataatcattcacagcatagctgatcaaatagatctagcttgtatcggctaatactccgatactactctaccttaagatattaaagcaagtaaaatatatcaaacgtaaagtttgtcacacctaaaagcaataagatcttaacataaagggcagatttaacatatcaattcagcacatgaaatataaggctaaattaggtaagatcggctgaaaccccgatactactctaatcgacacccaaaaagcaggctagagattatagttctaagcacgacttatgagatcaaactcaactgatgcagccataagtatgaaaagaaagacaatatttaggcaatcaagctattggaagcttcataaagtggtagatatcctatataatctaagccaacgtcgatacttaacctaatcggctgctctccagcgatagacactacccgattggaggttagatagcgatattgtcagagattatataagatatatgataactcancnncttncatagatagggtacagagaagtctatcaaaggtcg

SEQ ID NO: 11892 - DNA, 587 bp, Oryza sativa
  unsure (1)..(587): unsure at all n locations
aggcgcctttgtttgatgacanactancttggnacccggcgtgtggtcgttcttgatcccgaacatctccctgatctgctccggcgacttgcccttgatcagctccgccgtgcgctgcgccgccaggctgagaaggccctccacgcccatgaagttggccgccatgatcaggtcgtacagcatgtcgatgcccacctccatgaactccacgtcgaacttcttcagctcctccttcgccttgcggctgctgctgctaccttcggcggcggcgatggcgtgcttggtgcagtactcgatgaccttggcgagggcgctgccggcgacgttggggagagtgatcccggcgccgccgtcgccggtgcagccgtcctcgatcatgtggaggagtatccgcgacatgctcgccgccgcctccgtcatctcgaaggcctccccgtcggagctgatcaccttgatcatcttcttgttcttctcttctgccgccgccgccattgatgatgtcacgcgagctgatagatgtctaaattgatcgacggcgaattctgaagctgatcgatctctgagacgacccacgtttggtgattgat

SEQ ID NO: 11893 - DNA, 671 bp, Oryza sativa
aagtcgtagacgcccaacaatggcggcataataggctggccgtgcaggcggaagcaccagtcagcggtggcgaaggcaagccggcggtgaagtcatagacgcccaacaacagcggcataataggccagccgtgcaggcggtgacaccagtcggcggacgaaggcaagtcggcggtgaagtcgtagacacccaacaacagcggcataataggccagctgtgcaggcggagacaccagtcggcggcggacgaggcggccgctcggtgaaaacgtagacgcccaacaacggcggcatattaggccagccgtgcaggcggaagcaccagtcgacggtggcgaagacaagctaacggtgaagatgtagacgcccaacaacggtggcataataggccggccgtgcaggcggaagcaccagtcggcggtggcgaaggcaagccggcggtgaagtcgtaaacgcccaacaacaacggaataataggccagccgtgcaggcggagacaccagtcggcgacggacgaggcggccggtcggtgaaaacgtatactcccaacaacagcggcataataggccagccgtgcaggcggtgacaccagtctgcggagaccaaggcaatccgggggtaaagatgtaaacacccaacaacggtggcttaataggcccgccgtccaggcg

SEQ ID NO: 11894 - DNA, 629 bp, Oryza sativa
aatatcagtgagatctttttttttttcagaattcactaaagttattaatgacacagtttgcaaactttaaagctcaacacatcacgtgtaacattttaacttgattttctatcactatctgatctctctattacctttttgcttccaagataaggaggatctgctgactgccattgcagatattttttagtggttgcaactgctacatcatcttaagttggtgacaatgacatggggcttaaaatggtagcctgtgttgtctaatttttgtgttcttttagcatgacaagtgattccttcaatctgattcccatctatagatgataaccaatttagttatctgggagatatcataccagaatttattctgacagttttacatgaattagaatttaatctgacagacatgaactctgcttggtctgcagactgcaactacaggaatcaccggttcagccattttctgcaggacagcaaaaggccttgcattcctttggtcactgaagtactggttaacaaaaaaccaacgctgtcagcaaccggatcaacatttgtcacaaccggaatatgacaaccctatagtttcaaaaattgaaagcgggtggagcattcaactcttttttaggagg

SEQ ID NO: 11895 - DNA, 1802 bp, Oryza sativa
gaaggccaacagcggtggaggttttgcagcatcccttctttcaggttatttttctggttattactttccatagtacatgatgaacttatttatgagtttgcggtagttgtatatttgttattttgaaatatcataattgtttttttttacagccatgcttctacatccccccttcacttcgattcagatcaacaaacggatatgcagcaacaccaccatcaggtttgtcattatcctggcgatgtagaaactcatttttttcattattagaacattgttattgaagcaatttgaataattgatctacagttggggctaaaggagctgtggatcagaagaatgctaggagatattccgtggggcccttatctaatgggagaccagccgttaattactcatacttgagcgctaacaccccggcaagagcaggtatacccatttaagatggtttgtcatgctcatttcataggggaggatttgtggctgttgcacttggaattataacaaactataattacctccttgtagctggtgtgcaaaggaagctggagttggatcaccaggtgaatatgaattcttgtcaggctccagagggtaaccataaactgacaaaggcagaggcaatgaatcagccttggtccagaccaccaccagcagcagcagcagtaaggagcaatggtgagtgttgttttaaacaaactatgggggtgtttagatctatgggtgtaaaattttggtgtgtcacatcaagtattatatagggtgtcgcatggggtgttcgggcactaataaaaaaactaattagtccgtcattagcagatgtttactgtagcactacattgtcaaatcatggagcaattacgctcaaaagattcgtctcgcaaattagtcgcaatctgtgtaattagttattttttagcctatatttaatacttcatgcaggtgttcaaacgttcgatgtgacatggtgtaaaatttttgtgggggaactaaacagggcctatagttgaaatgatttttgtctctttatttttgttgatatcatgcatgcatctatttaacttcacttctcgcatcccttatgtaggaaattacttcactaaagaccagggccctcgtgcgcctgacattgcggagaagctgtctcagctgacagtgggctccaacagggtgccaagcttggcttcggacaagtttgtggatatgaaggcaagaacccatgggaataccatgaagcggcctttgcctcctgtgggaaccaggacatggcacgccccggccgaccccttccggcgcccatacgagatgccaggcgacagggctttccttcccaggaagctcgttagctgaagactacgatgaaacggaagctgccgccacactcctctttgctaccctttcaccaatcctcctactatcctgaaaaataagaagccaacagagccgatctccctcgaagagtttttagtgctgtttcctagtagtgtcgtattggttgtgaatctcataccccaataaaaatggagatgtgccagcctgctggtactcctatcttgccttgcattggcatccatccatgacagcacctcgaggatgcagctgatcctcgggggcatgcaagcatggccgggcgcgtctgcatggaaaccttgtgtttcgagtcggaactgtgtgttatttgctccctagtgacgtgacgcttgttgagtcgtttctgctctgcgttggctggcccctgcctgtgacatcgcagctactacagtactactactactatgtcaaatattggtataagactatta

SEQ ID NO: 11896 - DNA, 629 bp, Oryza sativa
cgcctgcacggccggcctattatgccaccgttgttgggtgtctacatcttcaccgccggcttgccttcgtctccgccgactggtgtcaccgcctgcacggctggcctattatgccgctgttgttgggcgtctacgtcttcaccgaccggccgcctcgtccgtcgccgactggtgtctccgcctgcacggctggcctattatgccgctgttgttgggcgtctacgacttcaccgccggcttgccttcaccactgccgaccggtgcttccgcctgcacggccggcctattatgccaccgttgttgggtgtctacatcttcaccaccggcttgccttcgtctccgccgactggtgtcaccgcctgcacggctggcctattatgccgctgttgttgggcgtctacgtcttcaccgaccggccgcctcgtccgtcgccgactggtgtctccgcctgcacggctggcctattattccgttgttgttgggcgtctacgacttcaccgccggcttgccttcgccaccgccgactggtgcttccgcctgcacggccggcctattatgccaccgttgttgggcgtctacatcttcaccgttagcttgtcttcgccaccgtcgactggtgcttccgcctg

SEQ ID NO: 11897 - DNA, 7043 bp, Oryza sativa
aaaggaaaaaggagggaaaagaaaagataaaagggaaaaaggattttcccagggatttaatattgcactttgcttattttaattggttaaaattatttatagagctctgaaaattccactaaaaatcttgttagcatatttcgacatgtagaactcaagaaaaaattccacatgccaaatccgattattatttgcattaatttattaaggtttactcttgctttacactggtattttcttgagaccatttataacttcaatttaggcttgggaaataacttcagggtgtgacaaaggattatcaataaataccaaaggaagcatgataagcagtaggaaagatatcacgaagaagatgatggtggttttgatcctcattgggatcatgagtttttaggttctgttggaacgaagggatgagactaccgtcgattgaggattgccctggatgcagtgacaatgcagggagttcaagccgatcttgcactaaaggaaatcggctgagtcagaagaggttgtctgttcatcagaggttgggctcacttaatcaggatcgtcatcaagatgaaaacgaggacagaaaaacacaatggtgtccttcttgtattttttataaagaatcagaagagaagggttcaaaggatttcaggaggtccagcagtcgatcaaccatcggctgaaaaagaccaagcaagaatggcgcgttaagagtaaggttacaacaaccgatgaggtggaagctgacaaggcgaagaagctggctaaaggaaagagtgttgcatctacatcggtaaacatggtgtttatattgttgttgctgtaaaaacacgaggcctgggagacctgcttaactccagtgcaggtccaaaactcgccttcggatatgctagcgtgccagttgatttgatcctgccatcaaaaagaaacaaagacaaagaaaccggggttaaatccataaacgatagccgatcggttgggtgccgatggcatatcattaatcttggagccgatgtcatatatgcatcgatcggcagtcattaataagcgagaaagaactaaatctactcgatcgtctgtagacattaacaatatgtagtctttatgtcaatgtatacttaaatcaagtgattgagatagatcggtcgccaagacgagacagtataaatcacttaggtcgaagtatatattaacaacgagactatatgtgttcatatcataaccatagtgaaaaaaacggaacttaacaacgagactatatgtgttcatatcataaccatagtgaaaaaaatggaaccggaaaaaaccaaaaccagaggtctccacggttcggttgagctgaaagaccggacatgcattcaatccggattgaactgggcgggttttgaataaaccgggcattaaaccgccctggtcagaccgggccaaggggataatgggctacatgaaggccagtccaggcccacgcgactgtttatgtacaaaaaacagagaaatgagtggcgtgtggagactcgaacctgggtctttgcactggaagctcttagctctagccatcctaccgatttttcacttgttaaacagaagaaatacatactgcatatattagttattgaaccgcggttcaaccggcggttctccggtcagaccgtcagaccggtgaaccgaggggtcgtccgagtccctcaccggttcggttttttccactatgatcatagccgatcaaatagatctagcatgtatcggctaatactccgataccactctatattaagatatcaaaacaagtaaaatatactaaaccaaagcctaatatacttaaaagcaacaagttcttaatataaaggacagatttaacatatcaatcaagtatatagaatagatgtagttaaaccaggtaagatcagctgaaactccgatgctaccctaatcggcaaccagaaacaggctagagactgagattctaaacacgacttaatagatcaaactcaactgatgcaacactaagtatgaaaagaagaacaatatctagacaatcaatccgctggatgtttcatagagtggtagatatcttatataatctaagccaacgttgttatttaatctaatcagctgccttctactagcagatgttagccgattgtaggttagataacgatattatcgaagattatgtaagatatatgataactcgacgaattacataaacaagattagagtatcataaagatggaagcactaatcccgagaacgcaagcagccataacaagttttacctcttgttgaagatcgaaaccgatgcagctcaacccgagagtaagaactcgtcgaaacaaaacgaaagtaaaaagggtggcgatgcgccgagattgtattgaacgtgtgttaattcgattacatggggttcgggtctatttatacccgagaattacaagatatgtccatatcggacgcgactcttgtctctaacaaactctaagatattataagtctttgcggcagacttttacccaaacatatctctaaggaaattacataaaacatcctaattaatagatataattgacttctcaggactcaatccgtgtgcggcaatcaccatgaagtacatcaatctaaaccgacaacatatgctgtgtcacattgtcggattctgctctatcggctaaccccgtccgactcaaactctgccgatcttatttgtagccgattcagactccagtcgatcctcactctgtttcctagacgatttccgtctcgaattctatcttggtttcttcttcaccttcgatccttggattaccaaatttggttgttaacaattgcctacagaatttgaagctaggcaagccgatgttgatgatgtagaggaggcctctgctaggttgattttgtcaccagaacaagcattttttgagaagccagaggggacagaaaatcggcatctcaaaccattgttttgtcaatgggaagccgatgtctaaaatgatggttgatggtggggctgcagtaaatttgatgccatatgctaccattcaggaagctaggtaggaatgcagatgatctcatcaagacaaacatggttctcaaaaattttggtggcaatccatcggataccaagggagttttgaatgtggaactgacagtcggcagtaaaactgttcctacaacgttttttatcatcgatgggaagggttcttatagcttgttgctcggaagggattggattcatgcagattgagccgactatgcaccagtgcttggttcaatggcaaggtgacaagattgagattgtgccagccaacaggtcagttaatgttgctagtgccgatttagctctttgggagatggatggtattgattgcctgtctggaaaagtttgggatcaagattttctaaaagtgtccgattgtgatatacaaccaatggaagacggagaccccaaattattactttgagggtgttgtgaagggttcaaatttctacaccaagggcacggtggatgatctcgatggcaagttgggacatggtttcatgtcggccgatgatttggaagaagttgatatagatctaggagataggccaaggccgacattcatcagcaaaaaattatcggcaaaactattttaaactgatttttctcctaaattacttatccaaatcatgatccgattgcaccattaaattcgttgcaattaaatcttcaaaataagaccacacatggatatattacaacgaaaaaaatttagcttattattgaattatttttaaatgttgcacgatgttacaccaggtatatcagaattgtttcactaagtagatcgaaaaatgtttcagttttgaaaaaaaaataaaacgaattcccttaataggggtttctgaaatatgtgagttttttttacaatggaatatttcaattcactgcaacattagatctatatatagtgaaacattgtgagtacactaggtgaaacatttttgataaaaaaaataaaccaaatttttttaacagggggtttttaaaatatataggttttttttaatggagttgtgtgtgtaaataagtggcaggtgagaacaagagatatatggtgagggccagagggactgacacgcacgtgaagagaggaggggaggggagcgatccggaaccggatcggtcgaccaatcttgagcaattcgggtctttctattctatcactaacaggcagcaacagtagcagttcgtcgtcaccttgattttgaatctgcccgcaggccgcagtcctgctcccgccgccgtctcggcacggcggcacctacccggcgtcccgacatcccgctcccgtccccgcccgagtcccgacggccgacgctgccagcagccagcgcagcagcacccagccggcagccgcccaggccggccagcggccagcgccactccatctccggctcgggctcggctcttcgcctctccggactgcggtgagcaattccacagtccactcactgtctcactccctctcggcctctctcccttctagaatctagagactagagttctagtagtagaccaataggcagcactagttgttaacagtgaaatttggtaagccctaaagtcatcatcggctgaagatcagtatcggcttcggagttctagaatcagccgatgagagttatcaagtgtcagttgtcggattctttctatatttggttaaggaaattgatctagtaaaggaagcttatccagaagagactgagttcaaggaggatgtggcatgacaagttatctattaattaggaatagtttgttagtttccttttatctttaggaaagtgtgtccgataaggactttattttttccttttatctttagtttctttcctgtccgacaaggacttgtatcaacccatgggtataaatatgtacacccggggtctatgtaatctatcaatctcgatcaatacaactactctcggtgcatcgccaccctctttaccgaggtttttacttatcttccggcggaatttgggcacctgacgcggggcagcatcggttcagttcgatctccggcgaaggggtaagtcctacgttccgtcgggccctgatgaatttgtcatctacatcggcgtcgttcaaggctgcatcagtatattcgacctctttatcgtatgtctctgttaatctagtcttagcatatcaatttagctctatcggctacttctcgctttagggtttctgccggtatcggctaaatcgtgttgctagattggattagcttaggcatctaccaccctgaaaatcagtcaagggctttgatgtctagatattgtgtttcttttcatactagtgctgcatcacttaagtttgatctactaagttgtgcttagaaccataatctctagcctgcttgttgactgccaataagggtttcatcggggtttcagccgatgaattatctggacgttacatcagctcataaggattgtatatataagttggatttagccgatgacaacaaaggtttcactgtttaatctaatcttgtggattttatgacatcggacctccagccgatgtatgctttaaccttcggatcagtgcttattctatcatatcattgctagccgattggtttctactagattatattgttattttattacatcatcatcagccgattgcctttatatcattatctacattggacatatagccgatagctcaaaaccctatcagcatcggctattatcggcatcggctgagattactccatcggcttgtcagcagatcggctatttgatctacggtttacatatcttgtcagttgcaggatcaaactgactagcacgcccgcatctcatcaaactttggacctgcactggagctaagcagatctcccaggccagtgtgtgttttttgcatcaacactagtgtactacccctttatataacaattttgcattgtttgatggttgttaggaggttgaggcatggagaagtcaagcattgcgttgctttttcagaagcatgaagcaaaaaaaaatgcttgtgatctaccaatcccacatgtggatgaagggtcgtctattcctgctgtaaatgatgctccaattgatgaagacatagttgttgatgaaggggtatgtgaagaaactgaagaagatactgttgtagatgacgctccacctccagatgttgttgttgatgaggtttcaattgaaactaaagaagaatctctgccgatttatgatgttgatgatcttgaacatgatccaggcttaagggttcctatttcaagttttgatgccaacgatcaagatgcggctagaagagggtacattctaaaaggtccatgccatctttgggccttcaattttccatccagaaaaatatatggtaaagatcgccgctttagtgttatttggtttcataagtacccttggattgaatatagtgttgacaaggatgcaacattttgcttcgtttgttatttgtttggcaaagaaagtggaaaatttgttacgggtggttggcataattggaatgtaggagctaaagcccttgataaacatgttggaggaacatctagtgatcacaattttgctcaagagaaatacaacttatttgtgaaaaaagggtacacaaattgatactgttattgtgaaggtgtcagaacaggatcaagttaattacaaggctagattgacttattcacttagatgtttgaggtatcttttgcgtcaaggattggcctttcgtggacatgatgaaactgaagaatctaacaacagaggaaacttccttgaacttttgaagtggcttgcaggaaataatgaaaatgctaataaggtggttctgaataatgctccaggtaattgcattttgacttcccctcgcatacaaaagcaagttattagatgttgctctatggaaaccactagttgcatacttaaagaacttggagatgagcactatgcaattctagctgatgaatctagtgatatatcacataaagaacagttggttgtttgcttacgttatgttgataaacttggagggg

SEQ ID NO: 11898 - DNA, 8818 bp, Oryza sativa
agaggattggccaatcatacatgctatggttcttgcttttgagtcatttgagtttgttttcaatgcacacttaatgcttgtcattttgggttacacaaatgagttttctaattcattgcaaaagagggaccaagatattgttaatgcgatgtcacttgtgggtttggcaaagaaaaaaatgcaacaaatgaggttcaatggttgggaaggtttcttaggaaaggttacatcattttgcatcaaatattccattgatattcctgcaatggatgctaaatatgtgcctcatggaagatcccaccgtttttacccatatcaaacaattgatgaccactataggagagaagtgtatattggtgtcattgagagaattcatcaagagctggagaatcggtttgatgaagttagtatggagttgcttctttgtatgtcggcattcaatccaacagattcatttgcctcatttgatgcacaaaaaatacttagacttgcaagcttttatcctaaggacattgaaggctccaatttgatgaaacttgagctccaacttgatacatatattaatgatatgagagaggatcatagattcaaaggcctaaacaaaattggtcagctttctattaagcttgttgaaacaaagaagcatgatctgtatgatttggtgtatttgcttcttaaattggtgttgatcctaccggtggcgacggcaagtgtggaaagagtattttctgcaatgaatttagtgaagactaaagtgagaaatagtatgagtgacaagttattgaataattgtttggtcaccttcattgagcgtgatatgtacatgagaaagacataattcactctttcatgactatgaagaagcgtaaagcaaaagctcttgagtcttgattagtattgtaatatcctatgtatctaaagaccttgtattatgtttgaacaatttacatttttatttaggtaagattcaaacttatttgttatttttctacttgtattgaaccatttagagttatataccatatcgtactatcgtttaccacattatatatcgaatcatattgtattgcattcgaattttttttggctaggcctaccctaggttcaaatcctgggtccgccactggtggctactattgcactgggccatgaatttgttgttggaaatctcagttggatttgactataatccatgtttatgcttcattgtatgtgatttgggatccacaaaatatgacaatatgttgtcacaattttttaaaaaaattctgccaaaattatgtcaaattttgttttctttattttgtcaaaaaaaagtttcaaactaaagtcaaatttgttaaattgattcaaaattttaaaattaaaaaatcaaagacaaatatatcaaacttgtcttaaatgtcaaagatatatcaaatttgtcacaaatatgtcagaagatccaaatatatgcatgttttgacgtaacggagtcaaataagcaagggcaaaggggactatttgccccttagttaacactatagttggccaaaagacccacagcccgacgaaacaacccatggcacggagatttggctagatccagacacgtcatggctcgactgttgtcggacccatgccagctaggcctaattgttgggtcgtgcctaggcctcttcctcggcacgacatggcacaacgatcagcaggcccaaatagatgagggaggcaagatagacatttttttctagccatatatccacgaccctgttaacgacaaaatttggtaagcccaaagtcatcatcggctgaaaatcactatcggctgcaacatcttggaatcagccgatgggagttatcaagttgccaatagtcagattcctgctatattcggttaaggaaatcaatctactaaaggaagtttatccataagcaaccgagttcaaagaggatgcggcatggcagtttatctattaattaggaatagtttgttagtttccttttatctttaggaaagtgtgtttagtgtccgataaggactttatgtttccttttatctttagtttctttcttgtccgacaaggacttgtattaacccatgggtataaatatgtacacccggggtctatataatctatcactctcgatcaataatactctcagcgcatcgctaccctctttaccgaggtttttacttatcttccggcgggatttgggcacctgacgcggggctgcatcggcttttgatctccggcgaaggggtaagtcctacgttccgtcgggccctggtgaatctgtcatctacctcggtgttgttcaaggctgcatcgctccgatctcttggatcgctctggtttggttgatacatttgcctacctgatatctcgattctatctctaattgcattgtatttagagacgcatcggtttagttggaactgtctcggttaggtccgatcttctgtcttagccgatatatctctacaatcacaatgatgttctaaatagatttgttatatctatcacattagacagatctatcggctcatcgagtattagattatcatatacaatctcgtgatgcatcggttaggttcgacctactagattattgttgatcatataagtcttgttaagccgataggttcatactaatgttttatcggggtgctagccgataagttatctggacattgcatcggcttataaggattgcatatacatataagttagatttagctgatgacaacaaaggtttcattaatttatctaatcctgtggattttatgacatcggacctccagccgatgtattatttacccttcggatcagtgcttattctatcatatcaatgctagccgattggtttatactggattatattgttgttatattttattatcatcagccaagtgcctttatatcatcatctacattggacatatagccaattgcttaaaccctatcgttatcaggtagtattagcatcagctattatcagcatcggctggaactactccatcggcttgttagccaatcggttgtgggatctactgtttacatatcttgccagttgcaggatcaaactgactagcacgcacgcatctcatcaacctttggacctgcactggagctaagcagatctcccaggccagtgtgtgtttttcacgtcaacagacccaaagagatgagggaagcaaatagacttattccaaggacgagcatgatggactagtggcctggtcgtgccttcaggccggcacagcacgacccgagttttattgggccgtgcctaggctgaaggtgcaacccatgggcgggcacggcacggtttgttagtcgggccgtgctggcctggctactcactaacactattaactcgttttaatggaatagtgtcagccttcatcttcgattttgaaaaggaggatcaaataagcaaactaaaaaaagtaggatcaggttggtagttactagttaggctgtgaaacaaggtcaaatgagcaattacccctaatttatttactgatataaggtgtcgtacctatttgatttcgtgttgtatgtttgcttataatgtactccatatcttatatagtgaaagcaacaagctttcttgcatgaggatgtgccacatcatcaaaaatatattagccatcagatgaagagttcaaataaacaatggtcattggatcgaaagagtgcatgtattaaaaaaaaccatagatgagctaaacatatggaaatttctggaggtttcatctcctcataaacatatgattcaaagagagggaacaaaggaggcttctgatttctcttataacatactcatataatacaacttagctatatctatagttggctaggacaatcgatactttataaacaaattaacttatatcaaaacatttttaaaagctaaggtaaactaatagaccatacacagaagttttaaatagaatcaaaagtcgcgcaaagcgctagtatatatgaaaaatgcaaggataacttcaggaatatgtaacgagaccaccactaggacttcaataaactcctaagcatgggcaccaagatttgtaattggttctctaccaagttgtatctgtttcccccaaaatacattaattcatatgcatttatgcaattcataaagttcaagcgtggattgtgttcaccggtaaaaatcgtaatcagccgccagctgatttgaattaagcttcgtgtctcattcttaggttttatctcggcaaatcatggtttttgaagttatcttttcctgtgatcacgttcatgcatgttgtgatcacgtataccgactgtatataaattcgcagaagagatgtgagagacggatcgatgccattaaatagccgtgatgagcacgtaggcgagacatgacaggatcatatatatccaatgtgaataaaagaacaatattcaaaacagattgacagaatttaagatggttccatcggtagcttggaattaaacatgctgtgcatcgatgcatataggcaaggggctgtcgatcatgcaagttggacaaattaattttggtattttcgcacacgtcatcttatgtggtccgcgtgtgaaaatatgtcttcgcagacggattgtcatatcgtcctctccctccccctcctccttgctatttttttagacagtcgtttggcttcgagagttctacgcgcctagaaaaacattttgccattgtctaggaaaatggttttactagtttaatatgaatgtgactaatttatttatcaagagaaataaccgtccaaatagtaatttattaactatgaaaatctttgtggtaatctaaacatatgttgtatagattcattaacatctatatacatgtaggcaatactagaatgacttacattataaaacagaggaagtatatttataatgagagaagggctaagaaccaattgggagtaattcatttaccgagggaagaataccaattgatagtaaatcaattaccgagagaaggaagtgggaagaaaaatcaagagtaaatcaattactgatagaaggatgtgagaagaaaaatcaggagtgagaaaatgtgcaaacaagagtggtgggaaaggtgtgggagggaggggcagaggagttaagggggagggagggggtgtacctgtgagagtgcgttttagctagcacacaccccaggggcgctttagcgcgtccctaataaaatgtgaatatatgtgttattatgtgagaaaaatacaataatgttagccacgcaatctacacggccatcattctagttatacatatactattaactgagcaaaggacatgaacaagtaatcatcatatttgggaaagtagtgtgagcttataaagaatttgccttcctgaccagtatggaaatgcagataaattgtcaaggagaattgctagctaaatcattcatgaaacaaatatcaatgatattcatataatccaacttaaaggtaaattgtgcaagtcgcaactcgcaagcgataatatgacattcagtaagcagtcttcgaaaaaagaagagaaaatcgtaagcctgcattcacaaggtcacagaacacaagccaactatgcgtacaagcgaagcaagaactaagcatggaaactgcacgacaatacaacttcgatgtacaagaatccatatatgccaggtcaagaagccattacaggtacataacctattaaatctaacaagcagtaaggaaagggctttgcaatgatggctaaaacatgatgacaaaacaaagatgatagatcactggtcaacaccattaataaaactggggagcacccagaggtactctagttgactgcaatggccttcagttcgcaggagtggatgactgtatggaacacaatgtgttgcaccaggaattggctgaccaagctcgactgcagtccaaggttcatcagaatcttcagatggtttcgcaacataaatgcagttactctttccgccccatctttcagggttcgtgcaagagaacgtaggattcctcctatcaaggctgacaaatagagcactattttccaacttttccatcttcatccacttggctgtttgagcagaaaagtcaagacgaaagacttgaaaggtgccagggaaaccatacgaatggtgaatgcctactgagaggtcaagcatgagaagcatgtcaccgctgatcaccagccacggcttaaaatgtacacccacaaacatttcttctccccacacaacccctacttcctgcatgctgagctgaggtgcaaagcgcatggtatggagcctgtgatgaaagtccatcgcaaaaaactcacctttaacgagcacaatctgaagaatgcgctcaccgccaaaagggtgctctgaccaagaattcgttccaacctgccaatagaatatggacgatctcgaacaaagtaggagatgcgatattggcaaattaagtggagcagtaaggatgccatagtatgtttccttgttgcctgcggattgtagtttgggaggcttcaccttagcgccagtgtacatatcaacaaggaggcaattctcataatatgagaagatgagatacccatatgaacaacccaaatagcgcatgcgatttggagtattttgtggagctgaacagcgaagggataaagttctcttggatggatcaccaagctgccatctgcatttatataaaagagtgtacctaaaactgctgcaatggggatgggaattaggtatatctggtttcaggtgaagaggtgggaaggtgaaagtatatatggatgggaaggaagataatgcagctcgccaagagcggcaagtgccactaaaagcaagcaagtcctggaatgagctaagcaaagcaatgatttggtgaagcatgctgtccatgagacctggccaaacatggggttcacacatggtagaggatgtagacactgatgagtggcaggttttcttaaagggcctttctgcaacagaaacttccctgtcaaacaaatgaaaaaaattcaggacgactggatcagagaaagcactcaaagataacattattagtaaagatttagaaatggaatgatattgatcacaatgtcggttcatttaaagaagcaacatgaattggtaacttcacctacagcttgggcatatcgagcaataggctcttgtaacatgctgaggcaaataattatgcccgtttcattgaactgtaacaattccaagaaccacttacagctttgataccttgaacaatagcacagttgtaatctgtctagtgttccaaacccttttttggcccctcaaaacaatgacagaggggtacgttgtagagcaccctcagaacaaatatcaccaaaagtgatgaaaatatttattccgacaacatgaatatgcgggcaatgcatccaatttaacaggaaaaaaaattgtaagcgcatttgattaattcattaatcgatcttgctcctctcgcggcccaatttaaaccactactggcagtgctaccatacaagaatgtcaggtaccataaacgtcctggaactatgtaatcgactagaatcgtgtcgagaccgcattaaattgtacctaaatttgaacaccaaatatccatcatctcccactataccaaattaccaatagtttcacacctcatcactgaacaacagaacaagttatgcactggtgagctagctcaccctacctagttcatgacatcatgagacgaaatcgctatcggcgcgtggtatacgatgaatgagggttctttgtcgcctcacgatgatttgacgcacatccatccactcaggaacatcgaattaacaaaggtgaaacagagaaggataaataaaacaaaccaaatcatggttagggttgcggtgcggacctttggccgagagcggtgagctccgttggcgagggctcggcctgcggcgacggcggccgtggtcttcgccgctgccgcttacggcggctcccgtccatgagcgcttgctaacccgtagcttccccggatgcgccggtgaggagaccaacccggcggtggcgacggcggcggcggcggcggcgcgtccgatgggagtggaggcgaggcgaggaggcggatgcgtcagcgaggtgatgatccatgggaggcccaaccaatccagcccaacttttgatttgggcccacattgctaggcccagttaagaaagcccaaattgggcccacgattggaggccataaaaggagcaggagaaggggagtgagagaggggctaaccgcaccgcacgccgacatcgccggagagggcgccgctcgccggcatagtcgtcgccggagactcgtccgtccatccgcaaggcctgcaaactctctaccttctcccccaaccttgtcgcaaccaacacctcatctcgttttttttttttaatttttatttgatacatttctcagtttctcctcgtgtgtgtgtctgtgtcactcgtgtctccgaatccgatcctaaccgagaagcgcgtcccgtcctgtggtggtgagatctaccccgcgttggtaggggtggatcttgcactggattttgttgttggatgtgctagcgaagaaccctagattgacatggttgatcacgtaggtttatgagaacggcctgatcgtttgcaatgtttaaccaaactctactatcttcttctaatatattgacgcgcaatccttttgcgcattcgtgaaaaaaaaaacgtaggtttatgagagcgtataggtgcgcgtgcctctactagtgtgaaaacaaaatgcgcgaaattggatgcaatgtggtgattcctgaacagaaattttgatgccatgcatgaatggggatcc

SEQ ID NO: 11899 - DNA, 2893 bp, Oryza sativa
cattaaacacctaagttcccgggacttgctgagtacgaaagtactcacccttgctctataaatatatatgtagttcctccggcctgaagagaagatatagtgaagtgaagattagggtttcgtcctggttcccagccgtcgcctgtggtgttgggtgttagtccgttggttccgctgctgctgctgttgttggtgtttcctcgtccgtgtcgtcggttgtattctcgggctgtctgagctgcaacctaagttaaggtaaataagtcctctatttatattaaggattgctatgattcatatttgtcaccgtgggtaccagcactatgtcctgggactggtaccgagatcgcggtttcgtaggaagcggttcgcgccgtttttcctacgacacgctcctatcaggtgccgttgtacggcggtatcagattggggtgtgacaagagatggtatcagagcataggttggccctaggatcgaaacccctgaataggatggcattatctgaatacaaaaactatttgtgaaagctaaggtgtcgttgtcccctttagctctagttttgcgaaaaatcttttgtgtccaaaagtaaaagctagtcgttcgttttgacttttatcctagagtaaacctatcttcacgcccagttgaagaaaggtgtgctcaagcctttaggagtcttagttaagcccttgttggtaggctaaccttagtaccgccacccgctcggtaggagttgtggtgaactagtgcgtgtgtgagttttgtttggtagtccgtgttcaggtgttaaaccaattgggttaccggctggaacacaccacctatgtcttctgtgatttcaaaaaccgtttagatgtagggttttgattcccctcttttttaatcaatttctgggtgggcagatctcagcccttaaaagcagatgggacgtgttccacccgtaagatccgtgcccctaaccgctttggttttgaggaagagccagtccagccagaaattcccgatcaaccagttaaccaggcagatgagcaagaagctgagagtgatcatatggctgtttccggatcagttaatgatgtctcaagaggtaaccgacccccgccagtggactttcaccaacacatggccatgcaaacacatataatacaaggaatggttcagaatataattgctatgcaacaacaacacacacaagagcgtcaaccccatatggttcaagatgatggccaatcgaaactgaatgatttcttgggatctcgtccaccggagttctcccaaacaaatgagcctattgaagctgatgattggattaaagatatggaaaggaaattaaatctggtacagtgtactccgcaagagaaaaccctttacgccgcacatcagttaagaggacctgccgcagattggtgggataactactgtgctacccatacagatgctagtaccatcgtctggacagagtttgcaggagcctttcgctcagcacacatccctgaaagcataattgatttgaagaaggaagaatttgcaaatatcaagcaaggatcctcttgcatcaacgagtatttgagtcgcttcaatagattggcccgatatgccccagaagatgtagacactgataaaaagaagatcagaaaatttttaaaaggaatggacgcgaaactgcaagtgaaacttttggctcacgactttccgacgtttcagcaaatggtcgataagtccttgttactagaagatgcagaagaagagatgcaggaatacaagagacgcaaagtaatgtccctagagattcaagcaaaagaaggtttgtgtcgaaaaacaaacttgccagcacaatactatcagagagcatctcagcattcaaatggttccggttctacgtctcgttcgactatgtcagaacctggtcagcaagccacaatgatcaacagtaatagccatgaaggaagcaactccgtaccatgccctacaccttcaaaaagacgtggttataaggcaggagtcgaatgtttcatctgccatgagatgggacactattcgtgggattgccctcagaaagccaagataaagtgccttcacaaagtcaagacaaagccagtccaaccaacgacaattcttcccaacatacctggatcaaaaggctcgaagtcaccaaacagtggttctgcctcattgacctcactgcccgttggacaaggtcgtctgaaccatgtgcaagtagaaacaaatgaaaaggttgtgaatctcgagcaagttgaaggagcaggagaagaacaggttccacaggcaagagcaaagccacagtaagatgaagaatgctaagtgaatcaagttaccagaccgttttgtggcaagtacgcaacaataagttgaagaaagactagcagagtctgaagctgtgaagaagtctgaagatcccttttggtttcgtgtgtgtggtccaccttcgaatctcggggtcgagattcttgtaaggggggtggatctgtaacgctccgtttttcgtgagtcgtaaaaaaaactaatttggcaaaatcctaattgcgaaaattttcgttctttgtgtgcgagtctaagttgtgccaagatctcaattcaaatcccgttgttccctctcatcgaaatcaaaatcctccgccttaaatctgctatgccaattcaagtctccgttatctaaatccgaaagtcaatcccttcctttgaatcctcgccaaatacatttccaaatcccaaaatgtccaaacccccgttttgtttcctttccttgactccaccctatgttcccgagaacaaatacccaagttttccttttgaatctttcccatgacttctccttgaattccccttgatacatccctaaaccctcgagttcgaatatcaaatttgaattcga

SEQ ID NO: 11900 - DNA, 1976 bp, Oryza sativa
ttccttccaacaggagttctcttcatcagttcatcgtttggaggttcagttgccaatgccagtgctcatagtgtgtccatgatcatgttaacccagagcagttggacagcagtaagaggagcactccctgaatgccaagcagaagtacaaagaacagtcaagagtaagttatgaaacaaactaggaaattcttgattttccacattaataaattttatgttagtttatttttttaagttttagcacatctcttctgccactcatttgaaatctaacgaaaaatttctgctgcactaacactaaacagtatttgaacttagaaacagtaggcagcagactaggaacagtggtgaaggagaagtataaaagatgaacatgtatcagcagtgcagttattacaagaaaccaacatcaaaggttattttaatcggaacgaaactatcaattctatacagtagaatgaggtaaaaaacatcaacatttagctgtacctgtcaagcaagctgaggagaagttcactatcagagcgaccacattgactgtcagctgaaactgcacaaacttctgaatattaatgtacactgaccgaccccatttagcaacagtgactatagtggagaagttgtcgtcaagaataatcacgtcagcactttcttttgccacctgcaaacagatagcacagtgagaaattttgggagtgaaaaagtgcatagaactatgagggcatgaaatggatggtagtacaactcaagacaactaaattagcggctaaattgccacaaaaatacacttctaaaaaaatcgaagtgatgcaattcattaattatattggttcatgcaaggggaacacttatcaactaatctttgaggaaaatcacctcagttccagcaatgcccattgcaagtccaatatcagcttcatgaagagcaggagcatcatttgtgccatcaccagtaaccgcaacaacttcatcaaaagtggtccggagatgcttcaccaaggtgtgcttgtcaagtggtgaagatctagccatcacctgatacatgaaaccagaacacatcagcaaatgaaatccagaaaattcagttaaactgaccagcaaaagcaacgaaaactttacttgtatttttggtatcaactcattcagttcctctgcactcttggttctgaaatccggtccttcaatggcaatgccaccttcagtcaaaatgccgcattcccgcgcaatcgccttcgctgtattgatgttgtcacctgtgaccatcctcaccatgatccctgccgacctgcagatggcaaccgattccttcacaccaggacgaactggatctttgatccccacaatgccaatgcaggtgtagccatcttcaggaatctggtcattcgccgagaacccgtcaccgacatcgacgtaggcaaggcacaaggtacggagcgcctcgtttgcaaagctgttgatcgtggcgttcaggtgagcaacggttgcatcgtcgagtggcacgacgttgccttgatcattcaggtacttgctgcaagatgccaagatgatctctgacgcgcccttgctgtgtgcacgcattgctcctccggggagctggatgaccactcccattctcttcttggccgagttgaatggctccaccttgacgagggtgctccgccttgcgcaccggccaggaagtcgcccgccgagtgagaggcccgaactcgaggatggccgtctcggttggtgtgccaagtatctcgcgactcccgctcttgttgaagacgacgtcgccgccggtgttgttgaagatggactgcgagagcaacgtcatggcggactccggcagctcggagaacaagctcttggtgtccgaggcgctctccacgtctttgatcttgccgcagatgcatgccttgacgacggtcatgtggttggtcgtgagcgtgccggtcttgtcgctgcagatggtggtcgccgagcccatggtct

SEQ ID NO: 11901 - DNA, 1854 bp, Oryza sativa
gtcattagtaaatgtttattgtaacaccacattatcaaatcatggcgtaattaaactcaaaagattcatctcgcgatttacatgtaaactgtgcagttggttttctttttcatccacatttaatgcttcatgcatgtgtccaaacatttgatgtgacggaaaagttgaaagtttgaagaaaaaagtttgaatctaaacacggccaccatgctcaactgcaatgtgttcggcacccaattttcccaacacttcttcctcgttttccacgtgcacgctttttaaactgctaaacggtgcgtttttttgtaaaacatttctatacgaaagttgcttaaaaaatcaaattgatccatttttagaaaaaaatagctaatacttaattaatcacgcgttaatgcaagcatcgttttgcgtgcatgggaggaggggttcctaactggaaaaaaaattagctaatacttaattaatcgcgttagtactacttgattttacaaagtgatgcagaactttgtcctggaaactgttgtggaagcttcagtactgcacaaatgctgcaccttttacatgtgtatatgtgttgcagacttgcagcagacgtgtaacgtgtttatactttatacttgcgattttgccagaagaaacatagtgtggattgtattattgtaagtttgtaacagaggaacatgttactcactataaattttgtttgccagaggttatggaaaattttaaatttaccatgttcaagggaggtgctaaacaaaatcttaagttttcagttaaaatgatcttttttttaagatacaaacttcacaaacagctcaatggataacagtgaaacattcaaactggataaagattaaacagtcaaacaggtacgtttgaatatcatcttttttaaaaatatttttttcttgatcaatgcagaatcaggttcacatctgaaacagtaaaatctaatcgaacggcctaaaaattgcagcttacactcagtaatttacagatgaactaataaggcctgacagccccagcccgtaatgattttcattatatatatatatatatatatattacgatagtttacacatccgaagtatgccaagaaaagcggtggcaatggcaatggcaattacgacgccgatgcaacacacgaacataacatatatcggcgttgaatgcggcggcagttacctggttggatcgcttcatggcggcggcctcggatcgcttgtcgaggttggcggtgaagcggaaccgccgcttggggttcttgacgacgccgaccaacctgcgccatcgccccagatcctcgtacgacgagtgcttcgccttcaccccgccgaaattctccttcaggtagctctccattgcgcctcttcaacctttcccttacaattgggtcccaatccaacgacccccttctccgatcttcttcccaacgccaacccaaaccctttctatatagccaacgcgggcattggtttctttcgcgaagaaacgcgtcaactcgcacaatggcgttcgtgaaggcgactctctgacggcaacttcagcgcaattttttttgtggggaaagtgttcggctggtcggaatcatgggagtttatgcgtagtttcctgtgtttttttagtaagtgaccggacggatgcgagtaggaggaggagggagcagcagcgggaggggatgcgtgcatgcatgatcgagagcatggaggggcagctcctctctcgaagttggttcgctactgacaatgcgccggcaattcaggggtcaaaactcgaaacgagtcttggggggcaacttttcaagacattccatgcagctatgctgcacgtacgtacatgcgtaggaga

SEQ ID NO: 11902 - DNA, 2626 bp, Oryza sativa
  unsure (1)..(2626): unsure at all n locations
atcttacttattctgttaataatcagagaagacaaggacacaggaaaatgtgggtagagcaccgaatcccatttatcctcgcgaagtattttagccggaatccaggtccagcggtcaacgtcgccgtccgacgcaaatgggaccgcgctcgagaggaacgcgcaccgcgtcttctccgcggggcgcggggaggcggaaagaaacaacgaggccaccacgcccacgcgacgcgcccacccacttctctttcgtgtcgtgcctcgtgcgttcaacgagccggtcgttcccccgcggtggtgtgcctccctccgcacggtcgtaggcccagaccaaacggcggaacgggaggtccgcgacatatggaataagttcattttagatatctcgtccacacgtcgagtttgaatactgtcatgaacctcgataccagatatagggagagtaccagatcgattagcgtccctaagtggtttcgatgacgggttcatcctaagtggcggcctatgtgacattttagttaggaaaaataaaaaaaggtggtggccctaacatgttagtgacacacccatctcccccttctctatgtgtttgtctctaccctttctatgcccttaattcagattccactgccgatgctgacggtggctggtacatagcaactcggtaatgtgtgtttggggcgggatccattggggtacttgcggtcgcgcatgcagaagaggcactggccccgataccctaacaacgtctcatcgatgatggggacgggggcaggcagccagcggcatgcatgcataggtagtgcaccactagacaagtttggcaccactcccaacgcccaaacaatatctatgtgatgatgaggacgggggtcaggtaaccggcggcatgcacggagaggcagcacgtatccatctcctcatccatcaggtggaaagtggaaccatagcaacatgtccagctctgtctctgcgtcacgcacccgccacgtcacacccttgggctctcgatgaaggtagccaaccaactgctagatctaggcatcgtgcggtgacggccaagtggagaggtcagcctaaggatgtactactctagtagatctcgtcgctagtcaactactcagtgcggtccgctctgcaattcctctccatcgccgtgccgctcggtgctcgtgtccccagccacgccagatccagtcatccggtggcacgcaggtcactgcccctctccccgaatctacactcaccccatggcctcaaggaccaaatgtgagcaggaggtgagtggatgcttcaaccctccctgcctcatgcatccatgcatccccgcctcctcttgcacccgcgcgtgcacgcgcccagccaagatggcgagcgaagctcaaatcgagcgtttccctcgggcctagctaggaaggtaggtttgcacaagtggaatcaggtccaggagcccgtgcgagaaaccaaactcgcgctccttgtgagccaacccatgtgtaggtaaccaaacacgctatgactgtatccactgcatgtggcgactcgatcgagccatcaccgcgttcggaggggggccgggcttcaggcctncccctccccctcctcatcctgggaaggcctatattcgaaactccaaggcgagctaactacacagccacaggcatctataccctgtacggcaaatctgagagacaatcaggaaacaattacaaggtgtcaatgacgacatagtacaccagttcctgtctccttttcctcggggagtgttttagcggaacataatcttttgcagtcgactgcgccgtgcctttattattgacatgtggatctgatgatctccggattcacatgttagtgataaagtcacggtgcactcaaatgttgaggatctcaatcctgttttagcaggactctcaaggtccagggtcaacgtcatggcgacgatatgcgaaggagtactgaaggaccgcgcttttgataggaacgtgcaccgcgtcttctccgcggggaaggtggtggaaacgacgagaccacccaccactgcgctgcacggtctgcacccccacgcgcacacgttgcgtgttctggacttcccgtcgttctctgcgatgggaaaagccggaaagtgaacggcgcatcacggtgacgggcctccactccgcacggtgtgccgggaccaacccgagcgcctcgcagcgaggctcggtccaaccaacgggtggcttgagtcgttcgtgcatcgtgcattggaataagtccactttgactcccttaaaagtgacccgaatctaatccgtgaccctcaaccataaaaccaaataagcgactccccgaactattcaaaccagtgcaatttgactccctcattggttttggacggcggttttactgacgtggcgctgatgtggcgatgttgacttggtttgtggtactgacgtggcgcttaggtagcattagaattaaaaactatatgggcctatttgtcattcacacaaaaagtaattataggacccacatgtcatccctatgaccctatctatccttctttctcctccctctctcccttgagatttgaaaactttcagctcgagatttgaaaattttcatgtctaaatttgaaaaattta

SEQ ID NO: 11903 - DNA, 1404 bp, Oryza sativa
cccccctctgctttcatttcacgaatcggatcgcaagaatctcatttcatttccgcaatctcgtagtcattagctcggtggggtaccagccatcaacgatcgctctagcagcaatcttcatcgctcggaacaagaagacggcgcctaatctagacgagctcaagtcggtcgtgggctcgttatgccagcaaatagacaccgtaagcactaacactttctcttttgcgagatctcatcccattaggtttaagttcttggtagaaatgacaatgtcgagagtaaattctgcaacgctgttgttctcttgcaggggcatgtgtattcctgctacaccaagatgatgattcaagaggacaggtcgatgcaatcgacgacgggaggtagcttcctcgggtgtctctgttgcccacattgggggatcggaggacagcgccatgggaggggccaataatgccaccaccttggaggcaaccccggacaagaagaggaaaaggttgcactcgcctcagcgccagtagagggaggagctggaggctggagctggacagcatgttggttggagtccagctctgcaatttttagttgatcattttcaccctttttcttttgtttcagctgagccctagtcagtgctcttgcaagttcagggggggttggccaaatggaggggccaacatttgattcttcttctgattatgcaattgttacagttgattgattagttagcaatggaaagattctggttttgtggagatctttccctggcccagaaaggtactagtgtaaagagcagaggaaaaggcctgaaaactgataaagagctcttgctcaaagtagggaggaagtcctcactgagatgtggagacagagagagggaatcccaattcccaagtattgagtagaagtcattttttgtggatactgtatggttatctgttactctctgttgagtcatgccattttggttcattagcaatttcctgatgctaaagccaaacagtggtagtacatttttgttgcaagaactgattgatagtagttggatagccagggggcaggggccatctctctcactgtacttcactctactctctcgtgtctcgtgtgcaattgctgaccatgagtggttgggaattgtttattgatatcttttggacgaaaggaagaaatgcgtttgctcggtgcctttctgatgttgcctttgtgccgcgtcatcaaatcaccctgccttgctatttctcacaatggctttgctgttctttgccttcttggaggtgactgacactgttggtttgtctctctcgcatgaaagcagctgtaacgctgccttctttagctctctctgaattgtgcatcatgcaatgcaaatcactactccagtagtagtacactccactaggacac

SEQ ID NO: 11904 - DNA, 1240 bp, Oryza sativa
aaaagcatagtttctgcctttttatctagcaaatccaacttatctaaaatccccttttttttcttttttgtacaagccactagtatgtttagaccaacccctaagatgctgtcttaaacgacgaattttcgcctgccaccgctccatggcagaattgcgttcatcaacactagaccatatctcctttaccatatcaacaaagccatcacgtaaaagccaaccaaattcaaacttgaaactatgttgagcattactcaaagaagaagtgtttgtatttaaaagtaaaggagtatgatcagaaatatctctattaagagccaccacagaagataaaggaaatttatgttcccactccgtgaacattaaaaccctatcaagtttctcatatgttggattcactaaattgtttgcccaagtaaatttcctaccagacatctgtaactcccggagacataacccatcaataatagcattaaaaaggaatggccatctatcatcataattatcattattcttttcatcagggctacgtacgtagaatattaaaatcaccaccaataagaattggtaaggtttcatgactgcacatattaactaattcagcaaggaattgatccttaaattcactttgtactggcccatacaccagaactaaagcccacttaaacttatcaactttattacataaatgaaacttaatgtagaaatctccctcatcaatcaaaccaatatcaacattaattaaattgatgcccaaaagcaaaccaccggacctacctctatgaggcttgcaatgccacaaaaattatttgccagcacacagatttttaagaacagccggactaaaatctttcttaatagtctctgacaaagcaataaaatcaaggtgatgttcctttgttaaatcagaaataaacttatgttttttcgggaccttaaacccatcacaattccagaacaaccctttcatttaaaaatattctttttttttctttccccttttagtctttttcttactattaggagaggtatctaaagaatataaagtggtctaagaataattatcatccacaccactaaaatccatcacctcctccattaattcaccacacaaatgttgaagtagagaattatcatccacctgatcatccaatatctcgctatcaacatttgaagtatgtacctgattaacagaagaactaacatattcacttaacatcttttcctctatactctttaa

SEQ ID NO: 11905 - DNA, 683 bp, Oryza sativa
ccccgaccaggacttcggcaagttctcgccgatgcccaccgtcacgttcatgtcgctctacctcaactccttcaatggcagcttcccggagttcgtcctcaggagcggcaacatcacctacctcgacctgtcgcagaatactctgttcgggaagataccggacacgctgccggagaagctcccgaatctgaggtacctcaacctgtccatcaatgcgttctccggctcgattccggcgtcgctcgggaagttgatgaagctgcaggacctgcggatggccggcaacaatctcaccggcggcatcccggagttccttgggtcgatgccgcaattgaggattcttgaactcggcgacaaccagctcggcggggcgatcccgccggttcttggccggctccagatgctgcagcggctcgacatcaagaactccggccttgtctcaactctgccgtcgcagctgggaaatctgaagaatctcattttcttcgagctgtccttgaaccggctctccggtggcttgccgccggagttcgccgggatgcgggcaatgcggtacttcggcatttccacgaacaacctcaccggtgagatcccgccggcgttgttcacgagctggccggagctcatagtgttccaagtgcagaacaactcgttgaccggcaaaattccatcggagctcagca

SEQ ID NO: 11906 - DNA, 657 bp, Oryza sativa
atttgagaatgaagggcacctatatgtgggtacagcgtgaagttgccttaaactatttgcttacctgagctgtacatcctttccgcctacctacatgatccatactcttaatgtccctaacccagtcgtgtgctacaagctgcatacggtccttggttgcaggaacctgtaaacgcccgtaagaaatgcactatgctttagttgcctgctatacttcagaattaagaaaacctgcagtgccacttttaatgtttggacctttgatttgtcatgtggaaagctctcactacgaactttaaagagctcgctctcatggactgtccagaaggtacggcttttctcatttgcatgccgacgagtaatgcccgaactacatcacaaacctattggatctgtatcaaccattataatgacgatggatacagttgaaaaatgatgcttcatctaggcagattatgcacatatcagactaatagaacctgcctgtgtacttatcatcactggcagagctggtaggtgcctcctgtacatgaatcacataacacttcagtgtgaagtgaatcagcaataaaactctcttcaaactacaagcttaggacaaatgtaagtgttgtatgtatttttgacctcaagattagcttcaggaacttgatagtc

SEQ ID NO: 11907 - DNA, 1109 bp, Oryza sativa
atatatagtgtgtcagctagtaatctagaaaaggaattatctcttctgagacaggaacaagaatatctcggaaatgaaaggcggaagcttgaaagccacgcagagtctgtcagcagtgagatgtttgctgaatgccaggtttgaatacaatcaccttttccctttgagttgaggcaaggtttacctcagaattgagatttagtggaagtttgaagtaaatggttttagcagtacaaaatgttaacatatgtatgtcttgtattatacaggaattgcttcaaatgtttggcttgccatatataattgcacctatggaagctgaagctcagtgtgcatacatggaaatgactaaccttgtcgatggagttgttactgatgattcagatgttttcctgtttggtgcaaggaatgtttataagaacatatttgacgataggaaatatgttgaaacatacttaatgaaggtcaattttctttctgctttcaattttactctcatttttatttcattgccagctgaagcaatgggaagtccatgtccttgctggaccttccacagctaatattgtaatacattttcaggacattgagtctgagcttggtctaacaagagaacaattaatacgtatggcaatgcttcttgggagtgactacactgaaggaattaggtgatatgctaacaagaatatgtatcctgtaactttttttgcagtttgtataaaaataagatcagaacttcatttttgggggatcctctagagtcgaattttaggcatgcaagctaatatgaactaaaaaacttgctgttccagagatcaagtgcatgctctgttttgttggacaaatttgttatgtatacagtcattaagaatacagagcattgtactttaattatgccatctcaatttcttattttgaaggggggaaaatgccatttcagtttctgttttgtccagtgtatttatttatatactgattatgcagtggcattggcattgtgaatgctattgaagttgcacacgcatttcctgaggaagatgggctccaaaagttcagggagtgggttgaatcacaagatccaaaaaactggaaaattggttggaaagtgg

SEQ ID NO: 11908 - DNA, 2050 bp, Oryza sativa
cagcaacagtaagtacaaaaaaaatgtacaattaatgatctgattaatctttcgtaataatcggattaagattcctgacgatgtgtgcatcaggtggtgcagaagaagggtaataagaacgcgcagtcaaagaaggcgcagaagggcgcgtgcagccggagcagcaaccagaaggagagcaatggcggcggcgacggcggcaatgtgcagagctcgagcaccaactacctctctgatgacgactcgctgtcgctggagatgacttcgtgcagcaacgtgagctcggcgtccaagaagtcgtcgttgtcatcgccggcgaccgggcacggcggcgcgaaggcgagggccgggcgcggggcggcgaccgatccgcaaagcctctatgccagggtaggtagaactatgcgcgagttgctgcacatttttgttgctcatctgaatctgaatttttttttaactgtcttgcttgaacagaagaggagagaaaggatcaatgaacggctaaagatactgcagaatcttatcccaaatggaaccaaggtaagttacttaaaaaccatctgattccaaaaccgcatcaatcacaatactccacaaaagcctccacgatactgaattgctctgatcatgcgaggacttgttatttttttcaggtggacatcagcacgatgcttgaagaagcagttcactacgtcaagttcttgcagctccaaatcaaggtaaccataagacccctgattcgaatccaagagcccaagttttgcttcaattcgcgcgttggtctctaatcttccataagctaaagcaatgggattcatcgttttgcgcagcttctgagctcggatgatatgtggatgttcgcgccgatcgcgtacaacggggtcaacgtcgggctcgacctcaagatctctccaccgcagcagcaatgatccacgtactccagccatggcgccacggacgctagctcaagctatggttctttgcagctggcgcagaaatacatatttttttttcttctacttctgttgatacagtacatttttccatcctgaatccatttgattcattcccaaaggatggccaaccttaattatatacctcattgatcgagttcttttttaccatttcgctccttgcctcctcgtacagcagatcctgccatggaagaacttatttttgggcaacggaatgtgaaaactactgagaaattggcagaacaccttcgctagtcggtttactattcttaaaagaaaagcaacgagagagatgaaaggaaaaagtgagcgtgaggtctcttatcttgtcatcaagtttcaaaatcatccctaaaccgaaatactagacataacacatatctaatcttgtaaaatcagatcacattaggtcccaaggcaatattactcctcggttttgatgatgtggcggctgagtcttattccatttatcttctctctctttccatctcaacccaaacctctggggcatccgacaacaggaggggagaagagtagcggccgttgggcggcgacgccaagtagaagcctgacggtgacggccggcaatgggtgggagaaggctggcgaccggcgagaagcttgacggtggcgggtggcgggaaagaaagcggaagcgttgaggatgacgcgaccacagcgtggagtaaatggagttgacctcgaagatgatgcagtggagctgtgcgtgcgcctccgcgggggagagacaaagctcgaggacacctaaacaaatcggcttttgagcagctcagtggagatggctctgagtttggggaataagagcttgggcagcatgacgtggcggaagccccagcccctgtgtgtgcaggtgaatacattgcaattgcagttgggtgcgcagtcaggtacatgacacgagcactcccggctattgggagccacactagccggcagtctccgccgtcgagcttgtccccgccggctggcacccttctccccacccgttgtcggctgccctagaggtttgggttgatatgagaagagagtcgagagaggtggaagaaaattgatgg

SEQ ID NO: 11909 - DNA, 692 bp, Oryza sativa
ccgattccatcctcactgcaccctcaaggcgtgaactcagaattcctcaattaatataaaataacggtcaactttctagcttgcttttaaatgatttttaaaatgtaaagcaatttgcaggaactggtatcaggctgttggtgagaatggaaccccaaagcattcagctgaaatgtccaagtaagaatttcttttccgtcccttaattcttgaggattttagttcattacactacttacaagggatctgcaggcatttggacaagcaaaatcaagccctaatggaaacttaccgagcaatgtcccacgagttgcataaagttcaggtgagctttatatggagagtattggagtatgaggcgtcactatgtcttggaagtaactttttagatagtaatactttgaaaatgttggtctgtacaggtggaagaagaaacaatcatgcgcaagttatatgagctgatgtctgcagaaggacttcttccgaaggtatgccgctcaccgacatgctaatactttgaaaatgaaatgttacacttctgatgctattttcccctaaatattctcttggagctgctgacctcatcattattcttccattaagtgatctgttgatatttcaccatgaaccaaatgctgtagttcattatagatgcaagagaaaaaaagaactaattgaaagatgatgggaga

SEQ ID NO: 11910 - DNA, 4531 bp, Oryza sativa
  unsure (1)..(4531): unsure at all n locations
ccgcacgacgaggtggtcgcggccgggctcggcgggcccgacgcccaggagtcgcaggccgtcgtcgacctcctcaacgatgccctcgccgcgctcctccgcgataagccccgcgagttctggcgccagggtaaccgaaacgctcgcttgtgcattactgtgctcatgaaaccgtgtagctggaaggcgtgaattgttattttgggattgggaaatcagagctgaaagcttgaaagcgataactagttaaccacttaatgttcggtgtttactgcttgtttgcttcaattgtgtttgttgaatgcatcttctgatgcttcggtctctgtgattatctaggctacggattatgtgtaaaattctagtgtatgcttgttcaaatgtcagtttgcacttttaagcgcaagataaaatgcgtgcagttaaatttattactacatttgcagttgaagtggctagtagttgcataagcaaagcaaagcctatgcaatcatattcttatcactatcatgacctatgatcctttgaaatagttttaatgggaaggaattaatcctagtcccttcagattgacaggaacttcagattgacaggaataactaccctacaatcagaggaatatggcattttttcttatgcaaactaagcctgaacaataattgagcgagtagatgagtcaacataaaagcttgagttgaggacacgcctagatctgtgattatccattgtttcactcctagaatttaacttatgaataaatccgcgtgcatttgaactttaccaatggtttcctaatgcttatcgttaccttttcccagtggcacagaatacttccctgcatgagttcctggacagttacctacaattcaggcatcggtggtatgacttgcctcatcgtgcacccaaagggacagttgctggcttagttgtcggggagcttgagctttgccgtcgagtctttatggtcctgtaccgcatgtgagatttataccatttcgctatctttcttgtatacatatttttcataagataatgcacactgttcagattcacatgagatttgtcatgatatggctcttgtttgggtggtagatcttcaaacaaggatcctggagcattcaggggtgaatcccttagcatgaaggagcatgcaggtgagattagaactactcatatgatcactgtttgagtttacctttttttagagcagaatggatagtgaccattggttcaaatatactatattcacgttgttcggttgtagccctcctgcaggagaaaagattgcttgatttacccaagttgttggacatttgtgctatttatgggcatgacaattgcaaattgacaagttcactggttggttcctgaagtgtttattattgttgttgtttttctccttttcattttgcagacagatgctaacttaaatgcaaattctaattcattcccttagtctcagataacctttttctattcattggcatgaatacttttataattttattaataacaagtgcacattttctgtatctgtaggttgaaaacgctatcaatgtccagcnnaatatctgnnatggcataatattgtcctcnnccanttctgggcattttccacacaatgcagagagggtgcatgaaatcatacaaggttattttgtgatcttcttcataaatcactgcacatagctgttataggattctgtattcctttatctggtatgaacatccatatgatatcattataacagctgttttcactttagtctgtagtcccaatcgcatatgctaaaacttttatcgttttctgcaaaggattcaggttattcatttgtgctattgacgaatatacttgttattacttgttatatctgttattgtttcaaatactttcttcccagttcctttcaacaaccatgatacattgcttggtaggttagatagaaagtgacgattatgatgtttactattaatttgtctctgtttcttttttatcctaaattgagattgaagtatgttttctcaccacgattaaaagttgaggacctatgatattgatataaacttgatcttgtagtttcacaccttcctgatctgatgacagtttagtagtttacagaagatcttggagaactatgcataaaaagaacttaaccataataaattcattttaggcgctcacttcatctggacggaatgatagtggatatacccaacttcagaaagatttctcacaggcaagttttacctatactgcatagtttatgatatgtctgctgtcctttcatctgatttttctatattgttgtaaaaccaacttccttcaggtgttggattttgtaaacgatgcaattgtcactctggatgcctttgtcgatgcttatcaacctgctgctttattattttgtacctcttttgagacgaggtgcgcttctactcatccaacacaatatttgttcgctgttcccttaataggcaatgatgcttatctaccacttaatttgcagctatggagttgaggaactactgaacactcttccaagattgtatgactcatttgtgccatctttgcttcatgggtttcaagttatgtccagttcccaaagcaatggagagactgcatctgacattatactgagtgacatagttcttggtataaggatgctgtcaaggagaactgtcagtttcgaatggagattattggagttctgctatttgaacaatcaacttgtggagcgtgatgttaaagcttgtacaaagatgtttccagctaaagtcgaagatctatgatcaggggtgacatcatatttcaaacactcaaggatattaatagagaagccacattttcacaagatcatcctggaagacattcctccaagctcttgaaaaggagttcaagttgatgaaccggattggagatattcgcaagaaaggtaaatgataaaaaatctcaattaaatgcttggttattttcatgtttgtaaaattccacactttcttagtatcccactattattatttcagccaaaattgtctctttagtttttcatccataaacaacatatacgatctaggaactttattcagaagttgtcatacaattattctacatatatgtactgaattgcctatgattctatattctgttactatgcctgctctcgccatctatgcatgagtggttcttagaaagcttaaaacttccagcttgatccagcatattgatctcaatgaatggaaagagaaagagccaaaacagaatcttatctatatttatatctatactacctaaaatgtatacgtgggggtgtctgttctgccacaccatccttaccactgacatttgggtcccacaatctatactattacatcaccctccaacaaaggcttctatttcactgctggttcttcccaacatttgaatcacctacttgttcaataaggaaaatcataaaagtactacttggattaactatgtgcttaattgattaactagaaactcaatttgttttccgttgcaacgcatggacttttggctagtaaaaggaaaagatgctctagcttctggtgtttggtctcataaagtcaccaataatattcccgtattaccctacatttgatttatttctgctcgcgcttgatcattctggcactcttgagttgtgttcataagacatcacttttccggttttgccaagattctgttgtgaagactgaaagagtttgctaaactgtcagcattattctgttgacatatatgctgtattttcttgttatctcaagtttattgattgtgtcatagttttatattgatgccaaaacctttggttgatgtattcaatatgttcctccaatcgtaaacaggatggatacacatggatgatgagcagttccagttcattgcacgcttgtgtggatctactctgacatcttggaatagtgtgcctgatttgcctgtctcttcctatggtggtgaactacaacataagaatgaggatactgccatcactgagtccaagattactcaaataagggacctctttcctgattatgggaagggtttcctcgctgcatgcctggaagcctacaaccagaacccagaggaagttatccaaaggattttagatggaaccctccatcaagatcttctagctctggatacttcattagaagagatgccgcagctaaagcctgcagccactgttgggaaagataagggcaaaggaatacttgtggagactgagcctcaaattatgaacaaaccccataaggttaatactgagatgcatcgctatgttgaacattcttcatcttcttcagttccatcagcatcccagggaccatcctcatctgtaccatcagtcccgcaaggtagatttacaaggaagaccaatgacgacgtgcctgactctgcaactctagactcacagaaagcaaaagatgctgttagatcagctgtgcttgaatcccagtatgaatatgatgatgagtatgatgactcgttcgatgatcttggcttcagtgtggtaga

SEQ ID NO: 11911 - DNA, 600 bp, Oryza sativa
tgtatgcaacttggacttggtggtttagaggcaacaacactcaagactaaaggatctactgtcggcagtggccgcaacgacgagcggcggcaacaggcagtggcatgtggagaccgcgacgagtggcaggcaggtgacgacctgcgacgaggaagacggatgacacgctcgacgagcaacaggcgtgggacgacgacttgtcaacttgatgcggcgaatgagggcatacaacgacgacggttggccctgcgaagcgcaccggtgaggatgacgacagccagatccacaacagccggcgaggacggagttgcgattgacgacgagccgcagctgggggacgactgggctgatgacatggacggggttgccgtcgccgatgcgcgtggatgcatgtggacgaggcaaggacaatgctcctggctgctgcctgcaacttggcggatgacgacttgatgagacgacgaacgacgatgctgtgcctgcaacttgacgaagatgacggatggcgacttgacaagaggacaagacgatggctcgccgacggcgagcccgccgccggcgcgccggcgagaacatcagatcgacaactagagtttggat

SEQ ID NO: 11912 - DNA, 1202 bp, Oryza sativa
ctaaattgcctgacagatcatcataagtagtagctacttttgttgcaaaacggcgttcaactcttgcattcatctgcagaacaaaggactagaagtaagtagtagttgctagcacaaagaagctactctattgagccccttaaaatttcttgtatatcattttcttttcggcgcaagctagatggactaaaattaaatacaaataagtaattttcatggcattactgttcccgacattgctttcctatacgtccaggcaaagcttgagcaatggttaaccatttcttcggtccaagtttgtttaccatctgaacaatgatctcatcttcctgaaaaggggaacatgtcattgtgagtataagatgactaacccatattatataagaaatgaaaataaatggactagcatgcttacttctttggaccatggcctttgaccaatcagggtgtagaaccttttaattgccacctgtgcaagcattgtacatcggttctattcgcaagctggaaaattagaaggtcctctgtcaaagcttggatttttaccaatatacaggaacctcatcaacagggtaggaaaaagaatgccagagaagcatgactagagtgtaagctaatgaaacagcacaatgctttactgtacatgagttgtgatagcatcaaagagggtaaaaaaatgcttgcgtggcttaagatatcctactgcactgaagtactaaacaattgtagcgcaaggtgggcttgagaacaatatggtaaaaatgtattatatatcaagtataatattgtgaaatattactcctgttacaacctgacatgtattgacatataactgtatgtaatcacaaagctaatgtgtaaaaattaaaaaaaaaatccaagggagtccaacatatgcatggtaggctatataaaatgcagtgatatagataccaaaggtcacacttttgaaggtgctccccctatgttatttcatctctcaaaaaaaatcagtaaaatgatatatgaattggactttagaaggctattttgtttatattttccagcatacaaaaaacaaccgcaacaaagttgaagaaaaacaaaaaatatgacagctaaaagatagtagaaatactatgataaagagtaaggacaaagtatgccaaatagaaccaatgcactaatagaaccaatgcatgggtaccgagctcgaattcgcc

SEQ ID NO: 11913 - DNA, 6762 bp, Oryza sativa
ttcattttctgtgtcttcgttatcctcagataaatgtttggaatcactaacagcattggtaaattcccagacattggaggatgctattcgtacttcaataaactcaatgccgaaggacagttaatcggtggattggggggcttacaataaaccttaccaggacatttgaggggatgaaaacctgggggcttttggattgtaaattggaaaggccagggggatcatcccttgttacaagggaatcagtgtttggtcagagagctgaacttctaggaaggcatttatcggaaatatacacaaatgtgctcgagtcaataactgtgaccacatcaaatagtacactcgttgcaaaatctgttgaaaggttggttgatgcaatcagaccaaatttatgtcatttggtgagaaatgaatcaaatagttcaagtgagtttgtttactcagttataggaaagcatatctctaacaaacaaggtgccaactggcagaagatcccaagtttatcttggctttatgtcttcttttttcgcatatatatgtcatgtagaagtttgtatctgcaatctattggcctcatgcctcctgattcagcgatagaagcaacagaactagtggggaattcattcgttgtatgctgcgggaaggaatggaccaattcagccaatattctcgcagaaggctactttgcttggattgtccaaaattcattccctctttttgatgctatcgagattttaacacaatctctttcgagaaattgttctgggtttactctgcttgttttcatccttcatgtgatggctctgcagagactaaatgaccttaacaggcagattaatgcttttgattttttgcttgaagatgatacagatcaatttgacaaggagaatagtgaaggcattgagttattaaagaagtctagctgtctcgaggccacacaactcaccagttttatgatgagctatgtgagactattatcatcaggagaacccggctctttttggtgttatgagattagttcttcctgggattcaagtctatgctctttagatgaattttcatttcctatagcaacttggcaactgctgtgtgaaaacattgatatttggagcccccatgcatctaaaaaggatttgaaaacttcttttctaatctgataaagtttgcttttgttgaaaagaggtcatgcaaagatgtggagaatagtgacagccaatcttctcaccgagaaattactctttgtaatgtttcagtgcagctcctttgtgatactattatttatgacagaaaggtatgtcctctcttaatccttccaccgaaagataatataggaccatttatctatgatttattgagtatgatgccaatattgatgtgctgtaataatgaccaatgttagtctttagttctatgtgttggtgatttctttcttgtgccctcgccaaattgcttggtctaatgcaaacttacaacttcttaggttctgttgaaaaatttggtgtcaggtttttgccatgctctgaagaaatcggtattgtcttttgttactgatgctaatgaagataatgacttgttggactcgccacctgatttggtggatatattaactaaactggaaaatgagaagttttttagtacaaattctgatgttacacacacaaatggcatagataaactatggatttgtgagaatttacttaatttttttagtacagttcctggatttcatgcaaactccaagtcattgttgcaacttatagcttacattctccatctggaaaggtaagttcgcattttatatttttgttcatgtgtactaactacaatggctattccttgtataatcatagtacaaatgtatgcacgccctttgtttataagtactaggcacttttgactgagagtagttcacaaatagttatcacttgttaatttccccaatgcataatttttcatgctatgctctatatcattgccgttaattatttgtctcatggcagtaattggagggcacaaatgtgaaacacttgagacttgagagaaagtgtccaatgtttatttgttcttatgaagatcttggtggtctttttagttgaacttcttgtttattacaacttaatttctttctttgtaaataattgtttctctgggttatttctagtggattttgtgttgtctttattgatattggggttctctagtctttttcagtatttcctttttgttaataaggcctatgatcagtttttgatgcaacgaattgtgatggtgaactgcgtgcatcctagttagtcaaaatgtcctgggaatctgtattgacaacaattttgggaaagtgcatggtgatatgcacattgcacatttcttagctgcaactgaaatcttttggttatctccttgctgagaatgacattttttcaattttcttgcagactgctgctattggcaatggtatgccatcgttatgaatcttgtaattccatggggctacttcgtctgtttgtatgctgtcgaagagcaatgaaaaatcttatcttcaattttggtaaagaatttccagagttgaagcaatactcagcattttccaaaatttttggtggctcctgtctgatttggcttttgaggtctgttcaggaacttgtcagtttgtcacacaaaatatttgaagagcacactgttgagatgaaaaatacaattttctccctggtagataagacatcagaaatattttcaacactaactaacatgaattctgtattttacttgttgggtgcaaagaaacaaatcatatcttccagcggagaaagcagtactccaaaacatgatgatcaggcattcagcatactagaaaattcagctttggagcatgtcaaaattatggctgaactgttagagaagtctacaactggcattcctgtaactgttaagggtagtcagtgtgttatcaaattagagaactgttatgacactgtatgctgggatagattattatgcaccatgtcttgcataagaggattcttggggggtcttatttcagcactagaaggcacatgcaaagattatctatcaagcccagaggaaaggaacgtgatgtttcagtatgcctccagattcagtgggtgtgttgctaagttgaggcctttgtagatatttgcatgcatgtcttgttatggagaccaaggattgcgagttggctgatttaatctctggtcatctttcacaagagctggactgcgagaacaactctctgatattacttgcatcatggatgaatggactaggcaccaaccctgaggagatcggatttcactcagatggtgtactaaatatttcaactgagactcgtggttttgatctgcccaaagtacaatttgtgaaaggatttcttttagaaaaagttttaagtggtgaggggccatccatagcatttactttaagggagctctacaatgcatctgctgctattgttaagctgaagggaatcctatcatttccaagtgaggtatgtagacatatatgcagtcctttccaaaagcttccattgggtccaatggttgagccagcttacatcgctctacacaaattagcagacatgtctaactggcctgacatgttttctcttttatggattgacggaatattaagttatcttgaagctgtaggaaacattttggcattacctgagatcaacatgtcaaaagaattgtacactcaagtagttaatgctcacttgagagctattggaaaatgcattttgcttcaaggaaagaatgcaactctgcctacccatgagattggatcaagtacaaagacactatatttgcagaatagatctggtcatgttgttgctaaaggtatcatcaataggcagaacagattaaattcactgaaatcaagacttagactatcactgggaaaatatgtcaatgtttcatcaaacatgcatctaaatacagctgtgcaagtcattgaaagagcattggttggagtgaatcgtttcagtcattcaatatatgaaataaacacaggaaattgtgatggtgggacagtttcttctgatgttgcggctgggatttattgcctctatctggttcttgaaactgtgccaggttagtagacaattttctgtctggtacttccagattcactatgtttgtaatgcaatgtggttccatgcactgcttcaaagaagtcaataatctactaaatattttcaaacatgatctcatgtgcaatagaattgtctgccaacactgagtgtgtttgacaataccaaaaattatcatgactaatctgtcttttcaaatatatgctcaaacaccaactagttaatatcaggtaataagcatggtcctcataaaatatatgtaggtcttcaataattaggaatttttcacagaaatgcttgacacactccttttcatattcatggcacctcttttggtagcatattaatatgctgtcggttcttgtcagtctaaataaactatcgcgttacatggacattgtccagaatgcatgaattattctcaactgagtggagtagttgagcaattcaggatggacctacttctaccagttcacctccacctgctgaccctccaaaatttaactgtgtttgcctcgatcttgttttgctcatatgtatgcgtataaggatttggcaggtagggcctaggactagctgttgggttattttggaatggagacaaatagttccagtccagaaagaccaaaaaaggtggaggggggggggggggttgggattaaacacaaggggtgtcagaatcatacatgcaccaggtcatgttcaagtcctatcaacttgcaccaaaactgaatggatttgtcggcaggaaaaagatttatctggtattgagagttgagggatgagctttatatggttttgagtcaagggatgatgattaaacgacactaagagttgaggacgaaaagtatatgttcctaaaagaaactgttgtatgatttttcctagagttatttcaaacacaagtcttgctagtgtcattttaaccacatgtccgcagccccttgcaatgcattatgtggttatcctacttcatggcagcacatctctttagaaaggattgtttttatacttgttttgactgattttcaacttatattgcaggaaataaacgtgtttttaagagaaccgtcccaggcctaattggtgctttattcaatattgtcttacatcttgaaaaggcttttattttctacacagagaggatgcctgttcattacccttatttgcacccagatgctggagccattgtcctaatgtgtattgaggttataccagcatttgtggggagacattcttttcaaattgattcatgccatgtctctcagtgcttgcatgttcccatgacactttttaagggccttaaacatcttctttcatgtcggaatatgccccatcttgcaacaagagtgaagagcacctgcagctagtaatgaatatatacttgatagacatttttcagttgacatgtatgcttcatgttgcaaattgttatgcactactattcgacaccaacagcggtaaaatattttgcctctcgtattttcattctgtagttatatattattattttcattccatattgttatatttcctccttttatgtctagtgaggttgcacgatgcgtggctgtcctggaagattcagtaaacatacttctaagttgtttggagtctccaaatcccaaaatggttagtagggccggttatttttcttggaacatggaggaatcaatgaaatgtgcttccttttttagaaggatttatgaagaggtcagtgatgcttatatttctgttatttgagatatatgtatcaatgtatactccctttgatcacgtttagtatgcgatgcacctactccaccattagccgcaacgtaggatgttagtatccaaaaaagagtatataaacatgaaccccgtagaagaaatggccctgtggacaatgtataccatatatatttaaggttggtaagccaacaaatcatatgcacactaattatccttttttgtggacaatgtagatgcgccagcaaagagaactcctaggaaagcactcgatgtactttcttgcaggttacatttctatgtattctggacagggtccatttcagacaggcataacacggtatgcccttcctaatgaagctctttcatttatgctttggatcagcaattttacttttcttacatcgcagagaaattgatgaggccttgagacctggggtttattcgcttatcgatatctgcgaggaaagtgatcttcaactgctccacacatatctgggtggtcagtaactcctgcttaaccttttcttaaaatgcttaatctatttacgaataaacaaatgtaactactataaatacaaactgatccccaagataattccttttttcattctttggctttgcagagggtccatgccgaacaacttttgcaaatctggtgcaggactacaaattacacttccagtatcagggcaaaatctagtcaaacttgctaaaggctttttggagcatttgatgttgatccgtcttattctgcataagatatccaatgcatcatctgcatgatcttgggtttgtgcttgtactattaattgctgactgcttatgcactgaattttcacccttcagaacggaaagggaatatcgctgttgctgaaggttttcaatctacccttttaacttaggagccaaacaaacaggatggg

SEQ ID NO: 11914 - DNA, 1667 bp, Oryza sativa
  unsure (1)..(1667): unsure at all n locations
tttggcaagggaccaagcccctttcccccttctttttccttttgcccgacaccgccggcgtcatcacctgccgccgccttggctgcacgcgtcgacgaccgccagctcgccgcccttgcatccttgaccgcccacgaggtcggtttcctccctccccaaaccgacattccccgcgcctataaagcccgagcctcctccccatatccctctcgtttttccctcgccttcaccgcgccattgttgccttcccgctgtccttgccgtcgccgtctgtcgccgagcaccgagggagccggtgcgagcgtgaacgcgtgacgaggagctctgggcgccacctctccctctcttctcccccggcgcactcgcctcgacgccgcgccgcctcggcgtcatccgccgtgcgccgccgctcggtcgcgtgccgccatcggccttccacccctttccatccccaaatcgccgccgataccgttcccgcacaccggtgagctcctcgcccaaattctcgccatctgcatcatcttggataagccccgagccattcggttgctcgctcgtccccttaaacatgccggcccgccgttgctctacttcgccgccgccgcgcccgcctgcgaggccgcctgggccctctcgccaatacctcgcgccaccaccgtncttgagctccctagggtctccccaaaccattccctagcgccgtcgccggccggcacagnctcgccgncattggcgtccgctcccgaaggccgctgctcgtcgccagccctcctcagtgattttcccgcccatacgacaccggaaacggattccttgaaccccggagatgcctcactccttttgaatcgaaccctcatcgtctcgtcgtgattcccctctttgctcgccggcgattgccgccgccacaatccgccggattccggccatcctccggcgaatctgagccgtcggctcgcttcgtctcgtctctccccttcccccggtgtgcttactttttccattgaggtcgcgccttgctcctgcgaacgccgccgccgtccgccgtccatcccggccggcctcgtcttcgtccttccgccgacccgcgtggctgccgccacgtcggcgccacctcggcacgaccgagtcaacagacccggtcggcccctcctttccgtttccccctccgtgcgcgcggaccacggtgtgccatgcggctgcacgtgggcccgccgcgcctcgatccgtccggtgcacccaaaaccctagcgcccgccccgcgtgcgccgcttccaccgtgcaccgtctagccgacatatgggccccacccgggaccccgcgtggtgggctcagtccaccggaccgcccccctcccttccgcgcgccctcatgggcagcccctcgcgcccgcgccggtccacttggttcggccgagccgcgttagcctttgggcagcaccaatgccaccgaacaagtctaatatacatccctccatccttttctttttccagggatttaataaatcctttttcctttgtcccataaatcaattccttattccaaaatccaataagccatttcctttggtcccgcatgacagtgactgttaataatattcttgggatattatttcttcaaaccccataaaccatttctcgtattccagaaaaatccgataaatcatttcc

SEQ ID NO: 11915 - DNA, 3974 bp, Oryza sativa
  unsure (1)..(3974): unsure at all n locations
aagtctaatatacatccctccatccttttctttttccagggatttaataaatcctttttcctttgtcccataaatcaattccttattccaaaattccataaaccatttcctttggtcccgcatgacagtgactgttaataatattcttgggaatattatttcttcaaaccccataaaccatttctcgtattccagaaaaatccgataaatcatttccttgtccggaaaatcccattcgagcttccaaaaattcatatcttctcaaccgctcatccgattgactccgttccacttccagtaattccgtaaaattgagatctatttaatggcactactaattagtctaaataggatctatcttttggtcttttgtttaggttttcgattgtttgcgtatagttgcggttatcggactttcgtcgatcgcgggttttctcgaagattcgtgaagcttcgtgaagaccttgagcaaggcaagtcaccctttgatcaattgctcctataattgaaaagtaattattatttcgtttgcaacttgcattattagaatcacacacttaacttgcttggcctcggtttgcgtgccagaccgacggacctacccagtagtcacactaatttccgtaggtcgtactaccctgattccttgtcgctccacccttgtggtacctcggtattcgtgctctctgagcgcgtataccaaatatcccacatacaccgttgcttgtcgaaaacttgggaaatgggtttgtgaagccttcaaaacccgacatgtggtgtcggtgtgtttgaaaataaaatgaattgtgaaaactcgcgatgcgggggttgtgcctatgtggcactgtcccgtattcgcatataaggaccgattcctgtgggaaactcatcgaacataatcaagtgcaaccacaaggtggaatgggacaccctggctaagtaactagacggttcagggaaacctcgcatgccaatagttgggaacgccggggcggggtcggacaaaccgggttcctggtaaggcaagaacgagaagcttgctcacttaccgatcaaggtggttggagtttgatttgtgcacgcctaaaaaggcctatgtttatgagaggatttgatccttctatgtggcatgaggtaaccctgggtcggctggggaaaggctttgttgcgaacctccgataccgacgggtgttcggaataagttcgtatcttgtgggtaaagtgtacccctctgcagaggttaactaactgttcgaacagccgtgcccacggtcatgggcggatgtgaggtggttcccgttgcgtagatttgtttgcctgtgctttgtaaaaagttgttgtggtgtgggaatcgtaaccagaatcagcctatgtggaagatgaatgacctgagtggtcagaaacgaatctgtgtgattcgggatgtctgcgggcatcatagactaggcttcccgagtgaaagcggattgttgtgctgctgggcagctggactctgggagtccgagaaaatgaataaggctctgggagccgcttaattaagtgaaatggctctgggagccgagaagtaatgatctgacccgggaggtcggtacattgctaaatgagctgttgaaaagcatctcttaaagtcgaatcgagacgcaagtctcttttcgcccaaacatagaaagaaataaatcacttagtgatttcaaaatgtcttcaaacaaaagatttgcaaaacaaccttgcctctcttccaagcttgcattaaacacctaagttcccgtgacttgctgagtacgaaagtactcacccttgctctataaatatatatatagttcctccgccctgaagagaagataaagtgaagtgaagattagggtttcgtcctggttcccagccgtcgcctgtggtgttgggtgttagtccgttggttccgctgctgctgctgttgttggtgtttcctcgtctgtgtcgtcggttgtattctcgggctgtctgagctgcaacctaagttaaggtaaataagtcctctatttatattaaggattgctatgattcatatttgtcaccgtgggtaccagcactatgtcctgggactggtaccgagatcgcggtttcgtaggaagcggttcgcgccgtttttcctacgacacgctcctatcaggtgccgttgtacggcggtatcagattggggtgtgacaaatatttccgagatgttaataagcaagacgtgcttctattcatcgataatatctttcgttttgttcaagcaggatcggaggtatctgccttattagggagaatgccctctgcagtgggttatcaacctactcttagtacagaaatgggttctttgcaagaaagaattacttctactaaaaagggatctataacttcgatccaagcggtttatgtacctgcggacgatttgactgaacctgctcctgctacaacatttgcacatttggatgctactaccgtactttctagaggattagcttccaaagggatttatcctgcagtagatcctttagattcaacctcaactatgttacaacctcggatcgttggcaacgaacattctgaaactgcgcaaagagttaagcaaactttacaacgttacaaagaacttcaggacattatcgcaattcttgggttggatgaattatcgcagnaggatcgtttaactgtagcaagagcacgaaaaattgagcgcttcttatcacactcatttttnnnnnnnnnnnnnnnnnnnnnnnnnnnnnaaagtatgttgtcttgcagaaactattaggggatttcaactaatcctttccggagaattagacggcctacccgaacaggctttttatttggtgggtaacatcgatgaagctaatacgaaagctataaacttagaagaggagaacaaattgaagaaatgaaattaaatctttatgtactgactcctaagcgaattatttgggattgtgaagtgaaagaaatcattttatctactaatagtggccaaattggcgtattaccaaaccacgcccccattaacacagctgtagatatgggtcccttgagaatacgcctcctcaacgatcaatggttaacggcggttctgtggagcggttttgccagaatagttaataatgagatcatcattttaggaaatgatgcggaactgggtagtgacattgatccggaagaagctcaacaggcacttgaaatagccgaagctaacgtgagtagagctgagggtacgaaagaattggttgaagcgaaggtagctctcagacgagctaggatacgagtcgaggctgttaattggattcccccatctaattgaagacaacccaatggtttagttgatacaaagaaaaagggaagaggggtagaaaaaattattagatagcgaagtaaagtagggccaatgctatctagtaatttttctacctacctacctactattggatttgaaccaatgactcccgccgtatgaaagcaatactctgaccactgagttaagtaggcaatttatcaccacaaaggaagaccctttacttcgatcgattatagatcgaatcctttttataagcaaataccgcttcgttattggtatgttattatagtataaacagatcaaaggatatcctctactattagagaatattcatcttgccaagaaattctctatatattaagatatctctgacaagggctatagctcagttcggtagagcaactacacgtgcgccaatgcttttcaaggtatatgtgagggaacagtgtccgaattccctgcagatggattcggatcctctgcaataccgcagagaggtactttaaaatgttagttagcttaaatatcgatttataggaaatcgatgccaagggctaaatacttcaaactttcagccaactgttttaccattaagctctgtatacagattaatctcaaggtgggcaaatagtttttggacagatgatgtttctgctcgcct

SEQ ID NO: 11916 - DNA, 831 bp, Oryza sativa
  unsure (1)..(831): unsure at all n locations
cggcactgttgacaccttcgtataccnnncaattcnagctcggtacccctccatgcttaaactcggcagtctgataaggcaatgtacacaattcttccggattaatgaatatccattatctaaaaatgtacacaattcttatgatggatccttgttttgctggcagggtctgttgtctgatggcaccattattgctgtcaaacagctatcatcaaggtctaaacaagggaatcgagaatttgtgaatgagataggcatgatatctgcactccagcacccaaaccttgtcaagctttatggctgttgtacagaaggaaaccagctcttgcttgtttatgaatacatggaaaacaactgcctagcgcgtgctcttttcggtaatcttactttctaatttnctggtttcccctcttaacttatttcatgttagaactcatgtgcaatttctgtgattaggtacagtcgaacaatacaggctgagcctggattggccgacgagacgtaagatttgcctgggaatagcaaggggtttaacatatctacatgaggagtctgcaataaggatcgtgcacagagatatcaaggcttgcaatatactgcttgacacaacttgagtgccaagatcttcgtttttggcttgcaaagcttaacgatgatgatcacacacacttagttcaaggaatgctggggctatttaagtttctttttgatttcatcccccctttccccaaattaatttcaccggtcccaattcattgtttccattggaagttttaattacctgccgttgaacttaataaaaataccattcacactttttttgttttttgt

SEQ ID NO: 11917 - DNA, 14766 bp, Oryza sativa
cccatgccccccgctctcataaatctcagcatgcctatcgccatggacccccacaggggaggctataaaaacacggcacggtccctgtaacaaacagtgagtacccttcctccctgcagccgcatacacgcggtacatgagttgcggtcagtaattcgatcggctgtcgttgggagatcgggaagagtcgtcgccgtagcagggtagtgagggtgtatacgcgcatacacatacacatccaccagcccttccttttgtaggcgctccctgattactttctctctcttccttggactggcctcctccctctccatcccccaccatctttccttctttctttctcctttggaccctttccagttgtccacgctcccatctttttcaccatctcctcccatctcccctcccctcccctcatccggcgttccaccctgcccgcccttggccgcccggagtccccttccctacttgtaccagcccttcttttccaatttcatcctctccctccaattctactactcccatcgccacagtcgccaccctccctccctctctctctctcgccgcccacaccggcacactccactcggtgtgtgggagggagaggggaagaggaggccggctgcttgcttgcttgctagctagctagaattgcctacaattcagtaccgctgcttccccaattgctctactggttgcttgtacagctctacaagtacgcaattcaaggtgggggagggagccaagccggccggccatactagttctcgcctcccgagctctggtggtctctcctcctccagctggtgggcgttcaaggcggaaaagtaaagacggcggtgccgtggggcggcgcccatgcagcagcaccagggtggcgggtcccagtacggggccgtgccgccggacatggggccgttctcgccgacgcatcatgcttcggcgccggcccccctgccgctgagcagccggccaccgccggcggcgttgtctcagccaccgccgccgcagcagcagcagcagcaaccgaggacgagctacgacgagctggccgccgcgaccagcgccggcgcgggcggcttccccgacgacgacatgctgggcgacgccggcggcagcggcggcggcggtgggtcgggagcggccggcaaccggtggccgcgggaggagactctagccctcatcaggatccggtcggagatggacgccaccttccgcgacgccaccctcaagggtcccctctgggaggaggtctccaggtaagagagagacacacacagtgtgcatgcatgtgcgagcatggatgagagagagagagggggagggagaacgaatcccaaacacattcgcagttgagcagcacaagaatccttccttccgttcctcgggcataatttttccctgcagaaagcggctaacggtttcgtggaatttagcactcgtcccacatgaaatgatggataattatccagttactgcccccaaattctccaaaatttccaatttctctcccaactctaatcaaatacttctcggtttctgcgagacgggggaggcagggagtaggtgtaggtaggatgatgataagaatctgcgcgcctggggatcgtaccacggtgtgagtgctagcgcaggcaggcagcagctgctgccgcttcagtctgccacactgtcgtttttttgctttcatggtttccagtttttgggaaaagaaggaaggcagccttttgctcccatcccaatgcggcatcatcttaatttaagcatttcactccccctcttcactctcattttttttcactgccatcaacttcatcacatcgatctcctcctgatccctaaaaagacgagacggcctgtgattaactaatctcccttctgcatatacagcaccctcctccttgcctcctcttcgccattgtcctaattcccatctccttgtccctttctccccgggagaaaaaccactcatacgcagtcggccaagcacttgatgcttactatgcctctgcgttagatgcttctcctgcccgtagtaagcgctgccatcatttaatccccgatgttatttcaatctttggttgcacgcaagtgtgaagcggccggcggctgacagcaaagcttgggtcttttgtcgctctcgtgtctttcaggaagctcgcggagttgggctacaagagaagcgccaagaagtgcaaggagaagtttgagaacgtccacaagtactacaagcgcaccaaggaagggcgcgccgggaggcaggacggcaagagctaccgcttcttcactgagctggaggcgttgcatgccgctgcgccgcagacgccccagccgcagcagcagcagcagcagcagttgccgccggttacaagcagcgcacccgcgatgcacgccttcgcgccgccggttcccgcgccaccgccgatgagcgcaatgccaccgccgccggggccgatccagccggccccgatatcttctgcggctcccgcggtgcccctggagctgccgccgcagccgcccatcaacctgcaaggcttaagcttctcgtccatgtcggggtccgagtcggacgatgagtctgaagacgacgagatgacggcggagaccggcggcagccaggaccgcctcggcaagcgcaagcgaggcgccggcggcaaaaggctggcgactttcttcgaggggctcatcaagcaagtcgtcgacaggcaggaggagatgcagcggcggtttctggagactatggagaagcgagaggcggagcgcacggcgcgggaggaggcgtggcgcaggcaggaggtggcccgcctcaaccgcgagcaggagcagctcgcccaggagcgcgccgcggcggcctcccgcgacgccgccatcatctccttcctccaacgcatcggcggtcagtccgtacaggtcccacccgccgccaccgtcatccagatgcccacaccggtgcagctccagacccctccgccggtcaagcaacctgccaggcagcaccagccacagccaacgccgccgccgccgcaggcggcgccaatcccggccgcgcccctccagcagcaaccgccgcagccgcagcacaaggagacgattccccccgaggcagtgacgccgcgcagggcgccaccgacgtccggctcatcactcgagctggtgcccgcggcggagcagcacgtcgagagcgggctaggaggaggggagggcgggtcggcgtcgtcgtcgcggtggcccaagacggaggtgcaggcactcatacagctgcgcatggagctcgatatgcgctaccaggagaccgggccgaagggcccgctctgggaggagatctcgtcggggatgcggcggctggggtacaaccggagctcgaagcggtgcaaggagaagtgggagaacatcaacaagtacttcaagaaggtgaaggagagcaacaagaagcggcccgaggactccaagacatgcccgtacttccaccagctcgacgtcatctaccgcaggaagcacctcaccggcggtggcggcggcggcgcttccgcggccaatgtcgccgccacggcaatcgagcaccagaacccgaaccggcacgagatagaggggaagaacataaacgacaacgacaagaggaagaacggcggaggcggcggcgcgcaggtgcccaccagcaatggcgacacggcaccgaccacggccacgttcgacgtcgatagcggcatgaagaaggtaatctcaattctcgcatagtactctccatccaaccaatttctgctagcgtttcaagctcaatatgcgaatgttcgtgcggaagctaaccggaaatccgcttgccgtgaagccagaagacattgtgagggagctgagcgagcagccgccccgggagttcacaacggacgagaccgacagtgacgacatgggcgatgactacaccgacgacggcgaggaaggcgaggacgacggcaaaatgcagtacaggatacagttccagaggccgaacccgggcggcgccaacaccgcacctccgccggcgacaaccccggcgtccgcggtgccaacctcgactccgacgagcaccttcctcgccatggttcaataggcgcgcgaacgatgcatcaccaagtacgtacttgttcaaagaaaaaaaatcaaagcatcgccatcaccatcgcatcctctcactacaccaccaccaacacaaacaccatgcatgcatcagcaatcagcaaccactctccttcgagttgggatctctcctgtaatgcatgtgcggtaagtgccaatgacatgtgggcccggaataggtgggacccacatgccagtgacaccagtacagcagtggatttgcatccctctccttcaccttgtaattctcccgtgccattccattatttattgatttctctgtgtaataagagccctccctgatctcaccttaacccgaggaagcagagggggtggtagagaaaatgagtccgggtaactttatctctataggtcacctcgtcgtggtaaaggaagaattgtacatcgatgtaacagtccctgatgtctctgttttttttttctctctctctttttctccttcccctccggcgacggcggtatacaagtttgtatacgggtatacaacaattacatacatttccagcaatttggagcagaggtcagaaggtgtcttgtttttgtttcttttctttctttgccgtggggaattttgtctccttttaacccgttttttttgcagtggtataaaacgttgttactgtgcacattgtgtggttactcttcgtatactttgcatttttgctcattgtctctgcaattaatgtagagatttttgtgtactctagcttggttttgccttcctactgagaagctatttaattaagcatcacatgcatgcatcccaaaatgactgcagaaatttaccagggggatatagtattatagtactactacttgcagggttaatataaaaaatggaatgcttactatataatcaataccataacctttgttgcttttttgcacttgtttttttccccagcgggatcagttgacaattcaatagtttcttttgccagctctaccatcagtcgtcgcttcacatgatacagtctttaatagtcagtccaagaattgtagaattattctgtagtcatactgtagttgttctgatgatataactagagcctagatcgaagggatataagcacatcactgttgctgtgagcatgctgcaggcatcagggaaaactatatcctgtaagaaaaaatatacttcaaaacagaaataggagcaaatctaaatgcatcaatattttttctagtagaattaatcattcaactagtatttttcttgactgaatagaacaaaattctatgaatgagccatgtgaaattaatggtaccaaatatgttacgaaggatatcttaccaaagttaaatgtgtgcagccttagcgtgtgctagggagctcaatatcaggtgtgtgaatgtgatatgcacatgtattgataagcatatgctatatgtgtgtatatcttccgactaagaaaaaagataaattgacagtctttgtaaaaaagagataggggtagcagcattcttcttatgagtagagggtactgtagatggtaagaatcaatttatttggattgagtaagtacgcattttggtcctcatcactgaactggaaatatagaaatttgatgtagaaatggacaatcatgatttttttttaaccgctcaacttactgctagtagtgttaaataaataagtttattttgggatggaagagtacaccttttagaaacttaagaaaatttatatatccaagtagtactactccgtaattttctctaggccaaaggacaccgagacaagatgtgatgtgcatgtcggcacgtgtcaggctgacccacgtcccgttgaggcagtttacactttagccctcataaacttgtttgttccagagagggcccatcgcagactagggaaggggaccgctactgtaaatcacaagtctgttcggcgtttgctcctcgatgcattgaacgccaacataaacagacgaaaattaacagtagcatcagatcatatttcaggtattaattttggcacatcaccaattggaacgcgtacatacttcctggacatacgtggtattttcgttcttccagtaccagtatactttcttctccaaaaaaaacacattttaaatgtggatttcatacataaacacaataaatctaatcgggtttgtctatattattgtacaaggttgtgtcacattttttttaaaaaaaattgggacgtaggaagtatgccgtaggcagtttttgaaccatggggagaggcaaaaattatcgaaccatatatatagaactcagaaattaatggtgatttaataggatctaagcatgataatggacctttatatcatgcgtttcttggaagtaggcatttcttttataaccaatgtgaaactgcgtatttaaattttatctagagctagatattaaaattttgattagattcgatattgatcagttcataatatagccgtacaatgtactaaaagcgtaatccattataaatctatacttagggagtgtttgaggagaaggggattgaggagattgggaagatacgcaaaacgaggtgagccattagctcatgattaattgagtattaactattttaaattttaaaaatggattaatatgattttttaaagcaactttcctatagaaattttttgcaaaaaacgcaccgtttagtagtttgaaaagtgtgcgcgcggaaaacgagagccaatctcccctatcacccctaaacgaacgatgccttacaccttgatttttctttttctttttaaatttttgggtcaaagactgaattcttcagtgatagtataacttgttgtgaatatctacatgtattttgagaaaataaggcagtattcccttgaaagacaaaaatattttttcatgttaaattatttttgcatgattagttagttatactccctctagttttagtgttttaacattgttaattttttatatacatttgaccattcatcttattttaaaaaattatacaaatataaatcttgataaaacatatcacaaaacataacaaatgattacttttttatatagcgaattaccaaaagcatgtccaaaagtcaacgatgttaacaactaaaaaactaagagattatgttcttatgctaaattacatataccttccaaaccacataaaaactagtcatatcatttttacactataaagtacctacacttacattataattataatgttaatttgaaaacttacacggtaagtattgtaaaatttctaatacacaacatataagaaaattaggattaaaaataagttactatttacttaaagtagtagataggataataatatgtgagaaattttatactccttgagaaaatatttcgagatacctaaattttacactaaatttttttacatcgaggtactaaattttaattagaaaatatgatacctcctgatatctttttacccaaaaacatacttatatataggagagggagcaatcgtaaagaaaaaatgactgaaattaagagaaaaatacgacgctataattttagcaatcatgttgaaaaaatatgtggtcaagcgaagcccgcgtagcgacaccaagagctcaaatcaaatcaaaagggatacaaacgggaaatatttccaattaagcgtaaccaagctgtaaaaggctagtaaatagtatctaaacaaatcaatcgtgcaattcaaccggattagacagcaaagtgcagactaagcgaggccaagtcaccactcgcgcgggtggataggctgagaattaagaacgcgcacgcgcagggcgccagatacaaatcaatcaaggaacagggaaaagaggtccctggttgcgagctccgattgaacccgaagccgagaatcattaggaggcggaaagtgaccgtaaattggcggtaagtggccgataatgaccaccatgctgcctaacaagacgacatcatcggttcacactgaagctcttctatacttatctctcctcgcttttttattttgtccatctttttcccggtatgcaattgtgtaggaatatgaaacaccttaaacttcatgaggaaacctgccgagtcaacatggaaattaagctcgtcaaaaagtgttttttttcttgctaaattatgcttagcttttaagtagtttgtactttatggaggacgccgacatcactcgagctacagtaaatccagcggagttcaaatcagcagggttggtgtacagtgaatccagattctttttcctgggatttacatatgttccaaagtactaacagggaatcgtatagaaaaaaatattgctttttattgcgaggaagaaaaaatagtttgttgcttcgagtagtttctccaattttcgtcattatattctgcactggctcaaagttaaatcgggaccatgcgccccacgaataactcagcatctcgcccatgggtccatgcatgtcgcgaaaaatcaaggaaattcatgtcttaacagtttggacaaatcaataattgttggatttatactcgttctctgaagaaattatatttgttgaaaatttgcatctactctcaagtttttgcacataaatacatacatcgatctctgatcaagtgtactcctaattgctagtatgtgattgcagcctactcgctagtaccaatttggatcaatttcgatgtgttcgatcgataccagtaccagcaataaattcgtaaccgagctagattattattacctagcacgtcactctgcgtgcatctttcctcaagctaataggaaatagctaatccctccgtcccaaaaaaagacaaaccttggttttcgtgtccaacgtttgatcgttcattttatttgaaaaaattatgaaaaaaattaaaaagataagtcacacataaagtattaatcatgttttatcatctaacaacaacgaaaatactaattataaaaaaatttcatataagacggacagtcaaacgttggcacaagaacccacggtttgtctttttttgggacagagggagtaggtcgctactgctcctgcacatatgtatcactgctgggatgggacaatgtttacctaacaagtaatctgaggcatctgtacgtattctgtggcaccgtgtatacaaacccacctaacgacgatcgatcgctaggtacccttacccgttagtagttgtcacatgcgtgcgctagctcatctatgctaggctacacatgaggatgtatgcttgcatggatgccacaatataatgccaccccaccgtagctatatatgtttgtccaatccacatccaccctcctttgcctaataccacggtcgcatgcagtgttgggggagtggcttcgacttgaacaagagagatcaccggtaccccctattaatttcctagagtaaccttgctcctcggaaatcaaatctctcagaggcctttcggagagcctccggacgtgccaagccacaatgcgctttggtaggttccggcggctctggataggagtccaaggcaaggcatccgaagaccccggccctggctatggagccaaagatccaaccacggaagccgcccgtgggagctttaatggcgcattgatcgatgtgctcagctacctcctaacaccctccgcacaataggtggggttgaggccgagacgtctcgttatcacgccatggcctcgagaagtgcaccctgcggaacataggagtcctcgagatggcagtctaatggctacaattccattcgttgtcccctagggttttacctcactacccctacctaggggccacctgttggcttctaccaaggggtaggcttagggagggcaatttgactcgtttacccatttacatgtaggtaaaaacctaatagagttgggtttgttctctatttagtacccatgggtttcttgttgggtcaaaacatgtacccaacgggcaaacgggcacgggcatgagtagtcactaactgacatgtggaccctcagttaatttcaatataaaagccaccacctagaattccagggtttctttcctttccttcccctttcctccacagccgccagccctaatttaatttcagtataaaagccaccacctaaattgatgagcttgtaatgtttgtatggttgaagtgctgaactatctcactgcttgtggagaattgtggttgaacatgtggcgggtaaacgggtgtgcccgcaggcacatggctcccgcaggtgacaggcatgggcagtgttccttgcccgtcatgtggtaataggcatgcccgcgggcgagaattacctcgcgggcactgggatgggtagtcacaacccatgcccgtcgtgcccgattgccatccctagataggctaaggaggaatactgctgtaattttctataactttgtactaagtgctatataactagatctcgccccccatgagggggcagatgaaagagagaaaccataccactctttcccggtgattggatccccgttggatttggttccaacacgtagtctcagtactccaaacaagtttaactaggaggaatgtaaccgtaatttagggcttctaatggttacagcttgtcccaaaaaaaacctttaaacaataacttttttatattctaaaaagatttaattgtagaattcagaaaataaactaaaacaaagatgaaaaaaatcaaactcctcaaattctcaaaaggtgactaccaattagttacttttcataatcttaagcttcttcaatcaggctcttagtgaagaattaggtagtgagtgaatcgaagagaaattaattaatcaggagagaggctaaattggatcgcggtaacttacggatgggatgagatgatagggtaagctatagctaggcagcagacgaacgaacgggggagcgcaatttgcatgactccatgttccgttgtcgatcgatcatgtcggcggtggccctcaccaccacccagcagctagcaatcgagctagtgcgcatgcacgcacagtcacgcacggcacagtgccttacaacccatgcgtagtatacatgcttcgatcggttgctgattagcccggccaggcggtgcgacgcgccgcacgcgtcacgcccacagctacctagctggctaccgctatctagcttaacccccacagtacaccaccaccaggccaggacacgcagcgcagcgccggtcgcatggccaaaccaaaaacgcattatatgcgtttcgtacgcacgcacacgcacgttacgctagcaatcacgtactctctcaaccataattccggccgtcccggcgctgcgtaattcaccgccgcctctcatgccactgctaggagaacggttttttccgtgtggtcaaatttaattttcacgtgtgatggaaaaatcataacttttgtgaatgggtggtgcacccgcacgtaaaaatcggtgcaagtacttatgttgcccgcacgaaaaaacaaaaatccggaaaaaaattcaaaaaattgaaaacctagaatccggcgccgccgccgccttctcatcgtcatcgtcggcctcctcctcctcctcgtcgttctcggcagccgaggatgctgctcccgccctcatcgtcgatggcggaggcctccgcgctcccctccggccgcaccgttgccgacgcccctcccctccgccggatatagggagggaaagaaggggaggggagccggatccggggggaggggggaggcccccggatccgtgttcccctacggccgcactgccgctgccggatccgtgcgagggttggccaccacccaccggatctcgcacgccgttgccacaccaccgtcgccacctacgccccccgccgccgccgttgggactcgggaggagaggagaggagaggacgggaaaaagagatagagaggagagaagaaaaagagatagagagatagagaggagagaggagagaggagagaagagaaaaaagggaaaaatttaaagtgggtaggagtgcagagagagtgtgtatttttttgcgtgcggctctcttaataggctacacgtgaaagcttattttttcagacgctctacaatttaaataggctctgttcaggaaaatcgttttttagcggtgcgcgcgcggccggtaaaatctcgcgcgcaccacaccactcgcgcgcgcgttgtacgtttggcaggagagaccacgagcacgtcaacgagcgtacgcgcgcgcccaacggcaacggatactgcgtggcgcgtcgtcctcgtcctcggcggccgatcacatgcgcgtcgccggtttcactcgctcgctcccgcctcctttggatttatatacaccagcactggtgcggtcgtcacgtactttttggtttgtttacatgatattcccttctgctgctccctcttttggtggatgaagtcaaactgctctagctgttggggttttattccagcataattttgagctagctagctagccatatgtacgtacgcatgtataaatacttggggtacaatggatcggagaagataattcgagttgttttatcgaccggaaagtgcggataatccagatagataggcagattagtattagatgggggaacacttgtatggatgcctttttttcgatctttcggagagacagagggaatcaccgcgctagcaagtatctcccccttgtgtattcgaacacgagatcgattgcgattatgagaagatgtagtaacttgcaagtctaggtttaaatactggactggaccaacttgaccccgaataaggtactactattcggttgcttcatcactgcttgaattgcctatgacactctggcatcatgcgtctgtttacccccaaaacaaagcagcgggctccaggtagtactatctatatatgccaggataactacgcgtagtgatgatcaatctaggtatatattgcgccgatgtgttctttactttaaagtagaaagctttagcattcataaaacccggccgcaatccgcacgaacctttgtgagctgtgacatcatgcacacaacgcttaaaatttacagttcggatttgggggacaagcccatgcctcatcaggttttttttttagtaattcttactacatctcatcagatgcagatgggctgccgctttggcattggactaataaactaatgcctcatgatccgagcttagctactactaccctcctcccctttttacatctgagagagagcgatgctttgatccaaagtcaccatcacatgcgcggctaaggaaaatggagttgctcctgcctctccttcccctccctctctgatgtgagttgctatcaccgtgacaacataagcagcaggcaacttcagattggacagacactaaagaaaagaggccagtggcatggttaatcttttttttctttctttctttctccctcactggctttattcttcttttagtacagcatgagcagtttgtgacgctgatgatgcctagtaggggcccctagcaacatgcaactgggaattcaacttggaagtgctgaagaagaatattatttgttcttactttcagtgtcagtcagtgcagccacaactgaattttatatgtccagctgattgggagcttggagtcactcgcatacccagctgatgtcaacagattggatccacgggttcttttgaagtggataggtttcctttcccttctacgaaacttttcacagcatgctcttccttttatcgtgttcgaaaattcgatgcggtaactttttgttgtgctaaataagacgatctagtgccaacgcgtcactgtgacaccggccagaatagttagttaccttaacaccatcaaagtagaagcgtgtccaagatagtgtctgttccagcccgaagccctgaaatgtagttccaaccggatgtttcaggtcagggacagacagagggactacatgattctgatcagtcatgattattaatgcagcataaataccgtaaacttttcttgggaattcacaaacagttggtctaggtttcaaaaaaaaacaaaaaaacaaacagttggtctgatgagaaaaatatttccgtttgttcagaagagtaaatcagaatagaaataacctgtagaataatagaattacacgattcagacttcagagtgttagtacatagaaaaaggcccattcaattcgtatggtcattgccgagaggttatgggttctgatgtggtctgagcctgcctcaggttagaacgtgtagaaggggaaaaatttggaatagtctaattcatctacctcatctcatgctcctgattaaatcgcttccctcaatcataaagctaggtataacgtctcccccgactttgaaaaccgtgcaaatcaactcattttatagtttagaaagtggtttccgcttatgtggcaggttaaccgcggtcgactcgctgagttagtaggtccaacttgtcaacgacttctgcctcatctcatcttcttccttgcccctcctatctctctttcctctcttccctcttcatcctctcttgagttatgtccaggtgaggccaaagtggagctcggtattgtggagccagctgaggtggtggcgtgactagccgatgcaccgatgaggaggtacggacgccgaagatgaagaccatacatggcgggggtgggggcgggggtgggggcgggggcgggggcgtgtggggg

SEQ ID NO: 11918 - DNA, 790 bp, Oryza sativa
cataggccaattcgcataagcacaatcctattttcaaccagcgagagcaatcgatacccagagccccttgagccaaaatctgcaaatggcaccttggccaatacatttcaaattatcaaacatcacaaagtacaaaggtgatacagatccaaatgaatatttgagggtgtatgagacggcggtagaagcggccggaggagatgacacaacgaaagcaaaaatacttccaactatgctagaaggagtggcattgtcgtggtataccaccattccacctatgacaatctactcgtgggagcatatgagagatacttttcgagcaggtttcattggtgtatatgaagagccaaaagaagcagataacctatacgccatgaagcagatgccgggagaaaccttgagaagttttatggtaaaattttcaagaataaggtgtcagatcaggcaggtagatgaagaaatgctcatagcatcagcaaaaagagctttgttgcctggccctctccgtttcgatcttgcaaggaataggccaaagacagcaaaggacctatttgaaagaatggaaagttttgcaagaggagaagaagatgagctaagagtgcaagcagaagaggctgcattgttgggaaagaagcagacgaagaacaagcaagtttctttaggggaagaacaaaaagcagaaaacactgcaaaaccatggaaaaaaaattcaagaacgattacaagcaagatcagaaaaaacaagtaaacttcattggagatgactcaaataatggagaaggaaaaggga

SEQ ID NO: 11919 - DNA, 1804 bp, Oryza sativa
tattgctcttgtgttgtttctagttgttgtgagtgaaaaaagggaaaggcttgatgctgttggttagggttttgcattgtctgatcatgtgatgcttgcatgtaaggtatattggcttggcgtgtttgtacttgaggaatttgaatatgtggaatttgcatttgtggaatgttggtttgggtttgggggatttggttttgaggaaaatgggtctggttgtaaaactgtggttgtatgagctgttgggtttgaatggaaggtagattttgagtagtttgcaaggtttgagtggattgcggaatttgggtggaaagttggttttgaacggattgtgggatttgagtgggaagttggttttgaggaacttcttgtgttgacttatcaactggagcattccctacttggggattctctttttccacatttccaacatttctttggatctctttcccgacttgattcggttgaccttcatcagtgtttaatgtctctgcctctctgccagatcctcctgctcctatggtttgatcatgcaaagcttgaagcctttgcaattctctttgcagttcttcatattgttctttgttcaccataacagccccttgtgcttgcaccatctcggcgagctctacttcacttggcgggttttctcttgtttcctctcttgttggactgacagtatttccgcctggcattgctttctccactctggtttgtgctgattgtccagttatctcttcccactctttcaagtgttgctgctgcgcttgcaaaagtgtcagtgtagcggattggcactgacttttgcctttgggaacgtttcatttactattcaagcccactccaaggagactacacgtccccacggacggcaccactgtcgtgacccaaggtcatggacaagattggggatagacgggaaaacacccttttatcacctatcttgagaaatgagctcgaataccaaatgaacacacacactaagtgacaagacttttagtattccgagatatcttgcctgctacaggctttttgtctgctttatatagttcacagctttacatgtgagattacaattgcgccctttgttgggcccacatgaaattacaatcatgcccttgctatatcagctaactctaagggcattttggtacattatggaggtcattatagtcttttggtgccagctggatgaagtggttgagtggtccttgggaatattctcttggcatctttgttgtccaaattgccttcttcatgatcaagagtcttttccaccaccataggtcttctcctcgaccgagggtcttttccaccaccatgggtctttttcatggcaaatagtcttttccagctcgaccaccctttccgacttatccggtagctgacctgttattaactcaggaaatacttaaaacggataatgagatttagtgacaagaatgtactcgaacggtattttccaactcgaatagtgttttccaattcgaacagcgttttaccgtttccctgttcgaatgaccatttgccactcggatactattctaactcaatctctttctctacagtgttttgggccgaatatagaggagcggtggtaaccccttgctacaacaaaatattatgacatttttataaatctaattaaatttaaaaaattttatagaaaagtcaaaacgattcagaataaaacggaggaagtactatagttgaaaggattactatatcatttgcgctcttccaagctgacaagcaattgcgtctcaacactcaacaggcccttgtttttgcgctgccccgagaa

SEQ ID NO: 11920 - DNA, 2592 bp, Oryza sativa
tgtaaagcttctgatacgaagtaaactggcatctgcttgttttctttctcttgcactaagactgcgcttactgtcactggtgttgccgctacatacattagcaaaggttgacctttctgtggacttgctaaagttggcatattctgtaggtatgtcttcaaatcatcaaaagctttctgacactcggctgtccactcaaatgagtttgcccctcttagggttttgaaaaatggcaagcctttctctgcagatttagaaagaaatctgctcaaagaagccattctccctgttagcctttgcatttcccttgtgttttttggtggctgcatttggtgaatcgctgcgatcttgtcaggatttgcttctatgcctctcttggacactaagaaaccaagcaactttcctgctcctaccccgaaaacacacttttccgggttaagcttgactgaatattttcttaagttctcgaatgtttcttgtaggtctttgccatgactaaacgcctgtttgcttttcaccacaatgtcatccacataagcttctacattgcggcctaactgctttgccaataccttgcctattaaccttgcaaaagttgctcctgcattctttaagccaaatggcattcgaatgaaacagtaagttccaaacggagtgatgaacgatgttttctcttcatcttccttcatcataaagacttgatgataaccggagtatgcatctaagaaactcatcaactcgcagctagctgtagcatctactaactggtctattcttggcaatgggaagtcatcttttgggcatgctttgttgagatctgtaaagtcaatgcacattctccactttccatttgccttcttcaccaagacaggattagccaaccattcaggatgcatcacttctcttatcacttttgctttgagcaatttctcaagctccacttttgttgcttgctgcctgtctgttgacattcttcttaacttttgcttttttggcttgtacccttacttgattgccaagttatgttcgatcaggcttctatctaccccttttagttcttctggtgaccaagcaaagacatccatgttgcttttccctactttcaagatttcctcctcaacatgcttttccagattttctcctaacaaaatgtattttccaggatcatcatcatctaactgtacattcctagttttcccttcaggaactggtttctgcaacttagagtattctccatgcttttgatcaacgacatggactcctttgacatttggcgttccctaaagctcaaactttcttgccgccaactggccaccttagactgttatcacccctcttggtccaggaagtttcatgcatatataattgtgatgtattattgcctcgaagatattgattgttgatcttccgagtatcgcattatactgatacggcatgtctaccacatcaaacactatttcctctttccttgcattgttgcctttcccaaaaaccacttgcaaaggtattttcccaattgcatgtacttgttgtccaccaaaaccttgcagaggcactcctgcacttgtcaatctgtcttcgggtatttgtatctttttgaaaacatcatagaataacacatccgctgagcttcctccatcaaccaaaactctttgaacttcgcattgtgctatttccactgagatcaccaaagggtcttggtgggggaaaagtattccttccgcatcttcaggcccaaaggaaattattgtcttcgaatgaactggtggatttgactgatagcttgtccctacatgatttacttgtctcacatatgcttttctttgtctttttgactcaattcacaaggaagagcatcctgttatggcatttatcaccctttttggagcttcttcgattgcttctattttcatgacttgtggtgcttctatagcattttgccctcgctgatctcgggccccctcatacttgttctcatattgactgacatgcttttccactaattaagccatatgcctacattcctcagtggaatggcctcctagaccatgaatttcgcaaaacttgctatagcattcttccgtagaatgaccacctagaccatgtgctttacaaaacttgccatgatcaagctgatattattttcctccgcttctgtcattattccaccattgtcctctacctctgccagaattccaccattgtcctcgacctcttgcagactgcccccaattgtttcttcctccacgagtgttttcccattgtctcttcccttttccttctccattatttgagtcatctccaatgaagtttacttgttttttctgatcttgcttgtaatcgttcttgaattttttttccatggttttgcagtgttttctgctttttgttcttcccctaaagaaacttgcttgttcttcgtctgcttctttcccaacaatgcagcctcttctgcttgcactcttagctcatcttcttctcctcttgcaaaactttccattctttcaaataggtcctttgctgctttggcctattccttgcaagatcgaaacggagagggccaggcaacaaagctctttttgctgatgctat

SEQ ID NO: 11921 - DNA, 1726 bp, Oryza sativa
ttgattttctctccgaagcgtgcggagtgtttactcgatttgctatcgagtttgattttcctctccgaagtgtgcggaggattttctcgatttgctatcgagtttgatttttctctccgaagcgtgcggagtgtttactcgatttgctatcgagtttgattatcctctccgaagcgtgcggaggattttctcgatttgctatcgagtttgatttttctctccgaagcgtgcggagtgtttactcgattcacaaacacacaagacaagttttttatacaggttcgggcctccattatggataacaaccctacgtcctgtttatatgtattaacatcgagaagacaacagaattttacaaggtggtcggtgttgtacacttcgagcaacatgttttcctttttttttctcttctttttttttcttttcttattttttttcttttcttcttttttttcttttcttcttttttttacacatagaatttcttcaaggaaatagcattccaagtgtgctttaactcttctccatcgaggtgtgccagcttgtatgctcctgtttctaacttcctttttactatgaatggtccttcccatttcgattccaacttttcaacagccacttcattgagtgttttcttgaggaccaaatcaccttcttctatttgcctgattttcacttttttgttgtaatagcttttggttccttctgtgctttgtgccattttttctaatgcttccactcttatctcgtggagcatttccaaggtgatttcccttccttcctcgtctttttgatcaaacacaacttgaggtgaattcgctcccacctcgcttggtgtcattgcctcatctccatatactagcctgaatggagtcatgccagttgatcgaacaactgtcgttcttaaagcccaaaggactgacaacagatcttctggccattttcctttggtagaaccttccagccttttctttatagcttctactattttcccatttgctctttcaacggcgccatttgtttgagggtgacccacagaagcaaagttgatttgcaagttaagacctttgcacatatctttgaatttccctgactcgaattgttttccattatcacacactatctccttgggtattccaaatcggcatataatgttcttccaaacgaatttttgtaccgaagcagatgtgattcgtgctactgcctctgcttcaatccaccttgagaaatactcaattgccacaatgacaaaacgtaaatctccttttgctcttggtaaaggacctactatatctagtccccatctgtaaaatagccgaaccgggggaattggttgcaactctcttggtggtgcttttgacgttgcaccaaatttttggcatgccttacatgttttaatgtacttctctttgtccttgatgatcgtgggccaatatactccttgtcttatcaccttcgatgcaactgatcttggtgcttgatgggctccggacaacccttcatgtatttctaccaccattctcatcccttcttctcttgttacacattttagcaaaggggcagtgactccgctcttgtacagctgcccttctatcaccttgtacttccttgacattaactgtattcttcttgcttcttcttccttttctggaagttgttcactaaccagatacttcagaattggctctctccaatctatctcgccttgtatgtttgccacttctct

SEQ ID NO: 11922 - DNA, 842 bp, Oryza sativa
  unsure (1)..(842): unsure at all n locations
cgcgcgtcanggatttgacanttccnatgttgaccaactccgctcggtacccatgctataatgcggaatgattttctggatgatggcttgacgtaatctctgccgaagcttaaggtctggaaccttgaaaaacttgtgcttcgcgtaggtttttctggattctatctcaaaattttcaagagacaggtatcttcggaagccgaaagcaggtctgtaggttttctttcgaggagtatcagaagaatttccgatgaagatgcagcacaacagaggcgaccagaagacgtcaatgtaagtgtctatgtacctccgtgtcctgcatctgtctatcaaggcccaagatggcaggtccagggattcgatgccgtgcaacacaagctgccaattgtttagcaagaaaatgcaacgcaacgctgggtccaagatggaattggaaagggaggaggcaatttcctccaatttgtggccaacgcaagagatgatgtcggtgatcaggttcacgaccgagctgaagccctgtgtgtgagagaccaacaccgctgagttgtgatcctgcaggatgaaggtgaggacggttttctttgcgccagaaaagcgcgatgtagttcatcatcagcacggtggtctcatggactcctgatgctgatgccctccggcgagacttgcagcatccattcttggagaagaggatcgaacttttccattatgtccaaaacgcgtgcttagctctttctcttgcgcaagangatgcgtccatgccgtcaaaaacctggcttcttgccatggcgggagaagcccgaagcaagggaacggttcttctttgaccatgcaagcacggcggg

SEQ ID NO: 11923 - DNA, 511 bp, Oryza sativa
gctcggtacccttgcaaaaggcatatctggaaaaagtactaaagaaatacagtatacatgcgagtaagcctacacctgctcccatagtcaaggacgatagatttgggaaatttcaatgtcccaggaaccagtttgagatcgatcaaatgaaagttgttccacatgcttcggctatcggaagcttgcagtatgctgaagtatgtacgcgccctgacttagcttttgttactgggatacttggcagatatcaaggaaatccaggaatagatcactggagaatggtaaagaaagctttgcgttatgtgcaaggcacaaaaggcctcatactaacgtacagaagatctgattccctagagatagaagggtattcagatacagattttgcgagagatgtagatgatagaaagtccacatcaggctacatattcactctcgcaaaaggggctatttcgtggaaaagcttcaagcaaaccgtcatagcatatcatcgatgatgtatgccgagtttgta

SEQ ID NO: 11924 - DNA, 819 bp, Oryza sativa
  unsure (1)..(819): unsure at all n locations
agagagtttggatgaaccactactataggcgcaaccgagctcggtaccctgttcaacaaataaaaagggacgataggtaatgagacaaacccccaactcccttttattattaactagcgttaaacaacatagatttgtaggatcgaaacacaagaactaagccaaccagagaggggtgaatggttggtatacccaaaaaccaaaacttttatcggaattaaaagttaccctcaaattcgatggatcgcggtctgaccgaagtagacgtgccggtctgaccgcctagaacacgtctgtctgaccgaggttgtaacaccggtcgaaccgccgaggtcaatcgtcagcacctgtcgccgccgccggtctgaccaccgtgtgcccgccggtctgaccgccggtgtctcgtcggttggaccgccacacccgagaaaacacaaatcgaagaactcttaaagtggatgatgactttattgattctctctgtgtttacaaagtgcaacaacagcactccttacaaaaatcttgacttaactcgaaacccttagtaaactatcaactcaattgctcttaaaagcgataaccggaagcctcaacgctcctctctattatacatgaggtagcagctaaaggcatgaacaaactatactagaagtctaatcccctaggaaacttntcgatagaaacaacttacataccaatcatccaaatttgactctttcaaattcactcgtatccataccacacaaacctccatgtatggcatatgaatcttaacaacacttcattgactctagcttagataaccatgaatttgaccac

SEQ ID NO: 11925 - DNA, 606 bp, Oryza sativa
gctcattattttttgctttcttggaatctttattgtcaaaaaccaattgtttctgcctcgaagattttgatttgccttttttctctggaaatacagttggtgaagattgttgcccggctgacttttgagaacgccgactaccagaccgccgactggacttctgggatgagcttctggaagtaggattttctagatcagctacttccatctctttcttttaaagaggacttcagagcatcagtatagatcaggaatttggcatgacctcataggtgtatgatcatggcatcaatgccatgtcaaagttgctaacaactaaaaatagcctgcaccgaaaggaaaacagaacacctataagatccatctggctggtacatgtgcatcatttggtgaccaaaagcagccgttcagaaaaaatgagtacattcgagcttcatcttcacagataactaagaaagtagtcacaaaaggctagcacctaaacagcttgggtctaaagaaaaaagtcctcaaaagtttgtcgtactgaaagtttgaagcaattttttagcaaataaaattctgataatatttaaataattatatgggggatttcctatcatatga

SEQ ID NO: 11926 - DNA, 849 bp, Oryza sativa
  unsure (1)..(849): unsure at all n locations
cgcgcgggttgaactagctactcatcggcgaattcgagctcggtaccctaacctcatcaggacaagtagggtctgaattaacacctaaaacgggaattgagctattcaaaaaatggctatcccgtagaagagtgccatcaccaccaacagaaatcacaagatccacatcatgtattggattagacatatcatttcgctgcactgaaatccagtcaatggatttacgctgcagtacgcttttgcagagattgattgtttccttgtgaactctgcacctatcatccagataattcaagacctgtaagaatattgcaaaatgatcatgagaggcatgagtaccgcaaaattcatatcataataactagttgtgcaagcaagaaaagcagggtagagaactcctacactcagctagatatgcaatacctcccagccacattgtctactattcagttcacaataaggaaagccacacccttgattatacttaattagaattactaaacaaccagaagtagtccctttactgactaacatctaaatagacaagaccaataagactttctggtttcacctgtatcatatcangaacactgggcagaaacaataaccatagtttagacacacgcatttcaacaaacagatggtgtgcttcatgatagccccacgaaagttcaaaagaagtgcgactaagatgaagatagccactcacagaggaaggaacagaaccagaacctccccatcttaaactatttctgtggttcataaccttaaagaacatgcaacatgttccatttgacccaaaccgttccaaaggagaagagaaaggaaattagccggcccttttgatct

SEQ ID NO: 11927 - DNA, 846 bp, Oryza sativa
cgcgtgatgatactacttattcggcgaattcgagctcggtaccccagaagtggagatgactttcggtctggtcttttcaagctctctaatctgtttgatcaaccgcttctcctcatccaagggtatgctctcatgagatatgcggtcgttcaatctcttgatctaataggacaaagcaatggagaaggcacaaacatgtaatcaaatattggactgaagaacagaaaaataaattatcataggttaaccgtactgccataccgatttctcaagctcttcaattgaagaacatatgcctgcaccctgtgcccggatagcattgttttcatcgcggaactttcctaaacggtttctaagaggttctatcgccttcaacttctcacttacggcttcgttgtattgcttgttctcagcagccaatggcttcagctctgagataataccgaagcgctcattctgcagattaagttccaaaatcagacatatcaccaaaatttcgtagtctgctcaaattggcaacatattctaggctctagcatcaatagcagatgacagtcgttttaaacaagttgtaaggaatataacttcttgctgatttaggataaaatttaaacaagcatgaccatatttatatgtactagaacttgtagaactaagaccataccttcttggcttttatagcctcaaaaatttgagaacgagctttgatcttcttctggaagtccttttcttgctgatcaatcttcaatttcagcttagggtccttaagtaagccgatactgacaaagaagaagctatgtgttttctagcttaggccagtcttctttgcttctttggggtgccaat

SEQ ID NO: 11928 - DNA, 599 bp, Oryza sativa
gattctgtggcttttcctttttcttgaacaatatattcgatcctacctcgcatcgtgtcaacggaggtagttggggcataaaagaaatccttgttcctgtaattaatgcatgttttaaatatgaacatttgtaccctgcatctgaacaccatgttatagaaaaatgtgccatgagctcagtacttaccacagccagattttgctttagacacaaaaaggtgtaggcttctatcaagtccaaacatcatgtcaggaagaagaactggatgcattggaatgggcaattggaaaaatgcatctaatgtttcaccaaccattcgaagcatcttcacacaagagggagcaatattctctctgttggcagctgaattccaagtctgcatgaaagacattgacagacttagtggaattttagaacaggaaaatcaagctaagttaattcaaacacaatatgtcaagaacaagttggactcatcattcaagaagaatattcaggacaattacatctcacaagttgactgagccaatctaacatttggtttacacatagcatgcatctggatgtgactcaactagctataattttttttccattctga

SEQ ID NO: 11929 - DNA, 837 bp, Oryza sativa
  unsure (1)..(837): unsure at all n locations
agtggggtaggactaactacttcnnnnccaaccgagctcggtacccattctctcctaaatgagttgcaggcttgtgttctacatgagcgaggaaatctcctggagctggtagatccagagttaggctccgattactcaacggaggaggcgctcctcatgctgaatgttgccctcctgtgcaccaatgcagcaccaacactgagaccaaagatgaccaaagttttgagcctggttgaggggcacataccacttcaaccatttctgtcagacctcagccttgctgcaaacagcctgagctcaagcggtcagcgcaggaacttctggcaaacactaagtgatcagagccaaagcatgactgcagcacaagcatcatccagcaacaccaatgagtcatcatctttagatattgctggtagcctgagaccttaggtgagtttaaatgtcagaactcaaaagtgtttcatgagctctgtacatgtaagaaccattaggagtaggtcattttgtctcttttagaggtacagtgtaaataccaaactagtgtcagatcctactattaagatggacactctgctttaaatctttaggaatagtgaattttatatatgggcagtgctttccaattattggatggacttagaacgtacaactagcattaaactgcttcatgggtattgtacactagatgcagcattctaaaagtcactgggtagacaatgtggctaaccgagaacccaaaggtggcacctgagtcgccttcggatttaaccaacaggtggtaacgtttcttcaaagacccacaccagttgttttccaacattttacacgaaaaccgga

SEQ ID NO: 11930 - DNA, 2153 bp, Oryza sativa
ttcgccgcatccccggcgacctcgtccacccctccgtttcgctcgccgaccgccggagcaccgtcgaccccgtccacccgagccgcgccgccgccttcctccgctccggtcgccgtttccgtcgtcgccatcgacccggggtgagccgtggaccgccgcttcttttcccccttcccttcccctccctcggccgccgctccgccgtgcctatggccgccgccggcgaccataggggcgcgggcgcgccgcctcccgccgctgcgccggcgtggccgccttcgggcgcaccgtgcggctgccgcgtggggcccggctgtcagccgcccgcgccctcgggtgcagctgacgcgtgggacccacggcgccggccggtgtgagcccgggtgcgcccggtccaccgtggaccgtggggctgccgcgtgggccccacccccgtggaaccggtccgcgcgcccctcccctcggctgacgcaataaatccattttaaattaaaaattaaatgaagaaattcgcaaatattcatttaaagagcatataaacttcaaatggccataacttggccatttgaactcggaattggaccgttcaagtctctaatttttccttaagaagtcaagaacccatttttgtgctttgtttctgcttgttatatggagtttattagagtaaaagccttttcttttccgttggtcgtgtagacactgcagcttcggaggatccgctcttcgtggaagttgaagccggcgtttgggaaagcgagcaaggcaagtcacatcatccttgaacatattgaatcccagtttataaaattattttaatttaaattaatgcattatcgctttatttaaattcccgcgttaccactgttttatttagccatgcctatttacctttgttatgaccttattattgttgttattgttattattaccttgttcaccctagaataaacaaaaccccaactagtgggtactctattcatggttccactagtatgaatttaggtagatgcttcgctgattaataggacaacattaggtggttttataactttagacttggggaatattcatatctcttggacactatggaatggttggcttatggtggaattggacatacacctctcttcctctttcaaaacccctaaaacctgtttttcggtggggtttgggtgcatgccagttgtgggaagtagcaccccggccactataaggactaagctcgggcctctgttgcaaagcactaccgtactaccacatgtctagtgggtaaggcttagtttgtggctcagtctggttataaacaaaagtacacggatggagatggatgaagtcgggggtcgatggacatctctaggacaaatgaaggctacacgagctgcggcccggtagtcgagatgtcatggcacagggccggtgtcctgctgctgggggcttagtcctgcctacctgtcccgggggttccggccgtaggtggggttgggtcggtactcttgtttatggctaggatgggttgggaactatgacacgtcttccgtccgtataccgtggtggtatgtggcacatggttacatgtgaggaagatgtgtcttgtgggtaaagatgtacacctctgatcagagtataatctattcgaatagccgcgccctcggttatgggcaagccgagcaatgtacccaagtcagtgttttaattcttaaaatttgcttaacaactaaaatgtggaatggttggcctgggttggcttgggacgagctgggacccagggtcgggttgccagttcggtctgaatcatcgtaggccttgggttaaggcaggtcgtgagggttcacggccttgattaataacactgtgtaactctaggatcgtctttataaaatggctttgggcaactaagtgacttttaaatgctgttttctgcaaaacttaacccctatattattatccccttgtactcccttgcaataattatgcatctccggtgtggcttgctgagtactgtggttgtacttattcttgctcaatctttcccctcttcagtaagagaagctttggagaagatgtcttaggtggagtcctggcttataccccagttgagcgcctgtgaagatggagccgtaggcccgctagtccgctgctgtttatttttg

SEQ ID NO: 11931 - DNA, 1599 bp, Oryza sativa
cacaggtgctgattcacatgattttccatataggatcgagcatatttctgagcaatcaaagatataaagatcaaaaaaataccctgttccccaaacccaacaactacgtaaatgcatgtccctctcaaaacctcaaattaaaattgactcacccctaaaagttttccagccccctcagtgggccccactacacacgatcagcatgaagtgaacacatgctttcacacaccatagtctctctatatacatctctctctatatatatacgcactaacaccaatagctaatgatgcatgtaaaatacataaccctcacttgatcatcatcaccaataattccccatttgcaacacacaccatggatttggagagctgcagctacgtgctgccattgctgacgtgctgcctcttcttgctctactccataacctgctatgccttggcggcggcggccggcggcggcggttcttgcggcggctccgacgatcacgccgctccccggagctacccgctggtcggctgcctgctcgacttctaccgcaaccgccggcggcttctggcgtggtacacgggcctcctcgcggcgtcgccgtcgcagaccatcgtcgtcgaccgcctcggcgcgcgccgcaccgtggtcacggcgaacccggtgaacgtcgagcacgtcctcagggcgaacttcgggaactaccccaaggggaaggcgttcacggacgtgctcggcgatctgctcggcggcggcatcttcaacgccgacggcgagcggtggttcgcgcagcggaagctggtgagccacgagttcagcgcccgcgtgatgagggaggcggtgggcgtcgcgctggagcgggaggcgcgcgcgaggctcctgccggcgctcgacgcggcggcggagggtggcggcggcgtggtcgtcgtcgacgtgcaggagctgctcaggcagttcgcgttcaacgtgatctgcagggtggcgctcggcggcggcggcggcgaggtggcattggcattgccgctgtcgaggctggccgcggcgttcgacgccgccgcggcgatcagcgccaggcgtggcgcggcgccggtggccgccgcgtggaaggtgaagcgcgcgctgggcgtcggctcggagcggcggctcagggaggaggtgaaggtgatacgcgacgcgatcatggagttcgtccgtgacagcagcagccgccggcggcgggagcagctgctggcggcggcgcgcggccgcgacgacctggtgtcgcggatggccgcggcggggtaccccgacgaggcgatctgcgacatggtggtgagcttcatcatggccggccgcgacacgacgtcgtcggcgctgacgtggttcttctggctcatgacgcgccaccgcgacgtggagcgggaggtcctggacgaggtcgacgcgtgcatgggcgacggcggcgatggcggtggcctcgccggcgtggacctcgagggctcgcgcagggcgcgggtgctccacgccgcgctctgcgagacgatgcggctgtacccgccggtggcgtgggactcgaagcacgcggcggaggacgacgtgctcccggacggcacgcgcgtggggcgcggcgac

SEQ ID NO: 11932 - DNA, 971 bp, Oryza sativa
ctgcgttttttggtgggacttcctaactcttcgtgtgcaacagtagcggcggcctgggggttctgttgctcttctcggatctcttgcctaatcttggccctcatcaactcgggcttttcgtcgaattcagatgtcagctcagctcttatcgacgcctggatcttggcttcaaggcttgtatctttctccgccttgttggaagtccgcttcttgtactgccacgcgtagtctggaaatccatacttccagggcacagaagacccaacgccctgtgtgcgtccacggtgttccttgttgcccaacgctttcgtggggaggtcgtcctctcgtctttgagagcaggcctcttgcgaggcttgttgctcggcaaccaactctttctgcattacaatttagtggggttaaatagactgcacgataggaaacaatgtgaacatctagtttgactagacacttactatagcttcgtatagtccttgatcttctgcatttggcatgaagattgtgccatcatcattcttctggtacctggccctggcccagttcctagcccgagggtgtgggatatcgccaaacacgagcggtgtgcacgattcttccgcttcttcatcctcacgctgccattcctcttccttaccggcttatccggcggtgccaagctagtgcggatgttggttcctggtctagagcaagcgatatgccttgcttctagctcttgactctagggtcgacttcttcacatggaatttctctcttggatctggattcgccgggttgtagatgaactcgcctactagcttagtcttgaagttcttctaagcattgcccataaccttgaaagcagcccgcctgagacggtcctcatgctccgcaggataatcaaaactctccttgaacgttagccaagcaatgtccttctctgcggcgggcacgaacttgatgtcatcttgtagaatactgaatttctgcct

SEQ ID NO: 11933 - DNA, 937 bp, Oryza sativa
agaagcggcagtaaggtttttgggaagcgcttcacgcgactgctccctgtttgtccgcgacggctcgccttcctcttcgttcgcgtgctgcgcgccttcgtcgacgctcgcaaccgcgagtagttcctgccgagcaaccggtctttccgccaccttggtacgtgttcgacatgttgcgcatatttgatctgtttatgttttactgcttagtttacatgtgtagatctaatgatgcgttaatgctagtatacatctgtaatgtcatgatttatttatggaatatattaaatcattatatgcctatattctcaacaatccaaaaaccttattataggcgctatgattttactatggctggttttgccgatgcactgaggccggataaatttaccggtgtgcactttaagagatggcagatcagggtcactctgtggctgacagctatgaaatgcttctgggtgagtactggcaagcctatgggcgttcttaatgctgaccaggagaaagaattcgatgaggccactactctctttgtgggatgcattcttagcgtgcttggcgatcgtctggtcgaggtgtatatgcatatgaccgacgctaaagagttgtgggatgcactgaatactaaattcggtgctactgatgctagcaatgtgtcacgtcctgataaattcatcccgaaattaaaaatcattttctaaaaggaataatagaattaattaaaattcgaaaagaaattggcaaacactaaaatacgtacaagaaaaattcaaatgtggcccggagaatttttgttaaattctccttggtctaaaaagagccctcaaattttagtggaattttcagagcacaaataataattattaagaaataaacaaagttaaaatgattttataaaaagaaaaatcctaaaaagtccttttttccccctccccct

SEQ ID NO: 11934 - DNA, 670 bp, Oryza sativa
attgattgcgccgtctggttttggcgtcttgtttgtcttgctcactttcttgggtggctctgctgtggcaggcgggctgggcgtatgctcgaccatgtcgaggctccgcttgtaacattgtactaccagcttagcgttcccttgaatagtgattgttcccttcagtcctgtcatcttgagcacttgatacgcatagtgagatgcggcaatgaacttcgcgagtgcagttctcccgatgatggcattgtatgctgtatcgaattcagcgacatcaaaggtgatttgttccgtttggaagttgtttgcttggctgaaagtcacaggcaacgtaattttacccaatggtttggacgatgactgaggagtgattccatggaagggttgatcggtgggcatcaactcgcttcgtaggatccccattgcgtccaaagtgctggcgaagagaatgttgattgagctgccgcagtcgatcaagactcatgcgatctttatattacgaatagtgggttcgaccatgatcggatatcgccctgggatgatagcagtcttggggtggttctcttctgagaattctatcttctgctcggaccacttcatcttgggcgcagccccctgccacgtcgaacagacttcacgttccgctttcttgtaatctcgctttgaggagtat

SEQ ID NO: 11935 - DNA, 873 bp, Oryza sativa
tgtttaacttaattcttctgcacttttttactgtcttcgatgcataatcatcatattcactgtcactgaatttatgtgcttcattttagcgacatggggaggagctaagttatctgatgtccttcagctcattggtgtgccatatcatactgaaattactccatcaggaggaaagcatgttgagttcactagtgtagatcagtgccctgtgagtttcttgagacttcatttatgaaaaaaaaaaatatatatatgacagctttagttattttttctataacatctttttcaaaatattattaggaggaaaaaggtggcccttacaaagcatcgatttctttaggccatgcaacaaatcctgcagcagatgtactggttgcatatgaaatgaatggtgaggtaggaccataggagataataataggttatatcttatataccatccttacatccatctatcaggatatttggttatttcatatatctgtgcatttttctaatcatatccctattatgtgtttttgttacaaaggtgctcaagcgtgatcatggataccctctccgtgtcgtagttccaggtgtgattggtgctcgttcagtcaaatggttggacagaattgacataattgaggaagagtgtcaggtatgcattatctaacttcttgtcaatatgtaaatatattttcagtttgccaaaaagatttttgaaactcgttcattttcagggtttctttatgcaaaaggattacaaaatgttccctccatctgttgattgggacaatattgtgtggtcaaccaggaagccccaaatggactacccagttcaggtgttaattcttaaccgtcttgtttccacacagtaagagcaagagc

SEQ ID NO: 11936 - DNA, 508 bp, Oryza sativa
ctggcgccggcgctggggttctgcaacgcctacggcacggggctcaccgacatgaacatggggtacaactacggcaagatcgcgctcttcatcttcgcggcgtgggccgggaaggacgacggcgtggtggccgggctcgtcgggtgcgggctggtgaagcagctggtgctcatctccgccgacctgatgcacgacttcaagacgggccacctgacgctgacctcgccgcggtcgatgctggtcgggcaggtggtgggcacgctgatggggtgcgtcgtcgcgccgctcaccttcttcctcttctacaaggcgttcgacgtcggcgaccccaacgggtactggaaggcgccgtacgcgctcatctaccggaacatggccatcatcagcgtggaggggttctcggcgctggcgaagcactgcctgcagctgtgcgcggggttcttcgcgttcgcggggcttgccaacctggcgcgggactttctggcgcgcaggtacgggccggacatgc

SEQ ID NO: 11937 - DNA, 731 bp, Oryza sativa
gttgggtgcatatactttgtacctctgagggtagaaaatcatggtacttattggtatttttctagaatggaagtcttctcttcttgttatcttattgttttttttttttttgggggggggggttataaatttttttttttttttttttttaatttggaaccaaccttacaaatttaatagtcgtattagtctcatcaggtcttttcttgaacatggtaggtgtatgattggatgacagagcgcagagatagattttcactctcatctagtgatatggcaatccagttggatctgattgcaaaagtacgtggtgtttcacatgctgaagaatacttcgaggagcttcctgatccattgaaagacaagcggacatatggttctcttctcaatgtttatgcccaagctatgatgaaagagaaaacagaagcacatttgagcagatgagaaaaaagggatttgcaactgatacattaccttttaatgtgttgatgaatttttatgtggatgctgaagaggctgagaaagtgtccatacttattgatgagatgatggaaagaaacgttgcttttgatgtctgcacttacaacatttggataaagagttgtgcggctatgcaagatgctgatgcaatggaacaagtctttaaccagatgattcgcgatgagactgttgttgcaaactggactacttacacaactcttgctagaatgcatataaagatggggaactct

SEQ ID NO: 11938 - DNA, 765 bp, Oryza sativa
aggaggcggaacaccggcgtgagcgtgtacatgggcgcctagtcggcttcggctccggcatctccgggcgccggcttctggacggcgaagatgccagagagagtgagcacgcgcatgaggcggcgcaggcactggatcttggaggggtggagcgtgaccctggtggctatctgggccatggtggcggcgccgccgtggtggtggatggcgtcggcgatgccgaggtccaaggcggccttgagagccatggacttgatgacggagaaggtgttgccgtagagctcgctcagagcatcgagcgagctggtggcatgttgcccgttgctctgaatgggcgccatggcactaccaattaattttgtcttccttttagtttggaatgggtttatgcacaagatgcactataaatagaggtctcaaattactgtatcaatgcaactcgttctggaaacatagaactactatactaggttatcagagaaaatgaggaaaaatgtactagtttcagggattccaaaattccaaaaacaaccagcacaatatcctatgcaattatgtaaccaatttttaatttaaattatgacatttggcaaaaatgtaaatgcacattaaagtatttgctgttgtttctattatttattgtgttgcttccatttgtcaatatagatgaaatgaaacaaacatgtccgctagaaggatctcgcggcatcatctcgctggagactttgcgtattaggatcatccaaacggacatcaaaacatttt

SEQ ID NO: 11939 - DNA, 1925 bp, Oryza sativa
ttcaacaacctcttcctgaactgatgtctattatacactcacgtgcaccatcctctaaatcagatgcagcctatttttggacctttagacttcagcacccaaactttcttcctcggtgaactacctcttccttgtacaacagattgattcttgctagacggtcatccttgccatgtgactgttttgcaaaattcaatcgacttacattaatagccgattgtattttctgataagtattacaatcactagtagaatgatcaaacaaattatgccacttacaaaacttggcatatttatgaatattttggttgtttatatagtactattttaacttggcaattctactagggaattatttttataattctatatatttagctcttctcttatgtcagttatattacctaatagatataattaaatattactaaataattcatataaagtctaaaagatgtaaactcgtgtttatgcttcaactcaattatattgaatgcacgtgttggaaacttagactataaaatcaatactcctcatcgaaaaatacatgtacgaggacaaacttgttattcatccctactagtttatccaatattcctcgtatttgccattcattcttcaattgccagtggccgataaaaactgccaatctataactgtatagttagaacacccactaaaacataatgtataccatactaaccaactatataggcgcatgcaaggataccaattacatctaaaactcaagatataagtatgctaaatctcattccacatatcattttcacatctcaactccatataccatttgtacaacatcatatagattcatgcatatatattccacagtaaagcgcgggatgttgtccattatatataaaaagttacaccacacttatttatttggaatgatcacaattaatcacaaacaacccaagcgagcacacacaattttgtctagtttcacaacaataaatatacatgatatagactagccaacggacgtctgctcattgaagaatgagtaacaagttcaaggatagacctcgatgattgacctgaagcccatgactggcatgatcttgtagctactaaatccagcttcaacgaaaagtttcttccactcctgttcatctcgctcaacgccattgacaaacatgatgagcgcgtcaaacaagatctgcacatctctgtgcttttggtcagatgggccaactccgaccactatatccatgattatcacctttccaccggcgtctctagatgggatggcttttttgcagttccgaagtatcttcacacagtcattgtcactccaatcatgcataatccactaaatatagaggaaacacatatatatgtatcaataaaatctgtatgtacatgtatacttctattgataggacactttaagaatattccaattttgataaatggtgaaatagggaatatttttagccataaacattagtgggaccaaactgtaatgtcttaaaataaaatttagagtcgatatcaattacaaattgctgattactattggactagtcatcaaccttaatttgcacccacaagggaaacatagttttgtaagataaatttagagaatttcagtgtagggatatatggaattaattgcggatatgtattttgagagtttagggatctagatgacacaccccttcatatatgtgtcaattagtgataaaataatttacaacaaattaaatgactgattaactccgtagatagaagagatagaaatatacatagatagcaactacatagaaaaaaagttggctaaagtccagttaaacatgtggttcgatatttttagacaaaaaaaccaaaatatacttgagagaatttcgagccaaaccaatctatgtaccttgaggaagacagcattggctgctggaata

SEQ ID NO: 11940 - DNA, 696 bp, Oryza sativa
atccaggtccttccttataaacttgtttttggacatgagtctattttgccatgggaagttagaatcggctctagaagaacggaattacaaaatgatttaacagccgatgagtattacaaccttatggctgatgagagggaagatctggttcagttacgattgcgagcccttgcaaacgttaccaaggataaagagcgtgttgctcggcattacaataagaaagtggtacccacagatttttcggaaggggaacttgtatggaagttgattttgccgattagaactcgggatagcaaattcggcaagtggtcgtcgaattgggaaggaccgtttcaaattgtgtctaaaggagcttacatgttgcaaggactcgatggagaagtttatggcagagcactaaatggtgaatacttgaagaaatattacccaagtgtttgggttaatgcatgattggctgatgttgccgatacataatagccgatgagttttcgtcatcttgagatggtcgatatagttatatcgcccttagttatttttccatattgtaatcggttgtggtttgccgatatacagccgatatacaatggctgatattattatatcgcccttagttgtttttataattttatcaatgcttttgacattgtaaaattaagggggcacatatgtacacaaaatgaaaatgaaaatttttta

SEQ ID NO: 11941 - DNA, 1450 bp, Oryza sativa
ccacgggggaaatcaaggccgacaacgccatcaaattcatcagagggatattctgcaggttcggattgccccaccgtatcataacagacaatggctcccagttcatcagtgccgatttccaggattactgcatcaggctgggagtcaagatctgcttcgcctcggtttctcaccctcaaagcaatggacaagtctagagggcaaacggcatagtactacaaggaatcaagacccgcgtctacgacaggctcatgtcacacgacaagaagtgggtcgaagaacttccatcagtactatgggccgtgcgtaccacaccgacaacttccaacaaggagacattcttcttcctcgtgtacggctcagaggccatgctccccaccgagctacgacatcaaagtacatgagtacagaagtacttcgatgaggatcaggaggagcagcgatacgacgatgtaaatctattcaaggaacattgcgaacgagttgccgtttgagcagccagctaccaacaagccctttgccgttaccacgagaagcgcatccgagcacgcacactttcgatcggcgactacgtcctccgacgggttcaaagccaagcagggcgcaacaagctctcacccaaatgggaaggaccgtacacgatcacacaagttctgcggccaggcgcattcaaaatcgcagacagcgatggtcgcgagttggcaaattcctggaacattgatcaattacgtaaattctatgtataagtcaatagtatccatacttgtaagacatcttacagcctcaataaagcctatttttcaggtatagactacaatcaaagtgttccttcccgatgatcccttacccagatgacacctagcgttgaaacctatcctcatgtccctttacgccgtcttgacaaggcctccgaggaacctaagggaacttcggctggggacgcccagagccgataaggtcttgtcggatcctgtagagacgaaagaccatgtaagatctggtcgtgtaagagttctcgccgtgtgtattaaccaagccgtgtaatcggaaataaactttccaacttcacggctgggggctaggatcagtgcttgttcaaccaaggcaggtcaaaggtccaagagccttatcttccgagaagaattctccgatgacaaggctgggggctagggagagtgtataactcaaacgactgatcaaagtcgcgaagtgagaagacactcatacacactacatccagagtaagaaagcttagttagatattccacaagtatttcttacaatcccatcaaaatccataactatattacacttttttcctaagacatttgacacaggacatgggaactaccaggaaggccaacgccaatccatcgactggaagaccttctccgtcagcggcgccatcgacttcgccaggccatctatctccacaggggttcaccgagaa

SEQ ID NO: 11942 - DNA, 4531 bp, Oryza sativa
acaaagaagataacacaacattctatttattcacaaacttgcatcatataaaagagattaaatagctgtagtattccacctttcattccaatttttatgatttaaaggagatcgagtgattgtagtatgccaccacaacatatattttccgattcggtttattcatgagattaaattggacttgtgtagaattaaaagagtaactaaaataattgcatatgagtgtaggatgtgcacctgcttcacgatgatgggatcatccctgctacgattcacaacataattaagcattgaatcaagatgatctctcactgctatgtacccatatatctgtactgggccactatacatatgtattttagccaacttaattgagaaaatttgcatcatgcgagttgaaaaatgcacagtgcatgtatccctattaggttgacagtccataggttgtgaaagcatcatcggctccaagcaagcttcaccaaagacaactaaattaatacatttggcaaatgtttgttataaaaaatacagatacgctttttaatacatatttatgcaaaattacagaaaaccattgtctgatagaaaaaagttatatatggtttgcaatatgttcaacaaaacttgaactgatttgttctgaccagagttacttcatttcttaatagcccacacctcaagataatttctctggaacatccgtagtacatttatatttcaacacaaaagaacctcaattcttataaagagctagcataacaaaataggaaagagaattcaataacttactctcatgacgatcagcaatttgaaatacttggataaaaccagggcaaaacttgtatatagaaccatcacggtggctactgccttctaatattgttgcaggatgtacatcaacagtgggacagttatcgctgacaccttcagtaaaccaccacatatcttttgtttttttcgagaaaagcctcatgtgtgacctacacataccttttataatggaaaattgcttggccagggtatagttggaggtgcagaaagaatcattagcataagagaagtggcagtgccagtcgaacttactcttattcttctcattttttactccaatgatgcttggcatgaccttgcatccgtaggcaaatctatcaccaaagagcataggcaaaccttagcatctgactcatatatctggcgcaaatttattccaatactatacgttaggctgcactgttcacaagtactaatttaccatcgaatttatcacatagctacagattgttgacgttccatccttagcactgttatctcgatgaaactttgaatcagtagtcttgtgataaagttagcacaaaatctgtaatttaatagttttgttatgtggcttataagcatatggtttgtgattaatttgggttcatatctgtagcattacaacattatagcataatcctgtaattatacgatagttttgtcgaattaaatttgaaaatatactgttcatttttttctcagaaatatccgggatacaattttttttgacacaaatatattgtcattgttgagtgggactactaaaacgtcatgatatcgttgaaccgttgcgagatcgcgggacccaccacagtctcagagccatggcgtgagattgcgcggtcgcgcagagccaagtagccaaccagtgacatggcctcctgattagtgattaatcatcgtgattagcagttaataattactgattatgctaattaaagaaataacagtaattaattaattgctaatgtcgctaattaatctattaatcgcgcgagtgcgctagttagggatgtgaattcgcggtctcgcacactcgccacgcttccattatgcgacattggtatacttctgcaaatcccttctaaacgtgtatttatgtgaaaccaatgaaaaaaagttatagtttcaaaaaaaaactagttatatagtttctgagaaatttattattgaataagatgcgtaacataagtcgttactgctgaaattaaaatcgtactgttttctacattgggatcaaaattccgttcctcagttctgattctagtataattaaaaaaaataatcccaactaatatcagtttcaatttttttccccagttggggagtcgtctgaaattacaaaaacttcaaaaaccctattaagacatctcgaacaagattcaaaaccccccaaatccaaagttggtcccaatcaagatggagaaattcaccgcaaaagcgcatggctctcactgtaaacgggcgtaagcaaagcaagagaaggcaattcaggaaagaaaagaaactgaccgagaaagatgatgcagatgccgcctagagtggagcatctcgccgctcaacggctgcgaggcggagcagaggcagcgggagacgggagagttgggttgcagggtggaggagcaacgagagagtcgagtgacggagcgagagaggaggaggagtcgtatctactccgccgttcatcggggggcggcgcgatggctgtggaatgtggatggctccaccgattgggtcgtttcctcggccggtcgggccttgggtttagtcgtttagtttctcttctgatctgttctcttttttttcgttcgtttgttttaaatttgatctttttatatctaatttttatctgaacatttcttaaaccacgcaaaatcttagtgatatatacgatgatagttatatatcaagttaccagcgaacagtactgccactacaaaacatcaaataatacttatgttatcttttttttaattacacattacatcgcagacactcacaacacacgcacactcacccctatgaaagcacgcacgcaaaccctacccctataagagcaagtacaatagcaggctattagctagctacaaacatattttaatgagataaacgataagagagaagagcagcaggctatagatttgtagccagctgcagcacggactctaagacgcaatatacgtatgacagatgggatcatatattaatagtatagtaagtaactattgtatgaattggctattagattgactatagatgaattggagctaatagtgggctatactattaaacttgctctaagcattttcgaagactgggccggcaaatcctagagattgacgaagtcaccactggcatctcactatcgacgggtacgtcgcctaccactgaaagcacaatgccgataaatcctagaaaattcgctcatcttcgttaaatgataacgatactaagggctagttagaatctccaaccaggtttaagcttttcgatacataaaataaaacaagataaaccattagcacttaaataataagatgagtattaattattataaactttcaaattagttttatttgatttttttcttaaagaaacttatgtataaaaagtttttcaaaaaaaaacaccagtttaaaaacatactaatgaaaatggtaatgttgaagttcgaagtaaaaaaaaaggaacgcatcctatcaaaacatgctaactgaaaacgataaagttagagtttggagttgaagaaagatcacatcctacgatgttgagccaaggctcggacctcggagtagtaccccggctcaccgtatgcagcacaagaccactaatgcattctctccattcaaaatatgagattatatgcccttccacttctctgtaaatataaagagaaaattccctatctagcataaaaaagttgttctttcctctatagcacctaagcttaaaaagttccctatctagacacttctaaaatttcccttccctatgtagcacttctgttagtttttacacttgacggtgctaactagcaagagaaaagacgattttgcccttctttagttttcaggcttgcccttacatgagcgttggtattttagacatgatttctcttgatttaacgtaacactgcaaatataacatgccgatccactcttttgaaaaataataataattatcctcttgtggtttcacttgtcgttagttaacttaagtaattaataaccaacatcatgttcaggcaagtctaaaaactaaagaagggcaaaactgtcttttctcctgctagttaacaccatgaagtgtaaaaactaacgaaagtgctatatagggaagggaaattttagaagtgcctagatagggaactttttaagtttagatgttatcgagggaagagcaactttttttatgctagatagggaattttctcaaatataaatgattttaggattagaaggtaggtatagagtagtacaatatatttttttctggtttatttctcattcatcaacttttgtacttatttacttatatactccctccgtttcgaaatgtttgacgccgttgactttttagcatatgtttgaccgctcgtcttattcaaaaaatttaagtaattattaattcttttcctatcatttgattcattgttaaatatatttttatgtaggcatataattttacatatttcataaaaatttttgaataagacgaa

SEQ ID NO: 11943 - DNA, 8715 bp, Oryza sativa
cctaaatctactttacaatcttatcaaactaggactttaggccgttccacaatatacagggaaacgtaatacccaagtcatgatccgttacatattatatagatataagttatcccctatagctagtcggataaccatgccgtgtgggtatggggtacccataatctcgacaataccaaaagtgttacttcatattatcatgattttcatgcttgtttattacgttgtggcttagatgaatgcgaagaagctacagaattgaggtttttacgtgggcataacaaagaaattcaggacatgcttgcttgtgaaaaatatagatctctttctcatttgttacaacttgcttgcaatgctgaaagtaaaatagaggaggatatgaaaaagaagcacgctatgtctttgcctcctattactaaccatttgcaggaagtgcataatcatgaaaatgaggaaagagacatgaaagagccgctaatcccattgttcacactcgaattcgatgcaccttcatcatctaaagagatcatcgaaggtaaactaaatggtgctgaaattaatcaaggtgagtgtgttgttaatgaactaaatttgtccacttttcatgctatagtagagcaacccttagtggaacaaactgttgagattcctttgtcacaagttgatttgtttgttgttccttgtgataaagaagagttgtgtgataatacttcacttatatcaacgcctatttctaatgttggttctttacgtgatgattttaagcatgttattcacattgctaatgaagtagaggaacgtgaattgacatcttttttaaatactttgggctatgttcactttgatgatttttatgagcttgataatttgaaggagaaattatttgctaactatgatttgccatgtccaaccaatgttatatttcacatctttggcgaatataataatcttggaatatattttttgcatagggtttacatctgctcggatttataacttcctgtacatgtggataaaatatgcaagttagagagaaatgttattgctaaccaaattgtctctagtttgccttgttttgataggaagaaacaggttgttgtaaatggactacgtaaagagcaccatatagaaaaaccgagaacggtttttcgtgaagaaggggaggatgatgtgaccatggctaccacggatggaaccattgctcatatcatagatgaacaagaagatatcgagatcaagtcctacaagtgctggaatccgattcggccacctgctacactgctgacttcaaacggctaccgaatctgcatacgacctccgtttttggcccacgagtacttgatggaaagctctcggagtcctctttccaacggatctggcctcatcaccagactccatctcgtttggccgcaaacacaaaaacaaggtgttgtgttacctgtcatgggcatttgggcttgtaacttcgtttgggacaccggcccaagtggggcccatgtggggtgtgccccaaccaggtggagcatgaccctagagtccacttgttcgtcctcacacctttataaatagttacgtacccctttacagtttcttgggttttgatagattaaagtttagccattgctacttgcttgcagcgcgcgtgtcggctagaccgtccgtctgcttgttcttcggaaccccaacttatcatttgtattaaattcctatttgcaatatcagattgcttttatcttgttattgcttgtttcttttatttgcttgcagaagtagggtttatctacaccggcaagatcaataacccatggagaggtgtatcgatcgctaaggcgcaacacaacgtctcgtacggttgcagtcggatcgtcaacgtttctcccaaatcatagttatcaccaactcaccgaaaagtcaggccaaacaacagccttgagtgtcacgagtggaactcagggttcatcatatattctcttgtaaaataaattatgtcatgttgtttgaccttaaaactctccggttttaaaatttttgatgtcttagacaagttttagatcaaacttttatatctttgagtatcgataactttataaatattcagtttaagggcactagaacaacatatatatttgtcttgcaaaatactataataaagtaaaatgtatttatttattgtatatattataatagaaatacatagtgaaacacatattttataaagggaaaatcctgaattacacccttgagatattgggtcaatatgaattaccccctcaaactggaaaaccatatatctttcaccctcaactattagccagataaattacccccggactcaaaccggactggttgtggtcctatgtggcagaccagtcagcgatctttttttaatcaatgagccccacctatcaatctctcaccctctttcttccccctcacctctctatctctctctactctctctctctctctctcttccccctcaatcacctcaaggacagcagcggcatgcaactcggcgcgtccatggtcgcaggcatgtgacttgcgacttgttgggggcggcgaaagggattcccgcagccaccggcactcaggtcagctcgaggccacggagctcgggaggccagcagttgccgacgcgcagctcgtcgagggctgctcgtagccaccggcgctcgggttggtggagagggctgcaaagcgagccgaggacggcggtaggcagagctcggggcgatggagagggcgcccatagccgccatctctgctgccgccagcgcgcgtctcgcctacgccacaggtgtgcgggactcctccgggctctgacgcgagagagagagagggggtgagagggacatagagatatctgacagatgggcccatcttatttttaataaaagaattgctgactggactgccacgtaggatcaatacgcttgcaaagctgctcgggggatttatttttatccagtattgatagttgagggtgaaaaatatcttattttcgggtctagcgcggtaattcgtacttaccaaatagttcaaggatgtaattcggacttccctttaaaaattgtatcatggtataaaacgttaagaattatggaacaacaggagttacagatttgtacgattaggacctgtttgggaagcttaaaattctaagaactagctagttgatattcagcttttgagaatatggaaaagctgggtttctcagcttctagcttctagttcattttctagattctacaactatacagcttttcaaaatctagaccaaaaactgaactgttttgggagcttctgattctgggagaagttgtagcaggtagagcctcccccaattagacgctttagattgtcccagtagtgtaggattctgattctggaagaagttgtagcaggtagagcctcccccaattggacgctttagattgtcccagtagtctaggattcctagatctagctactggtatgtatggatcaaagcaaaatttgtttgttcatttttgctccgtaatgcgtggaccaatatttcctaagaaaatcacatgagcgactttaatttgtgatcacaaaatccttttaacgtacgtttgcattttagatttgaaccaaaaacttatcttagatgtgtagacgtcattaattgctgattacctgatcattttcgtatgctgaactagatgatactccgccgcgttgctgcggaacattgtaatagttaaataaactggtatagtaattatgagaaactgtaacaacttacatatgaaaagaaaagaaattattgtgccttaggagtactatgtttgtgatgattttcttatgtaaatccaacaaaaatggcaataaataagaggtggtatggttaggaccttccagatgtggtagtccaactgttgtgttagggacaggcagaacatgatggccctataagtttagtttagatagtaattagaaggagaaaccgaagaacctgttggtaggttgtttacgtttcatgagttaaaaatgagaagattaggaagattagcattggagttctgcttctgcaggctaaaaattttatgggagagaatgttgtttcgatgataaatatttggaatcaaacagcaactgaagtagtacatatggttcttttcttaacacttattggaagcatgaacgaaaataagtgtaaaagccggaaaatattgtcacctttgtgaatagtgtgcaattgtgcatccatgtgtaaatatgcaaaaaatgcatcttgaaaattgaacagttgctcagacctagtcaaatagcacacagacagaaaataaaaagctattaatttgtcatgtagcacaagtttgatagatgcacataaatacatattacgatagaaaaaaattgttgtgctgaatcatactatattttgcatcaaatattagtagcaacgtaggagtatacagactaaaacttataatcctgaggctttatgttgcaaaggaactattggtaaatatcccccaccctagaatgatgcatgaaaactgatttagggagagataacattgctcacatcatctgttaccttaatggcttaacgtggttccgtaggctacatcattggacaactcattcaaaagtcgtttgctgaagatcacctgatggctgatgctacctgtctacctcaaatgcagtatatgtgtaggcattttatcaatcagaggcacatattggttggagaaatttacctcggaacagattcactcgtttctgcagcagcgggagcaacggacggagagaaactcctcaattttgatcgatatatccagggactgaagatactccaggaaacaagaacacaaattgcctgtggcatccgtcactcagatcagagtcgacccaatagaaatacttacggcaagaaaagaacctcctgatttaagaaggctatagctgccgcattagatgcaggcattttcttggagtgaagacatggggcgacagtttgaagagagggaaacgaactggatgaaataattgatttggattggattgcatttacgagagacaatgtgggtggctgatggttgaatgccaggggatcgcggggctaggtgcatgggcgtatcgattgggcggggaaggcgaaccggccgacgctaggagggggagacgaagcggagcccatgcggcacggaggcggacaacatgctggcgccggtacgggggagcgcgttgagtgagatggagagaatgcaacggcgatgcacgcgatggggataggcgagcgccatgcgggagatggataggatgtggcggcgatagagatgtggtgggggcggcggagcaagatgcggaagagggtgccgatgcgggtgtgcgactaagcgagagagatgcgcggtggccggtggggtggcgatgtgatgcgggagagggagccgatgtgggtgcacgagagagatgcgatgggggtggcgatgcgcgagcactatgcgggagaaggaaccgacgcggatgcgggcgtgtggacggatcagcagagcgattagattggatcgaacggctaggaaaaaaagatgacgtggaagcacaggaaccagagaattactaatagtggggatgatttgtagaggtgtataggattactgtaccgtatcatttggaatagacagctcaatgtacagattaatcgtcatcactgggatttcactcgtatatgaaaatcagcataagttactccctcagttttttaatagatgacgatgttcacttctgaacacatttgaccattcgtcttattcaaaaattttatgcaaatatataagatataaatcatgcttaaaataaaacaactcacaacaaaataaattataattacgtaaatttttgaataagacaaatagtcaaacgtgtgataaaaatcaatggcatcatctattaaaaaacggagatagtatttatatactatagacacccatttgcattatcgatagcacccacacgttgtataacatatgtaccctggtggaataattagccgtaaaatacaagcacccatagtctaggatttgaactcgagtggtgatctggttccaccacaagaaaacctaaccagtttgtaaaatcaagagttataggtgtatatatttttaaagacactttaaatgttgcctaaaatatttttaatgtagagacactttagagatatttttattcatattttctcaaatttatcttgtaaatgcatgtttttttcaacactttaaaatttgactaatatgtaaaggcatattctcgaggtatttcaattcctgtagaggtactttttggaattttaatcgaccctaagtaactagatatgacataagagtggtatgattagagcaagaggcatcgagttcaaggatcaccaattgtatggaaagagatagtattttttttccttggtttgctatggttgtggctttttttaatgtcttagaaaatacctttaatgtattttttattgactattgcatctagaaaaaaaataaaaaaaacacgagtgatggagggcaatggaatggtaaaaatctaaacattctatataaaagagtaaattgcgctagcaagcaagttcaacaacatgcaaattactctttttggtataatgacttgggtagtccgtatggacctgtccaaaacaatctgtggagattatgggtaccctaacccatacggcatggttatccgactagttttaggggatagcttatatctatggaatatgtaacagatcataacttgggtattacgtttacttttatattatggagcggcctaaagtcttgatttgataatattgtaccgataccgtattggttaaggtttctatcttgtaatcctgctccccatcctatataaggtgggcaggaggccctctagggggcatgagacacaactagatcgtcagatctatactacacccggcggattcaaatccccaaacaggagtagggtattagggcctgaacctgtctaaatcctttgtctccgcatccatccacttctaggtctcgtgcgctacccccttttattattgccgaattcatgtttcgacagatgacgcgccaggtaggggtgcgtcgagtttccgtcggtaaagtgcgatggaatcaatcatcaacatgaccggatcgtacacgcgcgtcatccaccgtcgcagtgggctgcatcaccgccgcaaggaggacggagggcgcgtctcatcagagcgttgagcgcctgccagatcgagatatcgcgccgatcggtcgtgtgctgtttggacttccggatcggcgagcagctacacgtgacctgcagcaaccagccgccggcacatgatctccgtcgacgtcgcttggtctaattcaatccggccgaccacctcgatcaatctacatccatgcagctgtatagtccacgcgtcagatcgatccgcatgtgcatcacatgacgagggccaagcagggagcaagaatatggcatatgcatctaatcttctttctgctaattagattgattattaaatcagattgattgatggtctttttcttctttgctctttcttctggtgtatgcatgttgccggcgaccaaggtgttcaattaggcatggcataattaagccgtcgcaacgcatggcgaagccgtccactctctgagcgaattcgagtcgtgggctggacaggcatgcacgaaagttcacatgacaagatcgctggagatgtacaggatgtgtcgattcaaccgccatgcatggattaattaatccagccatacatgcattcaatcgctgagatttatacatttaatttgctgatattaatcagatttatttgatttgtttccatgtgaatcgcggagcttcaccaatggacgtcctgtggctaccacgggtcacacatgggaacagccggcctatggcttgtcaggagagaacacatgcagaacatgccgagctatggatcgcttgattagtcctagcgacacagtgcaagaccgacaaccaattttctccgtctcggagtcagtttgatcgaggagatcaatctcatttctgctgtctacatgtaataccgcggcactattgctaccgactggtgtcctcgcttatacggttggttggtcacactaccgtttatgagcgtccacgacttcaccgaccggctggacttcgccgccgccgactggtgtttccgcctgcacggctggcctattatgccaccgttgttgggcgtctacgacttcaccgccggcctgcctccgtcgccgccgactggtgtcctttcctatacggttggttggtcacaccaccgttcatgggcgtccacgactgcaccgaccggttggacttcgccaccgccgactggtggttccgcctgcacggctggcctattatgccaccgttgttgggcgtctacgacttcatcaccggcctgcctccgtcgccaccgactggtgtccttgcctatacgcctattatgccgccgttgttgggcgtctacgacttcaccgccggcctgcctccatcactgccgactagtgttttcgcctatacggttgacggactccgccgccgttgatgggcctcgtcatctacaccaccggcttccgactggtgtttccactgttattgatggacaactttgttcccacattggtcacctctgccatcatctaggggaatattacaaagctaagtcat

SEQ ID NO: 11944 - DNA, 1003 bp, Oryza sativa
ttcattgatggtagcaatcaaaagtaatgaagtcgcatagccatggaggcgaagaaaccagtcggcagcagacaagttagccaacagtgaagatgaaggcgtctagcaacatcgacaaaattgagcagccatggtggcgaaataatcagtcggtgacagatgaggcagccggtgaagaagatgaagatgcccattagtggcgacataataagccatccgtgaaggcgaagataccagtcggtggtgacgaaagcaagccgacggtgaagatatagacacgtatcaaaggcaatgacgaaatccatcaatcatgaagatgaagaaaatagttgacgacgacaaacgcaactgacatgatgaagatgacgatgtcggtgatctagccaatagcagtgtagcaaccaatgataatgacaaagacgctcatcagcatttgcatagtaggtcaaccgtgaaggtgaaataataagtcggcgaaaacataatcatccattagcaacagcggagatgtcagggccgatgaagcagaggtgctggtgatgatgtcagtgacaataatccatcaaattaatgttatagctgttgtagatgcttcacttggaggagagttgatgttgttgtccaactcgtccaaaccgaaatatttgaagttgttgaagtagaatgtctgctccgaatcaaagatgaagataatgactcctggagttgactcgttggttgattaattgatttcttcagcttgacataaaatttgtcaaattttgagccttgtatttgtgtagcccccgactctttggttagttgggaaacaactgaacatagagtcgagaattatagcttcttgtcgtcgagtagtcattgcttgattgaagatatgtgttgaagatgtccaagtagaaatcctgaatattggagagcctcttgttgtagtaaaataacatggcattcgcataccgagatgtcgaggcttacacagacgttatggttggtgaagtagcataac

SEQ ID NO: 11945 - DNA, 1056 bp, Oryza sativa
atattttttatgctgtcaaactcgactgcaaagatttggtttttcatgtcgccattgttctcgctgttgaggagtcccaggaattgtactggcaacgcggatgaaaaattcttgcttggtgctatgaagaatgtaaagccttggctagggtaggtagattggacaccaaatacaaaagatgtggaaaaggattgcaccaggccactggagaagttgcagaagggcagcggagttggatagaaagcatgcccattgagcctggtagagccattggttatgtcgaggaggccgttggcagtcaccatggctgcaccatcaagggtaatgttattgtgggcgaagccagagtagatgaatacgtattcaccatatgcacagctcactagatcaaggctaaagaacagtatctgtagaagtaataaagtgagcttcatgccagccttgactataaacccaggcctttgcccacaatatttgtagaagtaaaaaagagtgatcgaaaagtgaggaggtgatcttgggcagttgcctccttttaagcttacaccggagtttataacatccagagataaggcaatgtctagcaactccatggcttttacttttctcttgttttgtttttccccgctgccgtatctattcaagtatgtatccaattgtggacaaggttaatttgtaagttgactactttactttggtgaatactatcagtattcctgttaaaaaaatactatcagtattatcaccgatagaagtgatcttaattattgatttataagtttaactaacaatagagaaaaaaatattctactacccatagttgagatggtagtataaatagatatgatccatgtaattagaaaagatgagcggctattaatttctactagtagtagacaccgttgttaaacatttctctataagtttgttaccgatcgataccaatatatgtaattatgtttaatttttatttgtgtaataataaatacaagaaaaaatatccaaaatttccatggactaagtaatataatatatttataaatttcccgaagtgat

SEQ ID NO: 11946 - DNA, 1939 bp, Oryza sativa
tgattgaaattcggggcttgaatgatatgtccaaagacatcaactccaaagcccacttagcaatccgtccgtttgcttcacggttgtgcagtatatcaccgagtggaaatgatgtgaccaccgttaccgagtgaccttgaaagtagtgagatagcttcctggtagtaattagaataccatataatagcttctgaacctgagggtacctcgttttggagtcggctaggacctcgctgacaaagtaaatcggtcgctggactttctggacatggccttcttcctcacgctcaacgaccaagactgtgctcacaacctgggaggtggctgatacatacagcaacaacggctcctgcgggtgtggtgaggctaagaccggtggctcggtgaggagtttcttaaaatcttcgaaggccttctgtgcttcgggtccccattgaaaatcatctgttttcttcagtagcttaaagaagggcatcccccgctcgccaagtcttgaaacaaatcggctgagcgccgccatgcatccagtcagcttctgaacatctttctgggtacttggcggtttcatgttgaggatagcagtaactttctccgggttggcttggatacccctatgagacaccataaaaccaagcagcttccctgacggtactccgaaggtgcacttttcagggtttaatttcatcctgaaagcgcggatgctcgcgaaggtttcttctagatccgagattaaatcatcattttgtttggtcttgacgactacatcatccacataggcttcaacgttgcggccgatctgcgttgagaagcatctctggatcatacgttgataagttactcctgcgttttttagtccgaacggcatggtgacatagcagtatgctccaaagggcgtgatgaatgaggtcttcaagcagtcggattccttcagtcggatctgatgataccccgagtaccaatccaaaaaactgagaagctcacagccggcggtcgagtcgactacctggtcaatgcgaggcaatccaaaaggatctttagggcaagacttgttgaggtcagtataatcaacacacatgcgccattgccccgttttcttccgaactagaaccgggtttgccagccagtcgggatgatggacttctttgatgaagcctgccgctaacagcttggttaattcctccttgatcgcgtccttcctgtcttgtgcgaatcggcggagtcgttgtttgataggcttggcatcttctttgacatgcaaggagtgctcaatcacctctctaggaataccgggcatatcagatggtttccacgcaaagatatctttattgttctgaagaaaggtgatgagcgcgctttcctatttacaatctaactcggcgcctattacagcagttttagtaggattagaaggatctaggggaatcttcttagtcttggcttcgctttctccactttttgaagtcttggtagcgggcacttctccttcgcttgccgtggctgcagccagtcggatatcctctcgggcagacgccatctcgcgggtttgggccatgtcgcaactctccttgtcgcatgtgacggcttgcttgatgtcgctccgtagggacaggactcctcggggaccaggcatcttcatcatcatgtaagtgtagtgcgggacggccatgaacttggctaacgccgggcgtccgagtatggcatggtatgctgtctcgaaatcggcgacttcaaagctgatattctctgtgcggaagttttcccgagtgccaaaagtgaccgggagggtgatctggccgagtggagttgcggataatcctggaattactccgtgaaaaggcgcattgcttggttttagctcggagcgaggaatctgcatatcatccaaggtcttggcgaagaggatattgagtgcactgccaccgtcgatgagggttctgcg

SEQ ID NO: 11947 - DNA, 4172 bp, Oryza sativa
ggttgatagcaccttgggcgctacacacacacagttgatctagattttaattatacaaatttctatatataataaaattacttcctgtgaatacactgaccaattacatcaaccccttcgtatgtaacacattatacttgtttgaagtgcccaagcaagcattcgtaagtaataatattttttcaaatctttcaaattaaaattagatatgtcgaacaccgtgagcatcatcgtccacctgagaggccagagaatgtgccgatgcttgtcctaaactccggatatgacatggctgatgggttaaatcctttgctttgcatcaaaggtagcttgctgaaacctagacgtgttggtgctaactctggctgtggcaagtccttgtcgaggtattgcattacctgccgcatatttggccttgaagcatgaaatggatgcaaacacacaagagctaattttaggactaggcatgcctcttcaatgttataatcaccttggagtctcatgtccactgcctcagtgagagatccatcatgccaatgcttaagaacccaatcaaccagcataagttggttgccttgagagttttgtttcactggcctttgtccacaagtggtctcaagaaggaatgcgccaaaagcaaacacatctgtgagaggggatgccttacctgtctgtaccatctcaggtgctaggtagcccatggtcctaaccacatgtgtagtctgtaggtcagtaccatgatcatatagtcgtgcaagcccaaagtcgcctaattttccattcatttcagcatcaaggaggatgtggttgcctttatgtctcgatgtataacaactttctcccatctctcgtgcaaatagaacaatccacatgcaacatctttaattatctgaaatctttgagcccaattaagtatagccctattgtctacatcatgtagatacttatcaagactaccttttggcatgtagttatagaccaaaagtagttcactcttccgtcgacagtagccaagtagtggcacaaggttgcgatgtcgaagacgaccaatgctaacaatctctgttataaactccttcattccttgtctcgactcatgggagatcttcttcacggcaatctccaatttggatgtcgcaaggactcctttatagactttcccaaatccacctactccaatcatgtttttattcttaaatccttgagtggcatggaacaggtccttgtatgaaaaccgctgaggcccaaaatcaatctcccaatcttctcgtagctcagcatacagtagcttcctccgcacaatcaaaatgaccatggtgccgacaatgatgatgaacatggcactggctattgggaggacgatttccaagacattggaacgaggcttggttccaacacgaggtagctttggtagtttggtgatatcaatgtccggagctggaacacccatgccaaagctccagccaagcacgatatgtcgtgtgctaattacgccagttgcagctgaaaaacctatgtacacagggtctgtgagcacagtcgagagatcataggtggcatagagcagtggcctcttcggctttggtgtatcaatgggagccatggtcacggtgatctgcgtggcctcttcgctgtattccatccaaacttgcatagcccgaccattgtacagagtcaagtttgtgaaaatcccgttcttgtcatcatagaagccagcaaaggaggaattcacggagcggacgtcattgatatcaatgccaacatggctgttactgatatccccaaactcattgttctgaaaggtgtcgagctcgactgcgaggatgcggttacttgaattccctctgttgctgatgttaaagagacccaggtacccatctggccacgcagtcgagagattgttgcttggggctatcaagaacgccatgccatcgtagcttctatcggagtagaaggactggatggcgaacatgaagttcaccgagaatgactgaacggtgctgttgggtgaactgcggaaatgcataggtgttgggaagaatgcatggccattgagatcattcttgtcactagtcagctcaaggagtccttccggtgtgattttggtggtgccatcgatagtgaggtttttgccggtgaaaccatggtagatgaattggttttgaccggcacaaagggctataaggttgaagccaagcgacacaaggagcagaaagaagggaggatgctccatgtcacaggtatagaacttcagccttcaaggaagttggaagagcatatgtagcgtatattttgtagttcgaacaccggttaatcgtgcttacacggtagctaggtaagcatcttataaatattttgcacggtggatctcctgagaccacaaccacgctggactatataccctaaaccccaagtcaggtgtctagctaccccggttttccacaagcttccctttctgaaagtaacagttaggggattttttttttctacttcgcattacaatttagagatattctagtgtaaatttacctaaaaattgtggtatcttgctcgatacgtcctcaagtattgtaaaatcactcaataattattttcaagaacatgatattaatcttactttggaatgataccgtgctaaaaatctcgtaaagtacaacaggtgattgacaactgtaagtaaaaaggacgaacagttatgtacacacagcgttgtctgaaattttccaaattatttcgtccttaaatttattttttaaaattttatggtgaattaaaaaaattaaaattccataaaaatgttcttttatggaattttattttttgcataatgaaatactagtataactggtgtgtatatactacatcaactcgctattagatagttccccaacaaactcaagtgaactggagaaagtaaaacaacattttttgccatcatgtaattatccaaatagtaacaaactatatcggttacaacttaggaattaagaattattaaattattaggatgacaaacaaaatcgtgtcaaatcaatgttgagctttcatgtcattaattaatgacatttgatttttaaacaccacaactaaatagtcaaaaattgcaagaagtacccatcaaataaatttgattctatccatctgtagaattactttgtccgttttggtagtttggtctcctcttcagctgtttctcacttgtatattgctagattcgcatcctgctgagtcaacatgacttgggttgcggtagaaaaaaatgccagatggaatattaggacgcggctttaaatcaaccacatcatgtcttcgtcgctagtaaaattttctaatgcactagtcccgttcaatgtagaaaagtactagtctgaaaatgccatgtctggacagttggattacctgttgcctgatggcaatgcagtctagaattgtttcctcgcactccaacaagtcacaatgactagatgttacagcgttatattggtggcggttttgttttaccttttctagatcatatatagccttccaaactaaactataatgttataactttttatttgctataacaatatgaaacatttgatgttcatttcaaaaacagcgtcaatattattaaacacaaatattatctttgctatctttgtagtggttcatgcttacctttttaatacaaataatcacatttatagattatttgaactatttaattatcaaacatggattcaaaatttataagagtaaattgcactagcggtccttaaatatacaagcaggttttatctacgtccacgaacttgcaaagtgtgcattgaggtctctaaacttgatttattgtatcatcctgatccaaagcgttgtttaaccgtggtcttgcctacgtggcatgacatgtaaacgacaacatggcacattattattattattattattattattattattattattattattatttatttatttatttatttattttttctcccttcttcctctttcatttctctcttcttcggcctgttcgacgcgggggagctcgaggtggctttagtggaggaagaagataaaagaataggaggaaaaagaaaaggggaaaggaaaaaacaccatattatcgtccacgtggtgtgccacgtacgcaagaccacggtcaatagacgctttggatcggg

SEQ ID NO: 11948 - DNA, 769 bp, Oryza sativa
agtgaagaggcaactcaagcctcggagtcctgaaaagaagatacctattgacccgtgctatgaagaacttctttaagggaatgtccacaacaaacaaggaggcctcacagatatcggactatgaccgaacacttcagaaagcctatcacaagaagtccaaaccaatccctcagcttggagaacaacaaacaaggaggcctcacagatatcggactatgaccgaacacttcagaaagcctatcacaagaagtccaaaccaatccctcagcttggagaacaaccaaaccaagaggttgagccgttagtgaccagcaaagattttggcataacggaattcatttcaaacaccggtctaactgtggatcagctaattcgaggcgcaccaatcccgaaggcggaagtggcatacaagtttgaactcggtaaaccgcttgtcacgcctgagcagctgcagtccctaccaacgcagatgtacaaattccatgaagggtacatggaaatgagcgccaagggtagagagatgttcggagcgaggatcagaaaccccgacttcttgcaaggagaagatgttctctggatccatttcaaggatctctttgatctgtaccatctagacgccctcgacgtctctcttctgagcgcatgtattttgtgagtatctctgagttcgatttggttcggtcaataaataacttctggcatatatataaagcataataatttcctctcatcgctggagaatggagattaaaaggcccaacggggaggg

SEQ ID NO: 11949 - DNA, 3114 bp, Oryza sativa
tacaattgatgtgccaaattactgtaaatactaattttttatcggtacagtgatagattgaattattaaaaaatggtcaagctagctgtaagtggtatgggtccgttttatttcaatttctacttatggtatttacatgttcacatcataacaaataatacagccctatttcccttttcaatttctattgaaattatgttattgtatactctatttgtattacagttttttctaatctgtatatataattctttggttctctgggacaagtctgtaaaggtctgatcacacatacaacaaaggagaaactagaggaaataaattatggccagtcgtccaaacaaatttattttagacaaattgatcggtccggccatgctcaaaacttttgtaactttgagcttttctttttgaaaaaaaaataaagacagaagtcttcattgataaagaagagatacacgtcgaccttttaattcacataaaaaacaccatcatcaacaaccaagattccttcttgtgaggtaagaatgtaagatacggtaggcacacgtttagagccgctaatatttacatcagcattaattccttcacttttactctgtccacaaattctttacgtttatctcaaatccctgtacctgtagttgaattaagttttcttgatttggacttttgtggattccagcccgacaatgttgctgtgcgtcacagtcagtcgtgctctgcatcatggatcattcaactagaactatcacgaaggtgacagttcagttctgggaggaaaagtccattgtactccagtaaacatttaacactagaaattttgaaactatgctactgtcctctgaattgtgtctatttgtacaatactttctttccataaatttatttagattttcgattgacaaagtatctagctaggtttgaaagcacctgtgattaataccagttcaaaccttagatatgaaaaagacatgcaaatagccctgcaaattctatgaatatttcataaaatagtgtaattaacgttatctataataccacaaaattataacttaaattcctctagaaagaaataaggcagtaaggtaagctactttaaaaactgtcataggccctaatagaaattcatgggccttaattggaattcatgggcctaaaaggaacaggtttcctatgtggatcaacccattagaaataagtttacttagcatccctcaatttgtcgccgagtttgaaatttttccttaaaccgaaataccatgtatagtctacccctcaactcataataccgtgtcaactttggtcctcgacagtatagagatcggttttggctgatgtggtgagtaggtcccacgtaggccccacatatcaacgaccacttcttcttcctcctcttctcttcctagcacgcgacgcgccgctggggtgtgctctgcgaccgcaccttcacctccgacagatgcgtgctcgacatggtagccgcggcaattgggcgaggcgtcgccacaacatatgctgaaaaaaatttgctaatatacttatttttttaataatttatgtttatatacatgtatcggaaggattagcaaaaatatacccgtcccgcgggatggaaacgtgggaccacgatgatcccatagctccaaaacgtgagaccgacggtcccgcagttttggacggtcccgcggaatggaagagcacggtaccgcgacggtaggcagccatcaatttttaacgttgtgcagcactgtgacaccgtgtagcacttttttggaacgacggtaccgcaggttgaatgtgcggaactggtccataatcagcgtcaaaacagcgatgaacagtagcaaatagtcacagaatagggtcaaacagtgccgatgcagtatataaatcactggctgcctcgctcccgcgttctcaaccacgcgaccgtcgcggtcccgcatattggagctgcgggaccgtcgatgtcccgcgttttgaagttgcgggactatcgtggttccgtgtttccatcccacggaacaggtatacttttacaaatccgtctcatgcaggtatataaatgtaaatttttgaaaatataagtatatttgcaactttcttccaacatatgttattcaacgacgtcaccggcatgggcactagctggcgccgtgctctactcagtcgccggcctagtttcccaagcggacaccaatcgtactacaggaagtggcgcacgctcgacgccgatatacatgtctatgttctaaatacatcacaacacatagactgacatataataatcaatgttatgataatattttaaataatttcacatcatatttaaggcatcaaatatcacttgacgactatacaaagctaatttaaatctacatatataaaataaatgaaacaatgtgtttttctaagtagatctgatttaattttaatttgtttgagaatagattcttacctctctttttttgaattttcagaactatttcattagtatccgagaagtgggcaacataaatattacatagatgtgaaaaaaattatgaaaaatatttcaagctaatgatcttgctataatacaaccccttaatcgatcatgagatttctggccatatatgtatgttttttctttgccaaatagctttgacaataaataaacaatcaagtaacatatggaataaactactcattatatattttcttatagttgaggaattcaaacatggcagcaataatttgatggatgtatgtcatacaccctattgacgtgactacaagtatacttcaataaattagttactgtacatagatgcattctccaaattaataaggtgcctcatgattatgaacaataggttatggaaaaaaacagacacaaaattatagatatttgtcaaaatataatcaataatacggtgctctggagattattgtggtagtatttaaaagaagcactttatcttggttaaaaaatcaaatatagtataaatagatacgaacaaactccattattccattatcgtgacaaagtttttctcgcaaactcaaggctggtttcaaacgcaaagaagacattaataaaaacatgtttaaaatagagtcaagatctat

SEQ ID NO: 11950 - DNA, 1623 bp, Oryza sativa
tctaccaggctcaatgggcatgctttctatccaactccgctgcccttctgcaacttctccagtggcctgtgcaatccttttccacatcttttgtatttggtgtccaatctacctaccctagccaaggctttacattcttcatagcaccaagcaagaatttttcatccgcgttgccagtacaattcctgggactcctcaacagcgagaacaatggcgacatgaaaaaccaaatctttgcagtcgagtttgacagcataaaaaatattgagttccaagatatcaacaacaaccacgttgggtttgacatcaatagtctcatctctgtggactcataccctgctggtttctatgatgataaagatggtatcttcagtaatttgaccataactagtagtgaagcaatgcaagtttgggtggattacaatggagatatcgcacaaattagtgtcaccatggctcccatgggtatggcgaaaccattaaagccattaggatcagccaatcgtaacctctcatctgtacttagtgagatggcatatgttggcttttcatctgctgcaggcagggacaacactcggcattacattctcgggtggagttttggtctaaatagtgctgctccaagtattgatatcaccagtctgccgaagatgcctcattttgaacccaaggctagatcaaagatcctagaaatcattttaccaatagcaacggcagtgtccatcctttccgttggcaccatcattcttttacttgtacgaaggcacctaagatattcagaggtacgggaagattgggaagttgagtttgggccacatagattctcttttagggatttgtttcatgccacggaaggattcaaggacaagaatcttttaggcattggaggattcggaagagtatatagaggagtgcttccagcgtcaaaactagatatagcagtgaaaagagtgtcacatgattcaaagcagggcatgaaggaattcgttgcagaagttgtcagcataggccgcctccaacaccgtaacattgtgcatttacttggttattgtcgacgaaaaggtgaattatttttagtgtatgactacataccaaaaggaagccttgacaagtacttgtatggttaagaggacaagccgatccttacttgggctcaaaggttcctgatcatcaaaggaattacatctggattggtctatcttcatgaggagtgggagaaagttgtcattcatcgagatatcaaggcaagcaatgtgctccttgacgccgagatgaatgggagacttggtgactttggccttgcaaggttgtacgatcgtggtgtcgatgcacaaacaacccgtgtggtaggcaccataggatacatggctcctgaattggcatcaagcagcaaggcaacccctctcaccgatgtattttccttcggtatatttgttcttgaagtcacatgtgggaaaaggcccatcaaggaagatgtcaacggtaaccaaatcatgctggtggattgggtgctagagcattggcagaagggatcacttactgatacagtagacacgaagctccaaggtaactatgatgttgacgaggcaagcatggcactaaagctgggattgctgtgctccc

SEQ ID NO: 11951 - DNA, 6023 bp, Oryza sativa
  unsure (1)..(6023): unsure at all n locations
gacaaagtttttctcgcaaactcaaggctggtttcaaacgcaaagaagacattaataaaaacatgtttaaaatagagtcaagatctattttaaaaatatcatctacatgtaaacatttataataaaaattcaagcaacactatctagttcttttaaaagaccagagtggtggtgatgagtaccaccgtcatctaacatgtaggcccatgaaatcggtggaccccgcattccccacatgagcgttctgtttgctctctttagttttctagccgtttgaaatttgagcaagatgagaagcttcacgtttttatgaagtgcaccacttcatccaagtaaagataagatattttttcctgaccaagataactgataattatatttttatcttaaataaatcgttgcaatgcacgaatattttacttgtaaccagataaattggatcagggtttcggaaaggcaaagtaccacagcaaatcaatcataaggaggaaacaacgtcgtccatcataaacctggaaagagatccatgtgaacacgatcaagtgaccaacgacgggtgcagtataaccaaaataatcaacaattagggaagcaagcggaacgggtttgcaagcttcgaggcttgctaatcataggattacaaaccataaccacaaccacaaaacagaagtgcataacagagagtatctaaaaataatatgtgcataaaagagagcagcagtaatagacgcagccggctgcgagttcttttcacccccatttctcttcagaagaatggttctgacgagagtgaaatggttacaaagagaaatactacttgttcttgtagccagcaacctctgaatctggtcatttttaatgtaacaggcatcacctttgatgatacccctttttgcctaataaaatttggtcagcagcttacttcttgcctggcaaaaaatagcattaagcgatagtaactagtaagtaaaaggttgtattttattcccagaaattaattatgaaaaagtcatcaaccacccttttcaccttgcaagaatgagcagttccattagcttctttcagtcacggtcttcgaatcagaaagtgccatctccttcttttctgaacgttgaagacctgcccagtacctcaaaactattattagtctgaataagatgtctggtgcatattgccctttttattttggaaatgggaacagttccaggcattccagactgaccaacagactgccaagaaacgcaaggcatatggactaattttagtatcacccagaacatgttttagttatataagtcccagatgcctaggttaataatctgtattcatatgcagaaataaccaatggtaactcaatttagtttatcttaggaaactattcacatgaagcattactgacttcttgtggaagaatcgcgcaagtgtagacacataataaatctatctattttatactaaaagtccattaaacttcctatgaatactctgaagccgccacgtggcactcctacaaacactcctaagtcgccacatggtattatctaatctcaccgttgatttttacttaaatcgatggatccattagtttacaccattagattagatctattataaaaaaataataacctcatgtttataacatacaggcgctactaatgtccgtacgtatgaatttgtatgatacaaattctactgctgatctttccatacgtacaaacgtacacgatctttcctaatcttgctggaataaaaaaatatacacatggacataaaaaaagacagaaaaatcatactaccttcgtcccaaaataagtgcaaccgtggatatccgtacccaacgtttgaccgtccgtcttatttgaaaattttgtgaaaaatttaaaaatatttaattacacataaagtactattcatgttttatcatctattactgattaataaaaatactaatcataaaaacttttcaaataaaacgaacggtcaaacgttgaacgtgaatagtgcaaaactgcacttattttgggacggaaaaagtacatccataaaaatcagcggtctttaaaatatgattttagatcaaatatattacttcacaaatataaatatatttagttaaataaagatctataatatatatccaatcaatgttctttaaaccatattctaaatctatctaatatatagtaaaagtacattaaactttctacaaatgcttttacactgctatgtgactctcaaataaattagaaaaatcctagaaatctattatatactaaaagtctattaaacttcctgaacgctcctacgttatcacgtgacgctctaatttagagaaatcctagaaatttagagtaaaaaaaaatccaaccttcaattttcaacttaaattagtggcccattattttaaacattggattagagctctttaaattcccatgttgctaatctctatcccggaaaaaacataacgtgcttacgtcatacgatcgtctccctacccaaaaaaaacaaaacttaaatacctacaccatatacgatcgaaaaaaaagataaagccgaaaaagaaaaaagaaagcatgcacagtagaatcggaaagaaatactaatcaggaaaaaacatcggtgctggcacagatttgttgtcaacagcctttaatctacgattttaagatcttcctccccaatctgatattgtagtcctggtatagatagaaattcctttatggtctaattccgagcggtagtaaatactaatctgattttgagttttcgcttacaacgtttgaccactcgtcttattcaaaaaattttaaaattattatttattttatttgtgacttactttattatctacagtactttaagcacaacttttcgttttttatatttgcaaaaaaaattgaataagacgagtggtcaaacgttacaagcaaaaactcaaaatcccttatattgtgggacggagggagtaggacttagcaatatttgattgatcacaatttggtatattccatttattataaaggttgctaaggaactcattatagggatgcttccaatagaactggtttgtttttgcacatcgaaaccaaaaattaatcgcgcagagaagaataggtgagcaattcatacacagcatccctttcttttatcgaaggttctagcaattgatatcgggatttttaccgaaggttctagcaattgatatcgggatttttatttaaatctaagatccattcttatcacattagtagtatattgaaatctaccgtttattttacggtaaatatatttctttttttattgtaggataatctaaattcccttacagtatatatatagtgacgtatgattccttttagcattttttttaataacaaataagaagcccgtgcatctgtgcgaaattcctttctgatttatattccagaaatgtcctccagtttatattatgtcgttatagtgtttgaaacacaaactataatacatgctgacgcgaatgcgcaggctaccttcctcttcctagttaatacttagatctataaaatggagcgcaaatgagaaatcttactggtgaatttccatcgtttcacacggagagcatgataacgaatctgatgaatgtgtttaacatagacatgatcctctgcatgtgtcctctccatgaattcttttggcatatcccagaggcgtaaaatttgtagtgatgtcagatatttaaatcctactggcacagatatcatattctgcagcccacataataccaaaatgctcaagtttggcattgtgccagcttcaatatcaattgaacgtaactggtccatgtcagctaaacccaatttccctaagatttggaaaccagccagcctgaaaggtcatcaacaaaccatcataggctttctgaaggtaaagttctgctaggttcgacaaatgtgagattgcaggaagaggatcaacctgcaacctggaccaccctatgcttaggtatcttaatttactgaaattctgcaaatttgatgtagcacctgctccatgtaacttccctcgtaggtgcagccattccaaatctggaacatggcccaaatgttgtagatcaagtatttcatcctcaccatgtgagactatacccaacctaacaagatttggcatactttttatggagacacatagtttctccatatgatcctgcttcacgtcgcagatgccaagacatcgtagctgtgttaatctactaagnnnnnnnnnnnnnnnnnnnnnnnnnnnnnnnnnncctagcacttgtaaatccgtcagaagataaaattcagaacaaattcgagtggcctggaaccgaggaaagtgtctgtgtaagttgctaggatcacagtcaacatcgacagataggaaccgcaacttggttagaaactttatttcttctggcagctgttctacaaatgtctccctaagatccaaaagtttgtagcttcctcagcttcccaattgactgctggatctcttgaacttctgtatgacgtaaatcaagataatgcaaattgaacagataagttacagcatcaggaagcttcacaatttttgcataacgtaaggacaagacccttagcaatctgaaattcgaagttgccttttgtatccatgagaattgcacttcctcatcgaacaaaataaaggacctgatctttcttgaaccttggccagattccattgatttcccgcccttcactaaggaaactcgacgtgcttcatcactcagttttgtaacacacgtgttgtctgctaggagagaaaacttttcagttttgcattttgtcactgttatgtctctcacaagatcatgcatgcgaaatgactttggtctctcatactcttttgtccaagcaacttgaagaagtgaacgttgaacaagttctttgaggtagtcttcagccacttcttccaatgtaatatctcccctttcttcaataaaaccttcagctatccatagccgaattatctgttttcttctgatctcatggtcttcagggaacatgctacaataaaggaagcaattttttagatttgctggtagataatcgaagctgagattgagaatacttgttacatagttgagcttttggttcttggttagttgccagttaagttgaccatagaacaacttccactctgcctcatctatttgcttataggatagaagacttccaatggcaacaatagcaagaggcaatccttcacacttgctgacaattttttctgcccagtgcatcacaacttgaggacaaccattctggtctagcctgtgaaacgcttttcggcagaagagatcccatgcatccccccatggtaggtacttaggcttaaaagaacacccgttatttgcaattgatgctacatcttcatttctagttgtaatgacaattctacttccttttttatttttcacaaaagcacgatccaatagaatccaagcatcttgactccacatgtcatccaagaaaattaaatactttttgtcctgcaggtaatttcttagcctctctaccaagcttaccctatacataatgtcagtctgatcaggaatgttctcattcatatccagaaattgtttgagtattcttctaaacaaatcttcaaccttgtagttttgggagattgtaatccacgaaaagcaatcaaagttctttctaatctcattctttttatagatggcccgggcaagagttgtttttcctagcccacccattccacaaatggatatgactgtacgggtttcttcgccatgtatcaataatttcataactttttcggattcttctttattgccagccatatcatcttcagtatcaaaatacgctgaatcagatgtaagctcctttaggctctcatgacttgaagtgctaccatcttcactgtcatttgctgaaatgccataacgagccttcatgtttgtgaggttttgaaggcgagatttgatttgtgaaagttgtgttgcaataatgtgccaatcactggtagttttggagcaatgg

SEQ ID NO: 11952 - DNA, 693 bp, Oryza sativa
ctacccgtgcactgccacagggcgcaccacgtgacagcataccggacggggagggcgaagtggcaccaacgtggcgccacggtggcatccacattgggcggcaccggaaggccacgcgggcggcccggatagagactggggccgatccgacagcccagatcggccgcgcggcagggaagccgccagccggctgtctggcacaaccggcagcggcgcgcggcggcggcgactcggccggacgaccaccggcgacggcggcgcgtcacgagcaagcccgggaggcggccggtgaaggggttgaatgggggtgaggtaggggagggagtcctcaccgtgctcgtgtaacggcgagaaggcgacaggaaagcggcagcgggctcctcggggaggcacgacaacggcggtccagcggtgttccgcgagcgggaaacggcggccgacggtcggagggacctaagggagataatggagctattaggagagggaagggagttgcggcgcgatgagaaacgctggtcggagggggaggaaacgatggagcttacagacgtgcgaaggaaactgggttccggcgaggattggaggaggaggaggggtggccgggctgcggacgacggctgtggtgtcggggaaggagacgacggaatgcggggtcaactagggcggcgagaagcggcggtcggaggcggtaaa

SEQ ID NO: 11953 - DNA, 608 bp, Oryza sativa
acttcatataagatttgattgatgtttatgtaggcaacggcgagaagctggacttcgcggcgcgggcgcgcatcgcgctggcggtggcgcgcggcgtggcgttcatccaccgcggagggccaatctcatcgcacggcgacatcaagtcgtccaacgtcgtcgtcaccgcgacacgggacgccgcctacgtcaccgactacggcctggcccagctcgtcggcggcgcggcggcgccgccgactacgaagcggggcgcggggtaccgcgcgccggaggtggtcgacgcgcggcgcgtgtcgcagagcgccgacgtgtacagcttcggcgtgctgctgctcgagctgctcagcggccggccgccgctcgacgcgacgccggacggcggcgccgccgtcgacctgccgcggtggatgcggtcggtggtgcacgaggagtggacgtcggaggtgttcgacgccgccatcggcaacgaggcgcgcaccgagggggagatgatgcggctgctgcagctgggcatggagtgcaccgagcaccaccccgaccggcggccggccatggccgaggtggaggcgcggatcgagcccatcttcgaggacgcgtgccggaac

SEQ ID NO: 11954 - DNA, 700 bp, Oryza sativa
ctcggtaccctactttccataacattgagtgcattataatgagacatgctcaacaatgagttaagcgctattatgaaacatgtttatgcaaatacctttttttttctcgaaaacgagagaactgcatttcatttcatcaaggggaagaaaacaaaataaaaatatttacaaagtgtgcaaattacctttcaagcacacacttttgactaaggtgctaacaggtttgggctaatttgtgattgttaaagattgttaataattttacctaattaaacatccacatcagattgcataaaggatccgactaaaattgtagacagcaggatgaatgggaccagaattttgaaaaataaatcaagtactcagcatacctctaagatagtatttttgaattcggaacagacaacaattccatcaaaaactggaaggcaccgggtgtttcgataatcaaatccaaccatggctggggcaaaatcaattccaagtctctttgcgacctggaatattcttggtaacctcaggtgtacagtaccaggcggaagacatttctctgaccacacatcgacttgaccacgctcattcttggacatattttagcatttaatcagcatggaacaccacaaaataagcactgatagctacctaatgaaaatcaatagtcataatcaaggaggtctacctttggtacaataccatttac

SEQ ID NO: 11955 - DNA, 683 bp, Oryza sativa
tcgagctcggtaccctgtggactaaccgttgtctttgagctatatattttaagttaggttcacgtcatatgtgcgcatggatgattatcgatggattaaaattgacggcgcaaagtaaagggaaaaaagacggtaaaactagtgcttttgttttgaattaatcgaggtgtagggcgatcaaatttgctagtttatttttagtttcgacgtactattaagaggggtaatgatctagcaaagagatgattttaattgccacattaggtcattatgcatttagacttgtgctcacatttcacacaacacacactaacaccttgtattcactggttttcggcctgaccaagggcggtcagaccggccaccttgtggcggtctgaccggcggtccctggccggtctgaccggccccaagcgggcagtctgaccggcgcacaaggtcggtctgaccgacggcacttgtgcggtcagaccggccccctgaaggccgggatggtgttgctcggggtggccgatatagagccgacggagccgtattcggtcagaccaagttgagggcggtctgactggccaccccatgtcggtctgaccggccaggccgattgggccctctgacagggctacaacggctagttttctagccgttgcaaaatagcacgggctgaccggcctcatacctccggt

SEQ ID NO: 11956 - DNA, 1897 bp, Oryza sativa
ttaggccaatgcgtgataatggaactattataactcaggtgatcaaagtaaccaaagctggtcatataatgtggtaagatatgcttctgcccctttacaagatattgagatataccacgtttaggcggttaatgcatgacagtggaattataactcaagtggtcacagtaaaccaaagctggtcatataatgtggtaagatatgcttctgcccctttaggccttattcagtttgatggggattgaagaggatcggaggggattgagagggaataattccacatcacaataggtgtggaataaatcccctccattccccccacctagggatttaccgaacatgaccttacaaggtattgagtaaatatacctgttgctaaacttctcgatggcagtagatgcataaagaagtgtttcaccagccttctctaacgccatataaagttctcttcctcgggtaactttagcaatgacccatgcattatttttggctctgatgcatacttcaaaatccttgtcatgacaagagtcagacctcttggcccttgacttctccaaatctatttcttctcttagtctattcaaggaaagtagagaatcctgcatgatttcattgcagagcacggttaaaagaaatgcatggcaatccaattcaacacaaaaacgtaaaattgcaaccgaagaacaatagtgaggaagaaatgaacaggagatacgaattgatcatctaaaacatattagtctacaaaaacagaccaactttaacaatctttaggatctaaaatttatggagatattgaggtgaagagaagaacagaaccattaacacatattgtaggaaacatcgtatgttactctatatgcaagtatgcaacagaacaaacctttgagagggtggtgactttcccaggtggggaggctcttgatacttttctatctggatcaacaagtaagtagcgatatccaccaacatgataagcattttctcctccccatcctcgtgataatttcagctccagagtcacaatgttctgtgatgcctgcaatataaatataaaaaaatgagcatgtgttcacaaccacagtatcaatattttgcaagccacaccagacatgagaatatttcttattttcattcaacatggcctgcttgagctcagtaccgcatcaagaaatcatgaaaagggtggaaattatgcaagggccactcacattttcaagaagatgtctcttcacatgagcaatgccatcatctccatttattagagatgaagctggaatcagtagcagaatggttatgttcttgtgctgataaacacagagatgcatgcggtcttctgcctgctggaaccacagtatgggaacccaagccacagcaccacgaacttttgaagtagtggaaccagcggcaacaaaaccatcctttcctttgtatagtttctcacgctggagaggcctgaaataatgatgcatctgattttgtccgccaggagaagtatcacgagatcgactacgatacctttctactgaagctgttccatttgatgaactagaagtggggccagcatgaaccgaagttcctttccgcagataggaccaggaagttgcattggacaataaagcacgaggagttaacctcaagatagcataagtatataggtttagtgtatcatcctacaaagtggtaaaactacattaatcacatgggaactgctcaaagccatcaaagaaacaaagttataaaagaagtgatgattaaagggagaccccgtaccggtggaagtgttgtggacaccaagagatcttcaaataatacaagtgattggcacatgacatttccaagacatgacccaagaactgtggtgagtgactgcaaatattcatgcatcaatagttga

SEQ ID NO: 11957 - DNA, 801 bp, Oryza sativa
aatcaggatgaacctaggctttgtacaaaggcgctgccatctagttcttttgttgcaggccataatgagtataataacctttcacctgtcctgtcacaaaacaatactgaaggtagcatcaatacaactccaaaacaagtcaaagttcaaggctgcaggaaaagtttgtctaaaaaattgtcgaagtgcaaggcaaatcagagagatagctctgcatcactatcaaaagatagctcatccagcagccaatatccttccacctccagtaatgctgaagtaccaagacgaaaaggggatttggaatttgagttgcagctggaaatggctcttttagcatctgcagctaaaagtcaagacaacaagctagcaactcaattaaatcagtcaactgatagcttactaagttcaactccaccattgaagaagttacgaaaaagtgaagaagcctcaagcaactcgagcgtggtttggtcgaggaatagagcaccgttattttgggctgaggtattttgtggtggcgaggcatcgtctggaagatgggtccatgttgatgttgcaaatgatattattgatggtgaacaaaaagtagaagctgcttccgctgtttgcaggaagcctttgagatatgttgttgcctttgctggaaatggtgctaaagatgtgaccagaaggtttacctctttcataattcctaacttagtagctatatagaatcatgaggatatattctttgcttttggaaatttgtaaaagaactggtttgagaactgggttctatattttcctagggattgcctgcaa

SEQ ID NO: 11958 - DNA, 20994 bp, Oryza sativa
  unsure (1)..(20994): unsure at all n locations
tttttagtcccggttgtttataccaactgggagatctttagtcccggttgtttataccaaccgggagtaaaaataattggagtctgtcttgaaccccacgacttattgaaccgggattaaaaatgatctttagtcgcagttggtaacaccaaccaggactaaagaacaaaaagtacccctcaacttttaaaccgggactaaagatgtttttagtcccggtttttattagaaccgggactattgtagaatttggccgaccgaccaaaaatggtttctccaccagtgaataaccccttgagactattcataaaaagaatagtatatatgagccagctggaatgacagcttcatgacaaccagcaccgtaaaattaaggacttcctttcgaagaaataatgctatattaattcttactcatgtacatgcatacgataaaactgcaaagtattttctcctccctctacacagcagcaagtgtggtttgagcaatttttttgtatttaaatatttttcatccttttagaatgcacaatatgatgtgcatctctgtttacatgagcttgtttcttagtagtcgactactctggctatatatgcttctgccttgcgcccatcgttttttcatttttaaaacagcctaaccccgattaacaagaaataccacactaattaattggtagcttaattttcttttctttttttgaactaatatacttgtcttgatttctatatatatcagcctatagatagctcgagtttgatcgaatgtttgatcaatttgtcctagctagtctatgattgaacttggactcggtccatctgggtccaaacgaaatgtttaatatgtgaaataattgacggatcaaacaactaaaaagtccttgcttgagcgtgagcacgatatgttgggtcaaacaagtaattaagaaactagttatgagatgggattaattaggatataaataggttggcctagctagtcaagtgtacataatttcaactgaataatactacctccgttttttaatagatgacaccattgactttttctcacatgtttgacccttcgtcttattcaaaaaatttatgtaattataatttattttgttatgagttgttttatcattcatagtactttaaatgtgatttatatcttacacatttgcataaaatttttgaataagacgaatggtcaaacatgtaagaaaaagtcaacggcgtcatttattaaaaaacggagggagtattacaagtggagcctatgatggaattagtcgtgccacatgcccggatatccatgcatctcttcaacatgtatagacgactggctatataaaaccatctctatacctttaactaattatcactaaagggttcaaaattaactacctaccattaatttatgtccacaattaattaatatcctctttaaaaatggacgtagtagtaaactagtaattaataatatttgctagtaattcatatacagtatgtacaaagagggtaacatgtgatcatcaactgctataattttattcatatcatatctatcaccaatgaagatcatatgcatagatacgtacacctcctcgatcacgcaactagatcgagaacaacacagacaacagtacggatctgtgagatcctaccgataatatatacagtatatatgtctccttgttgcaagctcatatcgaggcatgggcgtgtactttctagctaacaattcatcagtctaattaattaagttttgcatagaatcaaaactactagttgcacttcttcctagaaaaaaacatgtgcataatctaattataataagctgttagtatagtatatacgtacaccgactcactaagtcagtatgattattttatcggagaatgcattcattccccgatgtggtcgataacgctgttataccgtatgagctactccgattaatatcgtttgtacgtaaatatatgtataaccctttttaaagatattctgtgaaatataaaaacatcgcatgattaaactgccataagctttgtatcggcttgcgttccacttcgacggacgacagtacaaatttcctcgaacatttttttctttatagataatagacaagtttctcattaatatctcataatctttttaagaactctcttgatggttgtagtggtgtgcacatatactatatggttgtgaagtcacctgcccaagtttgagtatcatcttctttaattaaggtattaggggccggggataatccttttcatcatttttttaactactccatccgtcccaaaatataagcatttttgtctatgaatctggacacacagtgtgtccagattcataaccaaaaatgcttatattttgagacagaggtactaattaagctagctattggtgccaagcgcttatataccggcctgcgttcgagtccgcttggatgacacaatttttcaaatttttttatattgatagataagtttctctttaatatcttataagttttctaagagctctcgatgcggttatagtggtgggcatatatggtttgtgaagtcacccgcccaagttcgagtctcaccttctttaattaacacatatgcgggaaaagggaatccctcccaccattttttaaggattaattaattataaattgttgcttactcctccatcccttagtagcgtcatatatagccgatgctctataatattatttgtcggattactcccgtataatgcttcgcctcgtctagtatgtagtaaataatagctactaatctcttttctttatctgaaaaaatggaaaacattcaaacaactgcatatgcgcacgtggcatataaaacaccaccaatacccccaactattccttcaatcctttaacaaataattaacatgagtactaaataatactagcacacacggttttgtctaaggtcatacagtaatacatcttattcgtaagaaaaataagcgaagagtacgaaagaagtattactacattaattatatattatgaagaaagtaagtgattcatgacgtattacttgtacataattaaaaatatatatagctggctggccggtatgtttcttttgtagtcgtcgaaatatgttccacaagttctgattaccatttaattagcaaagtacgtacgtacatgcagtttcaatcgacgctatacgtatacgaaagctgctaagctagctgggtcaaaccatatacacgtacgcccgtacgtaggcagagctagctcaattgttcaatggtcgccggctaattattgaactagctagcattcgcttgtagcaactgaaaagcatgaaataatagcagattaatatcgagtggggcatataaataaatataagtatatccatacgtgtactcttcccgggctgcaagctgcaacctccagaaatgatagataggcacagctcatgttgatcttttacccccttcaattcgtctgactataggcaactatctggcttttatatatataatataaaatgacgtcgtccacgaatgatcgatatatcttgatgtaatacgaatatagtatatgagatcgacgtgtacatacattgatttaattaatcgtagatattacatcaacatgcaaatcttttacgtgttcctaaaaactaatcaattgcatatatgactatatatacagtataatgatatcgatatgtacatatatacatcgatttaattgcagatattatatctagtataatataatggacatatttataagcacataaatttccttattaatatccatcgcgatcgcttttcttgaactagtacttatgtacccgcctacattttcgagaattcgaagttagctgaaagagaaacgtaaccatataatactacacatgcgtacggtgataggttataatttctgaatgtacgtatgtaatttattacttagctacagttcgacacacaagtaagtctcgaagaagaaatataattaaacatacgcacgtacttactcccaattaatctccaatgatatactactccatatgcatatatatcacgcagatgcaaaaataactataattaattaattagctagcctccctgccctcccatatattttgtgtggcttaaaaaaaaaagccaaacttttttgtagacaaaacgtacaggatcttgcatggtgcatctgtccccggccggccgggcaggcgggccaaagctacagatatatcacaagagaatctccaaccaagaaatccacatagcaaaaaggagggaagcacgcactcacgctcacatgcaacaaagaaagaaagagaaagagagacaaacaaagacgagatcacagggggaaaaggcatcaagagctggtgaaacatatatacgtactcctttttatcgattcagtacaaaaatatactaatgttttaatagaaaatacacatattattaaaatatatttaaagttaaatttaataaaattaatttggtattataaactttgctattttttataattttaatcagaataaaaataaaaaaaaatcaaacaacttataaaatgagtaccaagctagctatccaagtcggatccttgtcgccatccacaagtagtagtagatcgcctgaccgacagcttggtaacggggcccgcatgtgtatgtagactaccatcaactctctggcaccacaacgtacagatcaggacgtacgtacgactcatgttattggtacatgcacacagtaaatagtttatatttaggctgtgtttaattcaacgcaaagtttggattntgattgaaaataaagatgatgtgactgaaaaggtgtgtgtatgacaggttgatgtgatggaaaatgactaaagtttgcatataaactttagatctaatcacagccttagtgacattaaaatctttgccacgtgtataaatctcaaagcgaatctgatatagtagggtgtagaaaacaagcggataaggaaggaagatttacttgccgtcaaatataattaagaaaaaaacgtgagcacttcggagagtcgaacgcgggtcggtagggtgaaaccacgtgcctttgcataccttagtttgagtaacaaacgtggttaatcgagtcaatcatcttgtttgaaggtgcaaatcacataaaacttgtgtgttgtgttggagcgtttttgctatatgttacgtacacgcttcttattttttttcacaaatatgaaaacacgatccataaatatgtcaatggtgcaatacaaatactatatgcaggaaatcaaaaatacaaactgcaaagttttgaacagggaaacaaattaaagtgagtggcagtggtcaatcatggaatagaggcccatttggggatggtgttaaagtgaaccacaaaattttgatggtctacaattgaacatgccgatagtaggtggtagacaattaatatagatttatccaaattgatacgcacccattatttaatccttttcttccatgccggccgtaagaaccttccatttagatatatgttcattttcattcttataaaccagaaagttctaaatagcaattatattgagattttttacaacctgtgattcccagatgtgatgaataattaatattggtttggctatacgtacatatgtgtatttcccctttttgtggaccacattgcttattgttgtcattgaagttttgacatatctcctttgaagttagaatatgcgagaaaaatacaaattttatctttaaccattgcagccaaattcatacaatatgcaatttcatgtatggtgttgatctttaatttgtccatgtcatatcaaggttattgtccatatgaaatatatatgtgcattgtagcactttaagagcaacgtgcgcacacatattttgtgctcttccttaattaatgcttctcagcatgaaattatatatgttactacatcattatctaggaaattgttccatttgcttcctaattagagtaagttagttttattataccctcatccttagtttcgattatgtgaaaacacaacattgagctaattaatctctctatactagaaacgtattactagtacaaagttaattcgttattatatcggtttgaatttctagtaaagttgactatagggtaaaaccccaggatgacaccgtgtgcttatatttcccgcattctatatttgcaggtcttgccactcaccgaagctcaattactttacgttattcatatacgcgagataaagtagatgttgatttgttgccaagatgagcagtgacggatctagaaaataattttcttgagccaagtaaattggctaaattattagattaataagtattattttatcaaaaatagaaaatggatgttggagaatagtgtgtgtagctttggccttaggctgatggcatcaagcgttggtgtgagtacgtgaatctttgacttgaattgcttacatggccaatgtagcctctactaaaataggcaaattaagggcctatttggtacaacttcaactcctagatttagcttcagaagttaggtatggagtggagttgtggagctacctaaacccagttctataggcatttaatggtaatccattggctaatacgttcggtggagctcatgcatttgcccatggtggttggccctttgctccgccattggcactagcacagatcctcagacctcatagcgtgttgtaacaggctatccgtgacgggtgaaagcgaaccgttacaaatgataatcttgagtcgtcataaatagacatgtccatgatagtaggggaaagtgatgaggtcgacgcactactacaaaacatcaaatagatgtcgccactataggtgccggtggtgctaaaaccggcacctataggacttttcccaccttcacgggttgaaatcataaaaaaccggtacctttaagtaatcataggtgtcggttctaaatattttttaaaaatggcatctttaatatattataggtgtcggtttttatagaaaaccggcacctatgtaaatcgagccgagccggcgtcgaatgagccgaccggtgcgccccaccacgacgagacgagcatcggataaggtttgatcacctcgctccctcttctctctctctcccttctctcttgtctcactctcttctctctcccctgcgctgccggcggctggctggtggaggtggcagtggcgaccgcgccctcccctccgccagatccggtaggaggggaggcggcggcggcaagtggcttggctcacgggcggcagcagcggcgacctcccctccgccagatccgacgggaggggaggtagtggcggagccctcccctccgccagatctagcggggagtaggcagcggcaacgacggcggcgggctccccacgggcgtcgatgagtacccccaaccgtgtccttcgcttgcagctgcctgattcaaatgtttgattcagtgattcaatgatgtttgatgtgagatgaatgttgccaatttttttttgtgaaatgaatgctgcctgattcaaatgtttgattcagtgatttattttgtgagatgaatgttgccaaaaaaaaattttcttacggatgtgggaggagggactgctcggctcgatgcgtcggcttgatcgagccgatgcatggagccggttttttttattcgtcgaacctaaaaggtgccggttaattctaaggaaccagcacctttttgattttcaatcagtgccacctcccttgtgccggttggaaaaaccggcaccaaagggggtttcccaaccagcacagaaacccttttctcccttttctgtagaagtgtacggtgaaattggtggtgcttctttaattaatggacaagctagacattgaaatgctgcctagaaaggttgaatcatgaggtcatcagcgaaacaacggagtgtttctgtacaagcatataatagtaagcgttttgtattggtcggcatatatcatgatcattaaaatttgtcaacagaattcaatattgtggtccatcgctaaccgacaaatgcatgcagtgcaatgactttaatgtgtgacatagtactagtagtgtttatttccatctcctgtaggagtaaaataaacaaacttttaaaagatactactcacaatattagagtaagttcaatagtataatagtatagctcactactagctccaatttatctatagccgatctaatagccaattcatacaatagttgtttactatactattaacatatggtcccacctatcatacacacattacgtcttggagtccgtactgcagctggctataaatctatagtctgctgctcttctctctcatcttttacctcattaaaatatgtttatagctggctaatagcccgctattgtacctgctcttaacgcactagacactaactattattagaaataaccccaaaatatcaacatatatatgtgcgtgtgtgacgtggaatcataaatgtactccattactttaaaataatatatagatatggaactgtattagtcggttcaagtcagtgctagcaatttacatggaactttactttctttttctcattgaaacaagaaaccaaacaacacgagatttcagtatagtcgacatgcatatgactctagacacgctcacactttttttaaagaaaaaaataacaccaagttcgtctctagcggtccactttttttccctcatccaacgtaaaaaagaactaagtaacacaccaaaattttccctcatccaacgtaaaaaagaaccaagtaacacaccaaaatacaacaattagatgtgatttccatgcaatcgtataaacacatatattaattgttcctctatcatccaaagaaaaagttatacactggtattacgccccccctcttcattatcattttgttatattaggagatgtctcactgttgttgcatggacatagtgaaaccgacttaggggtagggggacgatgacttaggcgtatgttcatgcgtgtaaaggagaggaagagacactcaccatacctgccatgtgcactcaccaattcgaacccatccccaccaccgtcacgtgatgccaccatgcatcctcctgaccaactgcacccatcacgccatgtcaccccgtcccacctatattaaaaaaaggtttcccacaaaaggcggtagcgtgccttctcctttcccactagtctgtctagcaaacggtgactcacaagactgggtgggatgactagtacctaagtcaactgcccaacaaaaggtcagacgggcttagctggtcaaccaactttgttggctcgtatgcattatgtgggggtactcatgcctcagtaatgttgtgtcacatggattactcttttagtttgcaagaaaactcgtcggctttagaatattggatctgtaacaagtaactattattgtgatccattaataaagatatgatgaagtcagttagtccaatatgcatagcatgtttttgcccattatggtgtattttagtgttgaaagtacctcatgataccatcattggtagtatgtgacacatttgatatttccggtagcttttaatttccatcccccactatggaagtaaaaataagccatattccaaaaaatactaacatatttaattaaattttgatattacccacatgaattctaagcatgcacgtccttgcaaattcgatctatatattatatagaaaaagtgtgtgttacattttttaaaatattgtgaaatatcaatagtatagtgaatccatccttctaaatagattcataggaactaacacaaaagttgttgtatcactattgttctatgcatgccaacaaacattcatcaaggaataacgtattcatatgctgcagaatttaccacaaagttacctaattttagcggtagaaatagtactaactattattagaaaatactcaaaaatatcaacagatcggtgacatggagtcataaatatactccattactctacaataggtgaaactgtcaatactcaagtaagtgctatcaatttacatgtaactttacggttgtcttctcgctaaaacaagaaatgaatagcatgagatgtgcttgctggcgtggtggcaggagcgtgtggtttcagcctagtcaacacacgtacaactccagacatgtccacagtttagtataatctatttaacgtcaagtttctctcctgtggtccaactttttttggggttcgacgaaagagacgaaccaaacaacacacaccaaaatacaaacaaaaagatgtgattacttcacgtaattgtacaagtatattgtctctctatcacccgaagaaattaaaaagtgtatgtttcataaaaaaaaaaagaaaagggatataccgatatcactcactcatctttttgttgtattactataggtgacgtatcgctgttgttgagtggacgtagtgaaaccgactgagtagggggatgcggatgcaagcgtaagttcgtgcgtgagaagggataagagattcatctgttatgtgtgctgaccagttcaaaccacaccacatatgcagccatgggatgccaccatgaatcctcccaactgatggcgccgatcacgccacgtcactctgtcttgtctttataaaaaaaattccccaaaaaggtctaggctagtgcgtaaccttctcccaccggctgtccagcaaatagtgactcacgagcctgggtggggtgactagtacctgtaagttcaagtgccttaatttggttttggtgattaatgacaaatctaattatatgagactaacgtttttatgagcctttctttgactagtctcatttggatatgaaaataaaaatgatgagaggtatgtattaaatttcacatattctaacttggtctctcttgtggatccaaaatatagtgtgagctccctcattgatcttgattgattatgtgcatatgtgttcctttatatccatatgtatgtacacttgagggggagcttattctatattttgtttattataagatttctatcttgatttgaaatcatctttcatctcatctctctatattgtttatatcgggttattatccatcaccaaagagagaaaagattgaaagatcttggattaaacaatttgtgtaattgttactttggtgatagatggtaaaccgatgtttatgggattaacctctcttttgcataagttgtctactaggttttttcccgataatgagatgtggaagacttgcattcttttgtgatggaccttaatcatgacaaggatgaaatgcatggagataaaatgatatgtaccacttcttatctcctactttttgataggtttatatatatgatttccatgttattgatatataagtgtgagactaatgtttacttgagtcttatcttatttagtctcatttacattgagaacatggagatcatgaaggtatatgttttatattggtctacatcattactacatatgccttctctatgtgtataggataaacccccattggtcattctctaattatgcatacacttacatctcttgtatatttatttgtatgcatatatttagggggagcaaatcctatacatttattgtgcatgttccagatccatgttgttcacctattatttatatcggatctttgcacttgagtttgcatacgagtatatgacacttgtgatgttaatgaaaactcaacaaacatatccatatctttcatatgcaaccggttggtcatcaagtgaaggatgacaaccgatttgttgagactattgttctcctttgagatgtgaaaaggaataggtcccactatgatgaggctaatggatgacaccatgggttaatggtcaccaagccaaggacatcgccatgttggcaagaatgaaatcaagcttgtgatgagaagaaagtcttgacaaatgatggtaaataccttggtataaacatggttgaatcaaattgtcacaagtgttgatctcgactcaagcttgaccccaagttggatgcgcaaggcaaaggtataatggagctaagaatgttttcttagtcttttcccggtcttgatgtttggtgtagaccggattagctagataggcgtcgtactatcaagaggggtctatgaagcgagcttgtggatgatcttgcgccatattagttcatatgcatgtaggtgtattttgtgggcttgtctagccaagtgtggtgagttttctcaagtcctaaacaaagagagatgtgggcaaatcctataggtttgggtagcctcatgtggttatgtccggtggagtattctttggagtgtgagccctttctcccagagaaaagttgtgtttcttggatagattgttcatgggttggatagccctttgaataagctttccatagagtctaagaacgccaaattccgagacccgagtcaagagatatcgccgttttactaacggtcggttgagctgaaaagtgacttgcggtctgatcgtgggccttaggccagtctgaccgggcctgttagccagtctgaccagcgtggtaaggccggtctgaccggccccactggtctgttgcactggtctggtttttggtggcgatacagagccgccagagccgcaaccggtcagaccgagccgtggacggtctgaccggccactacactgcggtcagaccgaccaggttgagtgggctcaatgattgccctgtaacggctagttttctagccgttacaaagtagtccggtctgaccggcctcacaacggcggtctgaccggcaaagcacagagttagggatttcggttcgaacggctagttttggtggttgggggtatatatacccactccccagcagcaagggtaaggttttggcactccattgcattatcttgaacccttgcaagagctctcatacccttgtgcacttagtttatctagtgaggtgttagagagtgagttaagccaatccaagtgcattgcttcattgttatagctagtgtggcacttgatcatcctcggcaagcatcctagacttgttactcttggaggttgccgcctcctagacggcttgtgtaggtgttgcctggtgacctctccgaggagattgtggaggaggcccggcgccgtttgtgagtggtttagagttcaccaccttcagagtgaaggaagaactaccccaagtgatcgaggcttgggtagtcctctccgtgggccggctcccgccttgcccaccccttgacgaagggggcgtgcggtggcttcgtggttgagcggtggagttgggctcgcctcaacggggattaggaaatcggcgagtttccgaacctcggtgaaaaattccttgtctcttgtctcttgtctcatttatttgttgcatttacatttgtgctatttacattcatagagacatatttgagcccatatcacctaggtttgcaaaacttaacttagttgcttagttaaccttgcaccttaccttgcctagcaacttaggttagttttgtttaagtgccattaagttttaaaaccgcctatttaccctcctctagtcggcccccttgatcttacagtacctgagttagtggcccaacaacaacaaaaggacaaaggggcctgcctagttagctagctctgcagactcctacgcattatgtaggggttattcatgtctcactaatttcgtgccacgcgtcaagtactcttttgatttgcaagaatactcactggctttagaatactagatttataacaagtaactattattgtactcctgtttttaaagatttggtgaaacttaattagtccaatatgcatggcatgtttttgtctattatggtgtatttttgtgtttaaagtgattcatgataccatcattgttaatgtgtggcacattttcggtagcttttttccatcccccgttatggaagtaaaaataataaaaaaaaaaccaacatactttattaactcctgatatcactcacagaaaaagcatgcttgtatctcctcgaaaattcaatatatatataaaagtgtgttacattttttaatatattgtaaaatatcgaattgctctcttaaataacaatagtagtgactagtgaatccatccaacttatattcataggaaataacatgaagttgttgtatcactatttcttttatacacgccaatacaaacatttatcaaggaacaatatattcatgtgctgcagaactttatcacataagttacctaattttagctaaagaaatagcgctaaccattattataaaattaccaaaaaaaacatatctataacgcggagtcataaatgtactctattattctagaacatgtgaaacagtcggtatccaagacagtgctaccgatttacatggaactttacattcttcttcttgttaaaacatgtggcaaatagcacgagatgtgtgcataagcctgccaatggatcaaaacccgcaccattcccagtccaaaccatgacaaccagttaaagtagcctaaaccaatccagtccacaaatcaacttttagaacccaaaccaatccaacccattttctacctcagtccaaaccaaaccaatccattcccctcatatggattcaatccacctttccaaaccactcaaacccatttcaatccattgaccaccaacaaggatgctgacctcgacgaaccaatcgtcttcctcgcgcggcgtaggctaatccatggcgccacaattacctccaagcagaactccatggcgccatcgtcaccgacggcaacagcaacctgccgacgcagaagaggcggagcagaaggcagctgcggtggctgggccgtcggtgcggcagtgaccgctggtcgcgccgctcgtacaggagctccgcctccttccacgcccccccgtgcacacgccatcgccctcacctcgccatcacatgtgcttgccctagattgcgcgtcttgccggtgagccacggcagcgaggaaagcatcggcaagcacggcacgggcgatggacgggaacgtctcgccggcgagccacggcagcgaggaaagcatcggcaagcacagcggcggtgcatcgagcgatttgtggatgtggtgttgacttggctgtcgagaagaagaggaattggggattgacgatgcacggcaaccattttgggttgtgcccattctgccatccaatagaaatccatggattgaacccatttccagtctagaaaaacggtgaccaaatccaaaccacaccaacccacattttcttccacccaaaccgccccagcccatttatatcttcagcccattacaaaccatccaaacacaatccaagaggaaatccaatccaataaacccattcccacccaatccactggcaggcttaggtgtgcatgtaggagcagtcacaacgcatggtttcagccaagcatacacgcttattactccagacgcgtttacactttagtttaagctatttaatgccaagtttctctgcagtggtccatcttttcttttctccggtccgccgagaaaaagaaccaaacaccacaacaacaacaacaaaaaacaacaaaaagacgtgattacttcacgcaatcgtgcaggcatttcgtctcctcgtcgtccaaaggaaaaaggtacacgctgatatcatccctaatatctctttttgttgtgttatcataggaggaaggagacgtctcgcttgtcgttgtgtggacgtagcgaaaccgacttgggacttagggaggagggtagtacactgtatgttcatgcgtgtgaagatcgacacacgcacacactcgtacacacctgccgtgtgtgcccacctcctcccttgaccgacagcgtggatctcgccatgtcaccctccgtccctgcctcgactaaaaaatactcctcccgttccaaaatataagccacaaccaccattaacacatagaccaagaaacaattattatcatcttcttgtttggatcaccctaataaatataatgcatgcatccaataaaattagaaatcttgagtgtgtaggatttaaaaaataaaaatataatggagaagaggttctaattaattgtatacatgcattcatatattatattatagaacatttagaaaaagtagctacgtggacggacgtaggaaaaaagtcgcccctcagtttagccgctgtccgtcactaacacgtcgctgtcagcaggactaaatgggggtgtggaggtgggcccatgccccccggcacgacaccgaggcgagcggggcggttaaaaaaataaaaggcgattagaagagcgggaagtgggtaagataattctatcctggcgataagaatatcttaattaccttctaaatcggtgtgccctttaaatactacccaccactaggcttctctccccttctacttctctctgccccccctctctctcctccccctcaatcgcggcgcgggtagattcgcggcggccggagcggagcggagcgcatccatggcggtcgtcgccggtttctccatcaggttggtggaggcgactgcttgcctagctccctcggctggtttggttttgttgtgtttttctgatttggtggggggattttttgtgtgaagggagtacacggcgagcatgaggggagcggcgggggcggaggggaggaggctgtacggcctcggcgctggggatctgccgccgatggaggcgaggaggttccggtggtgggcggacgagctggccgcggcgccgccccttcctccccggtcgccgtccccgtccccgtccccgccgccgccgccgccgacgaagccgtcgaggaggacgctggggaaggcgagggcgccgaagaagcggtccatatcggatctgttcgcggcggcgcctcccctcgcgcttccctcctccgattcgggcggcggcgggaacgacgatgacgacgacgacgaggcgctctgcgcgatcatgcggcgagctagggagaagaagcggaagcggaggctgcaggaggaggcggcgggggctgcttctgctccggtggcggcggcggcggcggcggcggagacgcgtgattccgagggaaacttcaccagaaaggtgcgtggtccagcccaagcccagcccagcccaacccctccctttcctggcaatgccatgatgattatcgcctgtcacttgtggtctcgttccagtagcatgttcccccgctgattattccagtaggttcctgacgcgcgcgtacgcgccgcgagcggaagtcgcgcgcacctgccgacgcgtacgctgcgcccccgtcgctttaaccatatgaatagcactagtgatgacgcgattagtgattagtgctaattataattagtacctacaagaacttttatttatgacatctgtctcgtgccaagtccattcatcactacatatattatcaaccatttctaactggtcttcaatcttcaataacatatatataggtgattatatttggcttgcgctcgggtacacgatgattgctttgcttggttgcgggtacaacaccatgatttgttggtcgaggctagctagctgtacgggttatatctgtgcgccaagagtgataaactaaagctggcttgatcattgtgcttttctttcttggtacgcataattacattgctggctggttggctagctagtcaatagtcatgcatatatatgcgtgagtgactgtttgggattcgtcggtattgttatttcatgctgtattttttgacggtaaatggatggaccggttgttccggagtcgtgcctagtgctgcgcgcgtgcgggacatcgacctagtattgttcccgtaggattcgtgcatgcatggcgctgatgatgagagatagtttaattaattaattgctgggataagcatttatgcagtgagtgaaaaatagaatattgagcagttaataatgcatggccagccggctaattatatactaattaattaccactagtaggcagtaaataactgtactggaagcagactagctgctggtactatatgttgcattttgatctgtcgcgttgccttttcgcgcatcgatcaaaccggtagtggtagtaacactggttgcctgcggcaggtagctaagtttgctactgtgtgaattgtgagttgcatactttgtgtgtgtccagccgggcacatatttccgggtccggccggacggacccattacaagagagaggacgtggagcaggcaattatactagatcgagattttctgcgttattctctttggttcttcatcatggcctgcatgtgtggtgtttcatttgatagttttttccttttggtctaggaaaaataaattttgcccaattgtgtgtgtatgtaggctgtgtttagatccaaagtttgcatccaaacatccaacttttcccatcacatcaacctgtcatacacacacaaactttcaatcacatcgttccaattttcaaccaaacttccaacttcaccttgaactaaacacagccgtagtgtgtgtggtatgtgtgcagattgctggtcagtaaaatgtgtctagtccacgtagtacacaccgtcaaaggatatgctttggttgtggtggtagttatcgctgtcagcctgtcaccgtatgctcgatatgatggtctacactgttcgtacgtgctctgtgttggggagggccagggagcattaattccgattattagctagttgaccagacaaaagggatagtagtagtgtaaggattttaagtttattccctgtgtgggtattattttaagtagagtatataatgatcaaaatatagttgggcacctgttccatttgttatgtttttttacttgcaagtacacatgtaagacatgcaagagagtctcattgtgtgctaaatcccttgaagattaattccacaactaattcatggaatcttactatgaaattcatatatccccacaagtgtttttttttggcattcatcagataattatcttactttgacaaaagtgtgatcttaattaagagtttgacttatattgtttgttttaaattagctattgccttttcgaagttctatggatatgcatccgacacatttctgttctataatttacacaatctaatttccgttctgtagtttacacaatctaatttttcctttgtgtcattttcacaacctggctatttatatgcatgtggtaatctgactgttttatattattgtgtttaccttttatttgtattccacattatccactgatgttgctcaattatgcaggaagcacatgacaagacaaatttgcctggtggattggatactcctcaagcgtcaaggagacctgatggtgtacaccatgcaagaacagacgaggaaaggtctccagactcaaagagaaggaagaaggtaaagatcactaacttagataagaacaacaacaagaagattgataagaaaaggtacagcgagagtaaaagggctaccaataaggtggggaaacagcatgacctgaagaaaatgctccctttgcatagtattctgaagaaatacacaaagcacacatccgtcaaaatggtcaaggagaaacatggcgacccaaaaggcacagaagtcattgaagtctgccgcaaatcagtgaagcgtgtaaaattctcagaagttaatgatgtgcttggtattaacaagcaaaatatctgcaagctgttctcggatgctttggcgtcatcgtcgtcatcatccacggacatgtccagtgaaggggacaagcacatagctgcagaaagctgtagttctcatatgccggagacagcaactaaagaagcaagcaagagtacagatcatgaggattctcttgagctcaccagcacacagttgtcctccaatttgtttgatctgaatgaggcactgccagaatctactgatttgaactacccatatgtgtcaaatccagaggagccaaatcatgagcctagacagcatgagcctttagactctgatgtgcaagttattgacgaaggaggacaaaaccagcaggatctgtctttggattcacatggacttcaatgtcagtccgttcctgagtctgggttagaaagagctagaagttcaatatcgccaggcacatttttgcacggtgagttcatggaagtgtctgacacattttttgttggttcttcacggaagttgacagaacttgctgagtctcatggtgattgtagtagtggttcggttaaagatgctatgacaaaggggaagtcaccttgtgcattgcccaatcatacagttcaggactcatttcagcagcaccagaggtattatgccttcaatctgaatcttggaggcagtcagccctccaatgaaggggaagttcctccccaagactgtaatgcatctgccggagcggcttcaagttctcatgctgaaatgggtgtgcagcaggggtgtaggcctgctccaggacaaactgtgcgtctaatgggcaaagatcttgcagtatctacaaccagaggagagtatgtgtctgggacacattcctatactgaagaccatcccacaaagttgttcttggaattgccgcgacaaggacggccttatctctctttacaagctcaaagtgtgcccaatgtttcagcaaattctgcaagcccaagtcaatcacatatcaggtacactgccccacagaatttgagccactcattccccatggccaatgcattatctggagatcgattgcaatacgacgatcggttcagctacttgtcaggctcacagcaccatggaaatgttctgctggggagtccatcacttacaagtcatggcagtgcagcgctccgtcagaatttgccgtatgtttggagccgttactctgatccttcttcatccagtactgcatcaccctcagcaccaattttgcctacgacggcacagcatgtgacaccatcttcagtttatcatgctaatttgcctcggtcatatggtgtggtctcagctggatcgtcggttcacccccacaactctc

SEQ ID NO: 11959 - DNA, 2821 bp, Oryza sativa
ggccaacaacttttcaaacggccatccgggcctagctgatcccatcgactgcagatttttcaaacaccgaacccccttttcacacagcaatttcacaagcagtagtcaaaccaaactacgctaggaatcacctcacatccgcccatgaccgtgggcacggctgttcgaacagtttgttaacctctgcagagggggtacactttacccacacgacattactaacccggatcacccagcccgtggggatcagccacgtcgggagacctccaagctttcatgacaaggcatttccaaagccgacacaggtttaccatatgccgacgagaggggttccagaccaacaacaggttatgtcccagaccatactgtgccaggaagcccaggggtcctccccgacaccaccccggcgaatccacatgtctctcggcatcaaggctcccctgataagctagttactcagccaggggtgtcccattccacccatgtggtcgtacttgacttatgtttggatgaaattccaaggaatcggtccttaagtgcgagagcgggaaaccgtacacccggtacgtttcccggtccgcggttttggaaattcatttagttcgcaagcaccgacccaggtgtcgggttttccaagtcttttgtaaaactccagttttacccaagttgttactcagattttaagtttgaaggcgaccgtcgatactggcacagggtgcacgaatatcgaggcgcaactggatggttacaaggggacatggtatagcaattaacaatggaaggatcaaatgcaacaagttaggtaggtctgccaatctgccttgcagacagaacaacagattaagtgcaatcctatcaatgcataatattttgcaagcaatataattagatttcaaatataggctcaagatgttcaaaggtggcttgccttgctcgagatctggagcttgatcctcgaaatcctcgcactgcgggtcttcgggctccgaaactatacgcaaaacgggacaactcaacaaacggcgaaaataaagccctattaatgacctctaagcgtgccattagatagatctcgagatttgagaaattttggaatttgaacggagtcaaacggatttacggtggggaagatattgaatttctaagattattggatttttggtctaaaggaaaaggatttaattaaatcctttttggaaaagaaaagaaaagaaaaagggagagggagggaatatagacttccctcgggcggctagggcgcggccagagagaaagggcggctcggccgagcttaacgggccggccggcccaagaaggtggcccaagacgcgcgcgcgcgggagggaggagagagagagccggtggaccgggctcaccatgcgcggtcccgggtgggacccgcttgtcagcggctcggctcaccgtgcggagggagtacgcggctcatgcgcgcgggcgggggagggacgtggtgcgcgtgcggttcgcggtggacgcggatgcggcgggcccacgcgcagcctcacggctcgcggtggaacgtgcgcacggggagggactgaccggggtcggctcgacccggtctaggctgagctggcgccgacgtggcgcctacgtggctgccacgcgggccggcgggaggtagacgacgacccggccgcgaatggacggcgggcggcggcggcgagcggcggagcgaaccacggcgatacgggcaaaagctagcacaccgggcggttgttcgtgatgaggggagacgagccaacggctcggattcgccagagggagttcgacggcggcgaatcgcggcggcaacaaccggcggggagggaagagggaaacgccgacgaggtcacgagggaccgattcccggcggtgagagcatccacgcgaccacgggaatccgatgctagcgtcggattggacggagctacgccgagcgaggctggcgacgtgcgggtgctacggagctcgagcggcgacggcggcgagcacgcggcgagcgacggcgacggttggggcggcgccggctagctacggggagtctactcgagctactaccgaaagctagggggaggagatggggcgaggaggaagaacggagggaggcatcaccgagatgaggaggggcgctgtgacgagaggccgacggcgcgggagtaatctctccggcctcgggccggggaagaggaaggagagggcgcggccgaagtccccttccgcgtccttactcgtgccgactcctttgacacgcgcaacaacgaacgacgatggcgaacagagcacgggggcggcagctatggcgaggaggcgaaaacgagggagattggagggtaaggagctggggtttaaagggggcggcaatgtcggtttgggaaccgacttagggtggtcagggcgcgagctggcgctcggcggtcgcggccaaagcggcgacagggaggatgacgccggcgagggaaaaaggggaaaaaggagggggagaaaggggcttgcccttttgccgattcgggaaaaaggaggaggggagcgggggcgacgcggcagagggaggaggggcgctgcctccgtcccttggcggcttgcgcgcggagtggcgggggccgggcggtgacgacggcgatgacggcgggcggtttggagtggcgcgacgacacgggcgacagacacgtgcagaggctgacggcggcggcgaccgggcggtcggccactcggcacgcactcgcggcttgcaacgggcggcgtccgcgcgggcgcgcgcacgcgaacacggcgtgcgggaagcggcagcgagggagcggagtgggaggacttggctcgg

SEQ ID NO: 11960 - DNA, 16643 bp, Oryza sativa
tttgttcgggaagggaagggaagggaaggaggttagttggtggtggtggtgaggggatgtggcattgcccaagatattattgtcggtctgtctctccgcgggtgtccacggagggaggagctagtatacattctgactgcttcccggggagttttaaaatagagtaaactttacgaatagtgctccctccgtcctataatataatataagggtttttaagtttttactcataatatttaatcactcatcttatttaaaaaaaatttagaattattatttattttttatgatttaatttattatctaaagtactttaaacacaacttttcattttttatatttgcataattttttttaataagacgagtggtcaaacagtacatgaaaaactcaaaatcccttatattatgggacggagggagtactttacatatactcacccttccttaaatatttgacaccgttaactttttttagctcatgtttgactgttcgtcttattcaaaaatttttataaaatatgtaaaattatatgcatacataaatgtttttttttaaaaatgaatcaaatgataggaaaaagattaatattttttcttatttttttaataagacgaacggttaaacatatttaaaaaagtcaacggcatcaaatatttagggacaaaggaagtattactatacatatatatgatttgatcaaattatcgtaaaagttatatatttaaaaagaatatgaatcacaaaatctacatatatagtgtcttatggctgtgtgtcttatgacagaagccgaagatgtaatccatttccattatctaaaaaaaatctacagatatagtgtcgaatttattccagaacagatacagtatcaaatttatcataaaaagaaagaaaggtgctaattaattgctggattatgagatagaaaaatgtggagtctaaaattttaacaagaattttgatagtcttccggtccaaatagaatgtgttatatccatccaaaatctattatattttaggaggggaaagtggatatctgtatttttaatggttaaattggaaccataccattataattttgcaaagtttgagatatgtcatcggtatctcaatgacatttagaacccacatgagtcaatgacatgtgggtcaggatggcatatcttcaattttgcaaaattataatggcatggttccaattttcccatttttgaaatatatattttataatattttcaaataaaataaatacttaatcgttctaaaataaatcaattatgtataggatgtaacatattctgatatagtaataaatctgaatactgtgtgatagtattttaggttgatttattttgggagctgcgtactgtatggcggcacatgggggatgtggggcgcgtgggacttgaattgaccagacaaggatcggggaagcggtggatggatggagttttgaggagagttgagtttgggccgacgtctcgcactgcacgccgaggccaccgctttgacccctattctcgcccgcttcgcccgccgcctgccgctgctaaaaaaagcctgcgactgcgacactgactggacaaatcaccgtctcgcatacatgcacagtccttagcttcttagagcaagtttagaccatgtttagataggactaaaactttcaagttccctatcacatcggatgtttggacactaattataaatattaaacgtggactattaataaaatccatctataatcttggactaattcacgagactaatctattgagcttaattaatccatgattagcctatgtgatgctacagtaaacattctctaattatggattaattaggcttaaaaaatttgtcttgcaaattagctttcatttatataattagttttgtaagtagtctatatttaatactctaaattagtgtctaaatatagagactaaagttaagtccctggatccaaacaccaccttaatagtgtagccaactactagcttcaaatcatctatagccaatataataactaatttatacaatagttgcttactatactattaatacctggtcccacctgtcatacacacattacgtcttggagtccgtgttgcagctggctacatatctgtagcccgttgctcttctctctcttcctttatctctttaaaatatctttatagttggtttatagcctgctattgtacctgctcttaggcctttcttctaaactcgctttcaccacaccctccttctaccctacttcttccgtctcaaaatatatagttatttttagcacagtaccttattccaaaatgaagctatttttttacctaccacctcctttcaaccaatcacaaccattcttcttcacctgctttctcttttcaaccaatcacacactttctccaatcattctcatctactttcttaatactcgtgccaaccttaaaaatataggttttttactgtccttgaggttgtgcagtaccaaatcctgaccgttgatctggcatcatccaatggttagaaatcatccgtacctcatggtactgcacctcctcattgaagtggtactatgggtggaagggtatttctgtcctttactgtttcacgagagaaagaaaaaacgtcgggaaagcacagcagcagcgtggcggctggctcgagggggacagcggcgggcgcctggacgcgtgacagcggcggcgggctggacgacggcggcggtgggctggacagtggctgcggcggcggctggagggggctggacgcggcgggctcgagggggacggcggcggcggctggacgcgcggcggcgggggcagctggatgcatggcggcggcgggcggctggatgcgggacagcggcggctggatgcgcgacgccggcggccggctggatgcacgacggcggcggcagcctcgattggcgacgacgacgaccggctggatgggggacggcgacgacggcggcgacgacgacggcgggctggatgggcgacggcggcggccggcggccggctggatgcacgacggcggtggcggcctctattggcgacgacgatggcgggctggatgggcacgaacgacgaagagatgtttttttagtccgatcatacccctgctaaatcaacggttagattagattggtacctcatgatacctcgtagctcatggtacctcttaaaggatgggaaaaatgctcttaaaaatatcttcatttttgggcggaggaagtaatattaagtgacccttgacggaggtttgatatgtcaagtgacaagaaatatgctgccaccgagggcttactaagaaagtcaccacatcctcatgagtatctatcatcttcgttctaatctctccaaagcggaatggtttggagtgaattgtactagaaaattataatattaacaaatatgattgcatccttaagaatacgtacgaaggtagagtctgatataacacgtactcttagtttaaactatcacttagagactacttcattctcttatcttataacacagttgagacaataacgtctcttaatattatcaatgcaccataatattttttattactcttctttccttttcttcatctccatataattaattttttttaataaatatactaagagtcgactgtaagctgatgttataggtagccatgatgttcttcttttctcctctctttgatattattaaattaatttgtttatgtggcaacggagagagtccgctaataagctattgtgcatatccttaatgcaactaccaatagaatgttgtagttatacaaatagatacaatacattcactaggctagagagaaaaacgagaagtctaattatttctcttactataagagccccacaattaactgcatgtgcttcactatacttctcggaccattttttttatgtgaatgactatcaggctttacccaacagtataacttttatataaagaaaaaaaggaaagaacaaagacaattacaaatattgtaatcaatccaacactaattgaagtatagtggaaatacagccccctatcagcgaaaccatgggcgatcgacaaactgaacagcgggcgattactatatggtatacaatgatgtttagccaaacatgaaagaaagcagtgtctaccaccatcataaatgatgaactagctagctccggccatctctgccctgcaccaaccgcggccgtatcgatcacaggccatgcggctactgggtgcactgaaagcgatttctatccatatatctatcttacggatcttgcaactcgatagctaggagtagcagctgggggtgtgaccaccccactggttatccaaagttgcagataatggccggccatttaatttcagatgagttgcatccacaaacctattcagaaaatgcagtcacttttgtcctcttttcagttgtcatcgtcactcccgttagctggctatttagctcgggcaaaatgctgcttgttcatgcatgcaattgttcattcatcctagatatttttgtgtaagctagagcagatgatatggaactgatggattgatctagtcgctttttctttacacaagagataatgggatccaacgcttttcatggggatcgatgcggtgaacgtacttttaatcgccacacagaaataggaggacgcagatgataaaaggggttgtttacataaaaaaaaatttaaatttttgacgtgtcacatcacatcagatattctatagagtgtcgtatgaggtgttcgagtactaataaaaaaataattatataatccgtcagtaaaccgcgagacgaatttattaagcctaattaatccgtcattagcaaatgtttactgtagcaccacatcgttaaatcatggaacaattaggctcaaaagattcgtctcacaaattagtcacaaactatgcaattagttatattttagtttatatttgatacttctatatgttaaactttcgatgtgatatgatataaaattttaggtgggatctaaatatggcaaaaaaaaaaaaaagagaaagaactttctcgagcattcaactgggtacaaactggctttggtccgcagtccgcttgatttaattacttggttatacatggtataagttgatgatccatatttacccatgtattaattattttaattaattactccgtacaacttgtttagtggagtcactcttgtgacttaatcgtcgagggcgacaaacgcgtatgtttaagtcttcaagataggatattttgtccccaaaacaaagttgggtttgtaagctgctttggttacctaaaattttgcaacatttttgtcgcaatttttgttgttatatatgatttttctttattttatataagtttgaatatttatgcatgtaactttataaattttatatggactgtaagtttatttcatgtttaagttaaaataatttattgttcaatccgaaagaagtaacttttacagtggagcgatgagaagtattgtatattgtcattccatgaatgcaaaaagtgactgaaatatttaaaattttatggacccgaaatctttacatccctataaattaaaatgtctcccgtgacgtgagcaaaaaattcaatataaaacaactattacaacaaaagcatgcaactttatatatacatgtatttcctatacaatactccctttatttttaatatacgacattgttttatctcattaaaaaaatagtgcaaaaattggaagaaaaatataagtaatgcttaaagtaactttaatatgataaaacaagacacatcaaaataattgttttcaatgcaaagtgagtgtagcaacatatcatatgggtttaagtcttagacttgtatgagtactcataattaacgggtaattattccttcggtagcatacaacgtataagtgataataagacgatcacgatagtttcgttaatctcaagatatgccggccatgtttcttagatatgctcgtaaatatatcctaatataggatatgtatgtgtgcattaatatctaggaataagtagtataaatgtctacgttaacttatactccctctgtcccactaaggatgtcgttttagatattgtcagccaaattagagttaggtgaaaataaccatattgcccatgtttataggattgcagcaaatcatgtggagtcttgagagtagcacactgcaacaatcagttgtactgccacatctacttaaaaaagaatatttaaagcatgataaaattaattaatagctggtgcttgcagcagcggtacacattggtgccaactttatggattatagtaatccaatgggtcccatcaattacaaaacttcggctaatgttacttttctgtgttaatacagttgatgtgttaatactagttgatgggaaagttcagcgtcgagtattttgggacatttgctactgagcaaagcgacttcctttatgggacggagggagtaccatgtttctaaaaaaatagatattttaaacaaaactaatggttaaacattatatgttcaaaagtcaacaataacgtatgttttttctttaaaaaaagaaaatggtaagtaataaaaggaaaacgatacacatataaataaacaagtaataaataaatacatgcatgtagctgtgccttgtgtggtcctgacatgaaaaatatatactcctatatacacatgcaatgtaccggctggcaataagcccatacctgtagatatgtacagataaccggccggctatcgatcattatcgcatatatagccttcatcccgaagaatgtagagaaatcgatcgaccaaagtaaagatgcgggtgcgtttgttgacggtgtgtcttttataaaaattttctataataaagttgctttaaaaaaatcatattgatcatttttaaaatttaaaatagttaatacttaacttaatcatacgttaatggctaatctcattttacgtatattctcttctcctctcctctaaaggtttttttaaataaaactaaatatgttctaaaacgtcaaagccgttaaatatttagggacggaaaaaagtactatctagcaccataaataatatcctatccagatagatcgatcgagaacaccacgacgctgacgcaccgatcgggacttggggatatgcaccgtatgtcgtatacgtacgcaggcacccacgtatgccgacacgcgtggtgtacgtacaagctagcagagccgtctcgggtcgtcgtatgtgtacgtacggaggaatccttgtacgttcccacgagctatataggggtatctatttatgggctgttgggtctctgaagaagagtgggcctatcaatgtatttttgggccttgatggccatggattgaagcatccaattgggcctaggtccaacagtagaaaatgcccatgcaagcgtgcgtccggttagcccctggacagccgccctggctcacgggtgaaaactccatcaaatttcgatattgatgagcaacttgatggcgaaatttccataacaaatactgtactagttatattgaagtttgctagagctctaaaatttttttggctccgttcactggccatgatgtgtgtgcgcgcgttccagtgatagtcggggcggatctacagtacaatgaccggtatcgggtgacaccgacgactttcggcaaaacctatagcaaaactgtttatccatatgttatcataccatgatttaaacataattagcatattatgacaccgatagacacattatgacactaacgaatcagttttttttggatccgagagagtccatacctcgaaaagttgttttgacgtttttttccattaaaattttaggtttgatcaattttataaaaatgtttcaacggcatctcattaaatatattttaataatatatttattttgtgtttgaaatgatgctacaattttctattgattttttactagaggaaaagtcaacgtgacttataatatatatgaaataaagggaatagtatttgtgttattactactccatctatcccaagaaaaagtacatagtacttcttcctctctaagaaataaaataacttttgattacgaatctggatgaataaaattatttttaaaaaattatccttgaaacagaaagggtgaatcaatattgtgttgtgtgtgcaggcgcacgccatataagtatatacaccggtatgcatagaacattatttttaaaagaaatacaatataaacatagatgatcataacatatgcactcactcattcttgtgaacatataccacgcacatccctttgtacagatggatcgacgacgatctgaaaaaaataacgtatctagtaacgaatctagacatacatatatgtctagatttattattaattgtactagtatgtagtaaccctattcacttttaggtttttttttttttggatcagtagtgagtacgtctgactcgatccacgtacgtgtgtgtgaccacttgccaaccagatgagcagagcagaattggtcaggtcagattgatcgatcggtgtgaggtgagctgctgccacaagaatttaatggcggcgtcgcactcgcgcatttattttacacgcaaaagaatgattcgattcaattcgagcgagtaccccgtaccactctccctccatccccctcatttatgatagagtttaaaaatgtatctcaaaaatataggtttaactttaatcaattatatatatcctctatctgtcttaataaaataaattaatatttaaaatctccaacacaaactttcacggcgagtgtaaaaatgaaagaccaaactatcattcatatttaatcatataaaagtagcatcagctggtgatagataagtgatattgaaggaataaaatttaatttataggccagtggtaaacaggagacttaggccttgtttagttctcaacattttctttaaactttcaacttttccattacatcaagactttcctacacacataaacttccaacttcttttcttccaacatccaattttagtcaaacttctaattttgacgtgaaactaaagacaaccttaataaacaacttagctagctagctaccttgggacaattattaaactctacaaatcaaattatttcgggacgagtcaaaaataaaatttcttttcaatgtctctcacctacctagtcaccaatgctgatttctaccgttaacagcatctttttttccctcgctgcccagtacacggacttatatagagagtggtaattgttagcttttcacttacacgtaaaacgtgaagaatcattaatgtatgattaattgtgttaattattataaacttaaaaatacgtttatttaatttttttaaaaaacttttacataaatgttcttttaaaaatataccgtttaccaatttagaaaacgtgctaaaggaaaaattgaaagttgcagatgctaaaataagaagcgaaacagaggcctagattctttggatgccataaatccatttgttttaggatagagggagtcagttgttgcgttgtacttttgttttcttttgtgctgctggtggtaccagctgacaaaaagttcttttctttagaaaaaaagaataactaaaggtttcacttaaagtttaatagtatatgtactactatacagtgacacaagcgatatgacagtacttaaccctactaattaatagctcatattttgtgttgagatatcgtctcttatcttctcttccatataaagaagaaaaataagtgctacaaaataatacttcctccggtttcattttaattgacgctttggataatgacacgctctacaagatatatatttgaccttatttttctattataatatatacaataaataaatacatgtttacttattatagtgttttgaaagacaaatctatatatgtttttctagtttctttaaactaaatatttttaaagttattggtagtcaaagttataaaagtttaacctcaatcttgtccaaaatgtcaattaatatagaaccggagggagtagtgcgctaggatgtatacatgtatatatcttcaaaatatatgtcatcacgtgcaagctaaaattaattacaacttcgtatttttgctaagacacggttcccaaaaactgcgacaataaagattagttacaacttcgttagctagtgtttaactatttgcacgcatgacacatgatgcattgcaggttaattggaccaacccgtgtcacatagatagaattacagtcgatcttgtgctaaacacgtaacgttacatacgctgcgtacgttgcatttgatgaaatattagttaatatgcaaattcccacaaaatattcgcaagaaatttactccttgttttatttctatgtatgattatgatttaaattgaaagcatatgtaccaaattaaatgtaccactaaacttgtagtactaataacacgctccaaaaagaattgaaaggatcattttaaaatacactagcttaacagtacgttaacgttgttttctgaggtggtaaaaaaatagcatgttaacttcatatatatgataactttttttttctaaaaaaacaagtcgaatttgggatacctcttcagataaaattagattgtccaaaatcttctagtcactaacccaaaaaaaccacatctactttcctaatccaaacagcttaatcgttcccatcctcccgattcttctatataccaaccccacatgtgcaggttaagattgagccaagtattatatatcatacaataaaatttagcataatatggtaggctagctagcttttatttcaggacgctaagaccaagctgtggcccatgtggtttagggtccacccttacacctttatgaaatgctataagggtgtgtccccttctttagtgttatttaattcttttttacatgtgataaaaaaacttaactaattacacaataagatactttaataggctacacattatattgtcaaatagttttgctgggaagaaaaggtaaataaactacctgttattttttcacaagaaatcaaaccactacttattgatcatatatcggaaaaaaaacctcaagcccctgatgatgggtgttgggtcaggcagccagcgactcaaaccacacaacagtgtggtaacctttatatgattcctgctgtttgaatgtgctgggtgtccaagactgaaaataactcattgataagataatcattcagcccaaactaatttcaccctaaattttcaatgacgctagctgaagctgtccccaaaagcagatgccaccgtacatagcacacagtactgcgatacattggtgaagctactagtagctactaggattgtagtaattattgtacatgtgggctttcaacttttttacagtgagaggaggcctatgtccatggttatgggttcatggtcaggactagctgattgatgtgatgggaaagctgatgaaagaggagcacttgactagctggattttctattttctcgcaccttaattacttttggtgtgtttgtgactgtggtggagtgcagcacttactagatccgtgctaaaaaaaggaatcaaattggatatgtgtgcaacaaatctaaacaaacaatagaaaatcaatgcgccggttggcgcttccgctgattaagctatgtgtatgacctttaaaaactacatatagttaatatactaatatttcagtttctcttttatgaattttagcatcagacaatgcttagataagactttatatatggatccaacaccagtattgtttatttgttttatcagaattgtaacgttttcaaaagttgaaatatttaaaatattatatattttatagtataaacaaaaaatacatatatttagaatctaaatattatttattttatagtataaacaaaaaatacatatatttagaaaattgttatcattgttacagagttcgattcaatcttaaaaaaagagcaaattgttcatatcatttatttttctatttattgtttttagtccttgaaatatacgatatgtggtcatgatactttctccgaataatttgcaaagaattttacaaaaaagtattttcccctttttttaattcttcttcccttttttacacgtttgcactagttcgatcacgcattgttggattatggtgccgcacggcccatctacacacatgcaccatcgcaacttgcacgcttgccaattttatagagagggtttcttacatagcgctcttttagccgcttgtatgatatctcgccatgtgtcgctcacctaaaggattgtgagagcaactaatcagctagcataaaaccaaccagcatgagatagatagattgcaaaggggaaaaaatattttcggaagcctctagaatctggatcatgtgccttttgtttgcttctcggtatttcttttcttatggatattctctagatttatctcaaagtggatagataattgggaagtctctagaaattggatttgtcttcttcttttattttggctatttcttatgcttaattttcttagatttatctcaaatttttacatcgccatgtggctcaataagatggctcgaaacacaaaccagttttagaaatatagaaattccatgcgtcttttgacgcgctcatgttatagcctgtccacattgattctgtaattataaagtggaaattttgaaaatttttaaagaataatttgcttttgttaaaatttgaaaatcttttaagttttctctcttttttctatttagggttcctttgtagagtaaaattataattgtattgtctattaattgaaaaaataggtgataatattttaaaaggcattttttgcaaatgcatattttttttatgagctaaatgatttaatataagtatctatgttggaaaaaaatatacttgttgataaaaatttaagtctaaccggactccactgatctatacctgatattttgctccttactaaaattcttttaagccccatgaatccttctagattcttccccacttcacctttgcattttctcttctctctctgtgtgtaagctatagcatctaggtctatttttttttcttagtcatgtttgattctctttttgcctatggatgtttatttcctttttctatcgagccatgtaggactctggagatggttcagcacttcagcactgttaccacgttttttcgcttatttttttctctcatataattcctagatttatttgcaatgtgaaaggtgccacatggcccaatcatcgtttgcatgcacggccagcattagaagataatactagaaaatagacatgccaggtggcgcgccctctgattatataacttgtgtgtgctatttagtgcttcttccaagcgaggacacattagctggcgtttccgcggattatacatgcccatattcttcctagcaaggactatttaagggtttctatatttgaaaactaaatcaagtaaaagagtaatacatttggtcatatcatttaactttaatgaataaataaatgtattcgaagagaaaatattttgaatattaaataatatttaattttgtattgaacatgcataaatactgattatgtatttttattttattttacttattcatgtcttgttgactttgatctaacttggtcagttggtctcatggtccatcggcccaagtagcatatatttggcccaattagtcagtccaggagaagaaatttgggattttactatcgtaaaaggatggtttcgctagaatgctatcgcttcaaagtgattcattaatatgctatcctaaactgaggggtgttcaccaaaatactatttttggtctttttgtctaatactaatgtttttgctctattttgttttgtcttgcgaccaaattacccctgcctctatcaactcctttctcccaacctctctatagggactgtagggtggcgcatgaggagggaatggaggcggagcaagcgcctcagctggcggtgctaaggactggggcagcggcgcgagtaaactggggaggaaggaggcgaggagcaggtgggggaacggcgggggccagcgccggcgctggagccagggccgctgcggaggggcgccgctgccaaagagagaggcagagaaaggcagcgatcgattcgatctggtctctggtcaaagagataagagagaagggtattttggtcagaagaaaaaacaaaatagagaaaaatcatttctattaattgaaaagaccaaaaatagtattttggtaaacaccctcagtttataatggtattttaatgaatcactttgaaacgataccattctagcgaaaccatcctttgcgatagtaaaattctaaatttctcgtccaggagttaggagaccaccaggacgtcttctcgtgtttctcgatggatcgatggacctctatctctctagctttattcttttttttctctgaaaaaaattgtttgggatttatctgttaattcaggggtgacacgtggtccaatcaatactgcccatcgtggccagcattagatatattgattgatatgtttaaatttgtatatagagaaaatatgtatactaggaataccacgggtatatatattggactagcttattgttgcatgttttattttctttccaagcaaaatatcaacatgatgcacttactgcattcgaaaataagaacttctcatttttttccccaagattaatgatagaggtgaaaatttaaatgaaggatggttttaattagttatgacgaaaaagcaggtgaaagaaattgaattaagaatggttgtcaatagttaagatgacagagcagatatagtagaagtaactgtattttggaatgaaagcagtgctacatactactccctccgtccaactatgtaagaattttgtagtatttaaattttaccaaaaagaaaaggtattcctaaactactactgaactagttactttaatcatcttctatccgaatttcatctaatccctaacactaaccaattattaaatgtggaacactaaagtgtttccttcccaatctaaagatgattatattgttggagggaggaagggagtattcgttgtagttggtgccttttattctttaaactttttcgatgtgcgtccctctattttatataagacacattttattttattaaggcaaggtttcgattctctattgtgataataattagtagaatttggtcgaccaacagacggaatgattagtaacaaacgcatatgcatcgatcacgccgtactgtatagtattaagtatatttctgacgtcttctatacccaacattatttgagcatgtcgtcaggtagtatatatgtgaagttgttgtccatgacactactgttcccctacatcatcgaatactatacagtctattattacatcgtccgtaaaaaaatatattacaaatttgaacttaaacacaggttttaagaaagtatattaaactaaatggtggagaattgtgattgattgagaagaaaaatcaggtgaagaaattaaatgagagtggattataattggttgaaaaaaatataggtggagaaattatatatatatataaagataaattttaaattataaaagttacttcctccgtcctaaaatataagaagtttttgttagatgagacacatcctaagactacgaatctagacatgtcatcttcaaatttgtagtactattatatatatgtattccatctaaccaaaactttttatattttaatggaggagcgctatattttggaaaacaggaagtaattagtaatagcatttgtctatttataggtgaaacattagtagtaaggtcatgtcttcctgcagctgcacgcccggctacggtgatgaagcagacggtggtgaagcagctagctgaacgcgtgaaccgacacactagctatagcctatagctccaacaattaactactcctccactactgcagtactcctacacttatgtactctcctgtctcctccaatccactgatgaataaactggtccacacgtacaccatcggtcccaaaaattaaaatttcgcctactccttttgttgaaaaaaaaattaatattatcattcgttgttctataatagatcaatatttttttatggagaaagtatgttttgtatcgtgtataaaaattacaatagtttattttgaaatgaatggactagtatgaattttgtctaacaagctgtgtatgcatatagtacatagtatatatatatattttaaatatagtttattttggaatgaattggactattggagtattatgttgacaaggaatcagtagggacgatggtattcttttctgctttggccatgtttggagatggagtttttgggcgctgcaatttcttaattctaggatctccaactgaccctcataatttagtttctcactccgattgaatttaaatgtggttgtaaaatctagaaaataaatataagagataaaaaaatctggttttagtgtggttctcactgattgattatactctctccgtctcataataagtttatttttatttttagttccttttatttgcctcagaaataaatttagag

SEQ ID NO: 11961 - DNA, 8449 bp, Oryza sativa
tatgtatgtattgttggagcaaaagaggaagcggtagtacactagttgttagtagtacactggtaccaatcagatatttgttagtagtatactagtacaatcagagcccgatggattggttcaccaattcggggcattctccaacaaggttagctccctcattggttgtcccaaaaaaaaaagcaaaagccaaaaaaaatatattcaacgtagtttcttttttagcattggtttttaagtcgttaagagcacaaatataaaagctttacgcatacattactctctccggactgataatacttgtcgttttagacaagggtgaggtcaaactttaaaatctttgattatgaatcattttaaaaatatttgtctttcaaatatggtgactacaggtatatattagtcttaaaaagtactttaataaaatcgtatatttgttaacacttttatacatattataatagaaaataatggtcaaagttgttttttttagaccgtgatcttgtccaaaacgacaaatattatcaacccgaagggagtattttatagttgttaataagccgttactttataatcagtttaggggcaaccgatgaggtcctaggatgccaactagtgtagaaaaagtgtggctactgtatttcttcctttgtttcatatatttatttttttgaaacagtttaagtatcaatgtatcatgttgcatatagctagaggcattatgcaacttatcaggagtacgctaacatgtacttaaaaagggatagcaaaagcaatactgaagaaaagttttcaaaaaagagagaaagcaataatgaagaaggcaaaaagccaagatgtagtgggcaagtggcaacctacttagcagaaaagtcagggcatgcatcctaggatatctgattgatcaaattatcaaattattcacatggggatagaatatgcaggggcattgttcattggttcatataaaagggacatagcttcacagggttggccagctatataaaccaaaacaacttattagcgaaaaaaatttataggtaaaaaaattatgtgtccttagcaacttaaaaaaacaaatgttgaaaaaaaattacgttgagaacaccctaaattctccaaaattaagtgagacgcacaaaccactactttttataaacaatctttcataagtggtatgccaatgttggcataagtccagtaaagaatggtttgttatcttttgaaacatgtgtggtgtgtgttgtagtcatagcaaccaaacaaacacttgtctaataaaatatgggacacctatcatttaatacggtaaacagtaacagcaaaccaaacagacgaacattttgcgaaagatgagaaatctacacactgatcactgattgggccgggctcgctaggtcttatacagctaatcaaattaaggccactagatgctgcaggtaataattaaaaagaaaattattacgaaacaaaaaggcaggattcctcgggtgctcacatggtaaaggaggaacaaagcgacaaaatctttctggttaaatgtattggagacacaacgtgaatcacagacgaatcaacaagctgaaagacaaaatgtgaatcggcttgacttcagggtggctatagcagttaacaagagcatggtcaacattctactaagtaatggagtctctgctaagtaaataattatctcagtaaaccctcatacaaagcaatgtactctctaatcgtcaaaagaaagctctagctagggagcacaagcacaccaaaaaaatgactttggggaagtttttgtcttgtttagccccttatacactcattaactaaattaggatacatacttatctttatgataattgatagctgcccttctcagaatttggaggttggaaaaacactcttcacgtctttttaacattcttcccttgattattttactactggtattggtaaatagggtttggcctacgattttttaaggagcatttgcattcacaattccaaggaagaaagaggggtagtgttggagcaaataacattattaatcacatattggtatcagcaaagatgccctacctttgtctggagggaccaattactagaaacttctatgtaaaaagtcaaaaaaagggcataccatatagaattttgcagtatcctgctttagatctggagaagtgaacggaataaatgcacctgtgttgcccatcagcatcagaataacgttacgtacttgaacagtgtgattgatcagagtaccaatgaggaagaaaacatgtgcaggggaaatgaaatctgttgtcttttactatgtgaaactaaaaatggaatcagttgccttttactatgtgaaactaactggaataacatagtttgaatccaatggatatgtaagatacaatttagggatgcaaaaatttgagactttagttactaaccataatttcagtaagtactttagacatgaaaaataatatagaaagacattttattcaagagacaggtaaagcaaacaaattgaagtcaccaactgatgcaaacgtcagcttgtgcaaggaaagaaaatggttacaattactaaagcatacctggtagaaacaactaggagcagaaaaactgaataaactttccatcatgtttgatttcatatccttcactttgtggcatcggataacaaggtctgacatgccatcaggcacgttaacactccatcatgtttgatagtagaagacaacatgaaagaaaagaatattatatgcttacatcgtgtaaaaaattaaaaaaagacagaaaaataagatatcagttaagcagttttcaagataagaatgaatgacagtttgtgatggcacctacccagattgtttccatccaaaaacctctttatcgcatcaacaccaaaggaaagaactgcacctcttttgcgtgaacctctctgaagctgaggcttggcacattaaaccagtcacaagagagcccagaaggaatatagcaattatatatattgaagcaagctttgtttccatgtaaatatttttgctcgacattgcagtgattcaaaacagtcagaactcagaactacaagggtggcatatagcatcagatatataatgtttgcagacttggggctatcgtttacatattacataaattcaggttgcagttgatggtgtagcgaattttaacgtgatatccttataatttaagagaatcaaagaaaacacaatcaatccagagcacaactgtttgtgttcataaaagaaaacataagttccactcaagattggacaatgataactagagaactacgtatatgccttatacaggaggctcacataaataaccgatggccttaatgacataaaagatataacttcactccatgaacactaaataaactcccaaaagctacaaactccttacttattacatgagcgcgaggcaggtgacaaatacctcagaaaacagctcaacaaatgtatcgctcagtttggactcagttattcctcaaaaccatatatagttttgttcatgctcttgctttcatggtatcctcatgctaggtagatacctgaagcataaaaaatagccacacaattttataagtaaagcctgtgtatccatttaatttaaatttagctagtaccagtatgtaatggaaaaacacatactagagcaaattaagctagcttcacaccatcaaaataagaaccacacataatacatgttggattgagccaccagaatgcaaaatgtgtaaaaatgacttcaggagaaaatgatcctctgtccagagtctccattgaaaaagtaagggttttctgaagcccattgagctcaaacatatttaaaagatcaaaacaatgaatgaaaaacaagagattagtccaacgaacaaccacaatttaaagtttgagtaatggcgttcctttcatgaggtcaaatctcctactgttttctgtcaaaaaattttcactcggtatgatatataataatataacactctatttgttaccaatcacaccggattatgacattgtcaaatgcatccgagaaattgtaatgtatagagctatattatgaaacccctcaaatgataaaacaaatatccgaccataaatctccacaaactgtaaaaggacaggctctcagggcattcacatcaacaagctggcattgattgaaataagtattgatcttgtaacacaatctggaaggaattgtgtgttcacaaaatgcttcagttaaatatcagcactatattagtgaaagaatggcgagcattcaattcatcttagcacaaaggaaatctagaacctcacttgcctctatttccgtagatatcaggatttcaagatctagggtgtgtttagttccacgtcaaaattgaaaatttgactaaaattggaagtttgaagaaaaaagttggaagtttatatgtgtaggaaagttttgatgtgatggaaaagttggaagtttgaagaaaaagttaggaactaaacaagggcctagttgacaagcgacaagtcgaagagacttaaattttttcaagcactctatgtttgtaattcagagacaggatccctttcacaatcaataaacaaaaaggaggtaactcaatcaactgaaataactcatcagtcggtcagtcccccaccttcacccaaccacaaacatgccagttttttcttcagctggccaaaatggcccctccaattgcttgtcgattcgctaaggcaactagcttaagccatttcatctgcatatctgcgctgaaaaaaaatataggataacagggacgcgatctcagtaatttgggaatacatatctcggatcaaaccatgtcgcggattatgcattcagaaagcgcccgtgtgcgcaactgcgcaccagaactagcggtcagatagggtttaacatccgaggtttagggattaccgacgagctagcggggccaccactatgggcgatcagcgagggtgctcccccggggaaggccggagaagagaggccgcggcggaggcggcgggttttggggattccgtggcgggagtgcggccgcagatcctgatcaccggcacccctctcgcctacgcccaccaccgagcacccccgagcaccgagcgccggggagggaggcggtccgcggcggcggcatggtctccggcgaggcggcgactcaccgacctcgccgacgcggatggccaacatgccggtttttttttctctctttttccctcattttattttgggcctgtacgggctagtgggccgaggatccttgcagtgtacgcttctgctcggttcgacttggtttgcgtgggctgtgtgggctagtgggctgcttagcgtaggcaaggtttgcgtgggcttagtaggcctcggctccttccagagaaggaaaagtgcaccggaggtccctgaacttgtcaccgagatacgaaaacgtcctcgaaccgcaataccaaatatgcggggttctctaactatacaaaaccggtcaccagagatccctcggtggttttgacccgggttttgatttacgtggcggctgagtcagcgtgggacccacgtgggccctacatgtcaggtgtcacgtcacactctctttcccctcttttctcatctctcttttccatctcttcactcgcgccgagcaacgcgaggcgcgatgagctggcgaggtgacggtggtcgcgactccagcggtgaagggtggtggctggcttggagctcagcggggcgaggcaggaggggcagcgcgagctccagaccactccacgcgggggcggctgggatttggcccacttatatgttcaaattttgggtattttaaaaagatatctgtatcttgcatattggcgcttttttataaaaaaaaataggcacgactctctcttctttttttttctttttttttgcagaaggttggagagatggattgttaggtgtcctcctggaaagcacaccagaaatgctgtagtgaaagtgataataaacacgagtcgtgggataaatgacaatgacaaacaggcagaatgtagtttcatttcgcatctttactaatttaaaaataaagtcgtcatcctcctcctacactatcgtagttctcacataaaaaaatgcttttaaacataccacaccaaaaaaaatattaatgtttctacgtaaaatcaacccggaaattaagttggatgaaaaaaaactggaccacataatttagtcgaagccctaatatttgcagtcccaatattacaattttctctataattccagtcacgttgtaatacgtggccatgtcattaatgcacatcaacaacgggtatttaaatttctgtctccatctaattttcgtgtacatatttctttatcttttcgcttatatttatgtttatcggttaaaatttgatttttcaatttaaaatttagagttgattttgagttaacatatatataattttatttataaattattttttgtttgtaaatatattatttggcttagtttgtaggagtatttgcctgcttgttttcagtaactccttttattttattttagccttcaagatttgtcctaaaatataatattttttcatcagtattctcttctcaaccaatcacaattctctatcattcaatttttttacctatctctacttctcaaccaatcacaaccttcttacatttaattttatttattttcttaatacccatgttcagtcttaaaattctttatattctgatacggaggaagttgtatcaaactggagcagtagacggaaaaccacgtatgctcaaattggcttcagcttgccgtacgagtttcagtttggaagtttgagtgatcatctcctacttgtactaataataaataagagtactatgaacgcgattactcggtcaaaacgcaattagctgtcgccaatctcattacgtgccttttcgcaaagtcagaacgaattagtgcgaaacagtcctccataaatagcaaaacagtagtagcgacacaaaaaggcacagatttttttttcaggtgatacgtcaatgatttgtgacagcccaatagcttgcagccaaggccatctccagaattgaagaatactcgaaaaacttctcgtacctaaaattaaactaaaacacttttaatgtcctaaaataactaaaatttagtaattagacataacataatattataaatataattagtggatgtatctaatctaattatctaattatagtttgctattctcctgttttatattataaattgtttggattttttttccgttacacaaactttttacaatctgataaaaattttgtagaaaaattaacaatatttataatatcaaattagttagaacattaaatgtaacattgaataaattttgataagatgtttgttttatgttataaatattgttatattttatataaatttggttgaaactaataaattttggttagagaaaaattcaaagcaacctataatataataaattatataaaaattggagggagtatattttaatatggacgtagtatgtaaaattcctgaattcaaaaaagggccaaaggacatatccggaggcaaactgtatgaaacaaattgatttgcaattttctccactttatttcgttttcttttcactgtccttaatttctattccctccgtctctaaatataagggattttaattagacagccaaaatcacttatatttagggacggaggagagtagtaactaacacaaaacgttacacaaatgcagcattgcagcccctaattaatcagatccaaagctattatatccactaatacagagtaagcgatcacctagtagcaggctagctagccaagtacatcaatttacttcaacggattaccactaattaatctcacactcaaatactcctactacatgtaccaactcgaacattttctctctctttcattttttttctctcattttgttgccgcgcttcttaattagcatctcctccggcgtttcatggtatggtcaccggcggcggcggcggcgaagcaacggaaggggttctccggcgaggagatgtccggcacgaacaccgcgctggcgtcggtggcgccgccaccgtagcgcgggtcccgttgccagtggagccctgacgccgtgggcggcgaggggagctccggcacggcccagtgaacttccggcacctggccgaagaagtcctggccgccgccgccgccgccggcggcggcggcggaggaggaggaggacgacgacgacgacctgccgccgttcggcgagccgtccatgctcccgatcttgccgctgtccgcctgcatgccattggaacgcgccacgttagctcaagctgtgtctcgcaaaatatctcatgccatcgatcgctcagatcagcatgagcgaataatgaggtcataaatagatcgattttttagtag

SEQ ID NO: 11962 - DNA, 674 bp, Oryza sativa
tcgagctcggtacccatcgtgtcatcgtgtgtcttgtggttttactttgcagctgaaatctgttactatggtcttgtgcatatttttgacatgtgccttgtttatcatgtagagtgtcaagtgttgcgccatacccatcctcaaagagtccactagagagcagtgacaccattggcagtcccagcacaccgagcaatcatcgtgcacggacatcaccccttcgaccaacaactgcgaggactcactgtgcttaggtcagccaaggaacatcagcttcagcagccaggagccccccagcacaaagttacagatatgagacctggtgatcattgtataccgaagattcagctcagcgagagtcggctgaccttgatgccagatcggacgccttctttcgcatccgtgttagggtatgatgagacatagaagagatcactagatgctgtttctatcctggctgcaaaatctttctttggctagagctgtttataagtgctgatctagccacagccgccgccacttagtagtacgagagctgtgacattgcaggtaatttcaggctgttcttgattatttttgccctgagccatagcggcattggacttgagaggaaaagaaatgctgctgagttgtataggattacagattcggcgtatgtaattttgctgtttttt

SEQ ID NO: 11963 - DNA, 550 bp, Oryza sativa
atgtccaagctcctgttcgccagagttaaatacgctggaggattctgtgacttgtttccagttgacactgtgaactcatagtagggctgggagttgctagatcctgcaaatgcatagagcccatccgaatgaacagttaaataatacaggtcgctggcaatcagatttactgccaatgcgttaggcttcaatctcattccttgcaccaatctctgtccagggagcaaggaatccgttgggtggtcgaatgactgccagaccggtaagttgttgtgattatacagcaccaggttgccggactctgtgagggtcattcctgcaacagactggccggaagtgttggtagaccagacaaggctgccatccggatgctgaagaaccaggtccccctcagccgtgaagcttagggtggagttctgccggatcaactggtccctgttggccgaccatacatctgccacgggttctgggcgccaagaggtcatgtctgcaaattcaccggcgtcagtaacagtgtagactccaaagatgtaggtgttaaccagggggg

SEQ ID NO: 11964 - DNA, 567 bp, Oryza sativa
tgtagatcccaattttagaaaaattgagagacttgaaccaactaaatctgagctaagatgaattagttattaatttttaaagattaaatcggattaaatcatttatatagattttaattcgattatgacgcaataaagaattatttttgaaaaggaaaaaggatttattgcgtcagcggggctcgggttcacggtggaccgggtgcacagaagcggtctacggaacgaacggctgagatctaatctaaacaaaacgaacggccaagatctaaccgatctaccacgggtctacggctgacgtggtgctgacgtcgatgatgacgtcattgccgacggcggctcggcacctcatgctcgccggcgaacgacggcgcggcggcgcaaacggacaacacctacgggtagagggcgacgcggcgaactcaccgagggctctgacgatgacggacgacaaccgacagcgacggcggcgaggtcgaggcggcgaagacgttcgggtcgacggcgacggcggtgctccggtgacctttggcggaaacggaggacgggacgaggacggctacgact

SEQ ID NO: 11965 - DNA, 1729 bp, Oryza sativa
  unsure (1)..(1729): unsure at all n locations
tcaagcaggaggatgaggaaggcagggggcttctccagagggctgcnnagctgctggagaaatgagggcccnnaccgcgcaccgnnccgtcnnttcggtttnnccgcgaggcctggcgcgccctccctcgccgtcgccgctacgccgcgccggtcaggccatctccgttggagattgagggggggggggggggggcatttttctttcccttgatcaatgtggtgtaaatatgtaggagagttcagagtgtttcaggttttcagttcatgtgatccatccatggattggcataacttgatgtgttctcttcctttgtgctgtaaatacaattgagccgcttaaattgccaggttgcattgtgttggtttttctctttgatcctttcttggccggaatagcttcagataagaatgcagaggtcacatcagcaagcaaagcggatgaagcaaagagggaggattagccactcaaactttgtataatccatagacagcagattggaccagaaaacatggattatgtcatgctaaccattggatggatgacaaaccgatgaatcgtgtcattccagtaaacaacaaagtgaatattttttccttggtgttgccgacaaggtagactagtgaaagatcccatctaccagattagaagtcagcatcaacattggagaagaaaaatcatactagcaattactactacctgataaagaaaactattgccgttaaaggacatccaagacttgggataatatagactaaactacgtaacttctacggatgatgatgagtcataaaatcccaggatttacttttgtttgggaagcttaacacgacaatctcaagagcagcagcaccaaaaaaaagaaaaaaaaaacctagggttgcaaatcccagataatcactacacaccacagttgcgtcttcttcaaacttctagaggcagagtttgtttttgcaaacctaagcagaaagttctctgcttccaggagtactacagctcaatcgggctaacctatcataacgataatcttgcaacagatgcttatagagcagttgtgacaaaatggctgccaccaccgttaggtctgcagcgatcagtcggtcttcattgcctcagcatgataagtttccaggtctttgtccagctcatctgcagtcttcccagcttgcctccttccgcgaccacggccctggaattgaccacggcccctgacactgccagtgccacggccctggaactgggactggaatggggcacgacccctgccacggcctcggccccggccagcttggaaggcaccacggttatatctattactggaatggcaagttcaggtgacagatcagcaaaaagatcaataaagtttcaacacatttgtggtgtttttcagtttggttgtgtcaactagggaaaaacacaagcaagatgaaattgtcaccaaccaccgccaaaagtgagaataactagtagaaaacaaccttattttcttctttgtatgtcacaaatgcatacagtatccatgactaaactaggaaaaattgtagtatagcaggaacaggtggaaacatgattaatttatgctagacatgtagtataaaatgtaaacctgaaactctgcacattacatgcttcttattaaaaacaaaaagaaattggttacaataataaccaaatggcagttgctttactgtagatcatgatgcttttaaaataaccagggtaccgagct

SEQ ID NO: 11966 - DNA, 744 bp, Oryza sativa
gagatacatagaaatggaaggattactcacgtcataacaactgttcttgtaggtctgccattagaagccccacccacatttatgcgaggtgtcataggcaaacctaagtcacttccaataacttctatcttcatagctttaccatcaagcagaacattattgtaacgtttcaatgcagcaattgcatcacttctcctagtaaacaccacttctgctgtgccctgcagaaatttaacaaaaaaagatattagcacaataatcgaggcaagaggcagttagcaaaagtttcagtgatcacaaaagttcatttatcattttctttttgcagaataagcaccgcaaatggacactgtttacatgctgttaatttgctaggccagctaattagtacataagattgtgtatatataaatttttttgaccagaaaacagagagggaggtccccacgctatatatagtacataattattacaacaaatacatgtattttgcaaatgtactctaagcagatcaccattttatggagtttcaaccagaaaagctcagcaaagttcaatgtgtgaaagaataagaaagacataatccctacatatatattactaaaaacaaacatttcctatgtttgtcttcttgctgttatctcaaacgcaagataatcactaagatacatattatcctattgttgttttattgttcttggtaaatctaatgcaaggcataaatctgtgcactggaagttttca

SEQ ID NO: 11967 - DNA, 10937 bp, Oryza sativa
tcccattttcgtcccttgaccgcaaaaccgggtacgacccgtcccccaacttacgaaaatcaggcaaacaaggtccctccgcggttttggctgatgtggcgcctacgtggcttgtttgaccaggtctctgtccgacgtggcattgacgtggcgcttacgtggaaattcaactcgaaaaataaataaaccttatgggacccacatgtcagtttcacacagaaattataaaaaaggtggggcccacgtgggcctcacatgtcattctctcccctttccctccaccggccttcgccgcccgcgcccgccggcggttaccgacgacgcgactccatccgccgccgcagcccagcgaccggcggcgtcgcctgcctccctgacctgccacggccacgagttagtgcaagcgcacccgccgtcccgccgctcccgccggtaaggaggttcccctgttgccatgctgtatcgaagagaaccagcaatgcttcctccctgctccccgtgccggccattgcgacggtctcctcttcttccctcttgctgcctcctctctcctggtccttattcttcacgatctccgtgtccttcatggcattcgtgatctctgcagctggcgtctccactcgctgtacatcctccacgcagaccacgccgcattcttggccacctgatacgtcggcgcgtttcgccggactcgctgcctctcctttgccgtcaacgggagccttgtcgccatgcacggtaacggtgttgccaccgccaccgccgccgtcatccgccgtgacgacctccaagttcttgagttccttccgagcccataggagtagctcatacgcatatacatcgggtatagacggccgcatgcatatgcgtcttcgtacgagcatatatatgcatgcatggagacgaccagctatagcttctagctagcttcttattggtttgccgccaacaacatgcagacgtatatattagccaagcatgtgtatatggcttagcacactcacatgtatatatgccattacatgcatgactcatgcatgagtcatatttaattcattagcttgcttagcacattagcgttgttagctagctaatttacctgcttcctgcaaccagccactaacacaaagtatgcgagcgtggcggaggagcggcggcgggcgagcgcagcagtgggcaaagcagcggagggcgagcgcggccgcgggcagagcagcggagggcgagctaggcgaagaggaagacagtggatgggatggggagctcccccgtgctcgccggccaccaccgccgtgccccagcgggtgccccacggcgccggcgacgaaggcctcgaggccgtcgatcgcgtcgtgagcttgccgggcagggactcgatgaggaggacgaggtcgtcggccctgccgaggacgcgctcggtggccgggaagagcaccgccgcgatgtcctggatgacgaggagctgcttgtccgtgaaggccagcgtggggcccaccagatgtccctaaagacggtgtgaaactgacatgtggggctcacgtggaccccaccttttttataatttctgtgtgaaactgacatgtgggtcccacaaggtttatttatttttttgggttgaattgccacgtaaacgccacgtcaatgccacgtgggacggagacctagtcaaacaagccacgtaggcgccatgtcagccaaaaccgccttcaaaaccaccgagggacctcgtttgtccggttttcaaaagttgggggactggttttgtggtcaagggacgaaaatcagactgggcgacaaatagaggaacccaaagtgaacttattccacagtattttcttcatttgggccagagactagtggacctttttcttgacttgtctgggccaaagcccatgcctgacttgacttcatggtgtaaggggccgatttttgtggatgcttattctaaacagaataatttgtcttttggagttaaatatgaaaccaaagcatcaaatatggatcattatcagcaaaataatcatttgagaattttgcaattttctcatgattagtaaggtgaccaacatctgtggctactctattcctaaaattaggagcgcctctttgcactaaaatggctattatttggtagagatatttccatcagaaaaatattactcccttaataatactcgttatttcagataagaacatgttttaaaaaggaaactttaacaattattttctatataaaaatatcaacaaatttataattttattatattagtttctaagattaatctatgcctataacctacggttcatatttatgaagtcttgttcggttaacaatcaaactagtgggtttgaaaaagattgaggagcataattccacgttataataggtgtggaataaatcattttaaaatatctcttaactcttttatgagagggattaactgaacaaggtgcaataaagcaaatattttgaaaattattcatagttcaaaactaaaaatatactccctccgtttcgaaatgtttgacgccgttgacttttttaaacatgtttgactgttcgtcttattcaaaaaatttaagtaattattaattcttttcctattatttgattcattgttaaatatatttttatgtaggcatataattttacatatttcaaaaaaaaaattgaataagacgaacggtcaaatatacttaaaaaaatcaacggtgtcaaacatttcaaaacggagggagtataatatgtgactataaaaatggtcaccatatccggattgggcttaaacccgatggcggccgcgggggaggggggcacggcttgcttcccatcgagggcgccgagctcgctgccctgtacgaccacgcagcggcgatgaccggcagagatggcggttgattcttcagtggcgcggctggccgaactgggttggtgctcattggggccagcttgggttcgttaggtgatacgtcccacgtcagcaacaacagtcccggactcggactgggttggtgctcggtggccggactgggtggtgatggaggaggggttataacggtattgcggctgagggaggtgacacgatcgggggcaagagttgagggaggcaatgtagacttattcctgaagatgaagtctaggcccataggggaatcggctttaaaggccagaggagccgaccagtccagcagtctccactccaatccccaccacgccgccatccatggccagcggttgggatagaccccggcgagcggcgagaacggtgaccacccgctttccctcgtcctccaaacttgctgttgtactatgaatcggattcggagatcgatcgagttgcattgagtgtcggatcggaggagttggctatagaaaatcggaggagttttgttctagcggggagggaggcgacgacggcggaggaagaggggatggacgtacaaggcaagcgcaaggcggatggaaaaccatcttttagtgtcaggttttctctaataggcactgatgatgggggacactgatgtgttattttgtcgtagtgttaataagcacctccaaaacaacaaagtccaccggccaggcctgtaggccctatctagcttctcctgcgttcccatacactactagaaaactcattttcggcgtcgtaggggatctatttttgcaggcgggtatgttattcggagccaaaaccccgccgacaaaaaaagtacccggggtagagggggcggtccgcctgaaaagatgcccctatatagtcttcttcctccccgagccctgttcattctccccgaagtttctctctcctaaagtgacttaaatataggggggaggttttgaacttcaaatcttcgggggatttttctacggtgcttagatctactcatttccacactaggtatgtaattttttaagcttttagaccttaatttgtgatggatttatgcatgcaaaattgtgaaggaagagctccatgttttttaattttatttcttttgatatgttgatgttagatgtatgtgtaatacttgatgcctcttgttgtagtggtttaatgtggtaacataaattctcatttttttatttttgttatcacatccacctcttagttctagatctagatctagatcttgtcatatatagagagagaataaaatttttaatgtctatttattcggtgcaatcaaaaaatagttatagtattttgtaatatgccgatgatatgattttgttagcttttcctaatgtactaatttggcatgtctgtgtaaaaaaaattgaaataaactttgtttttttattaatttacaattaaccttttgttaattagttttgaatagcgataagttttttcaataaaccctacaaatttggtattaattgtgcaaatattttatgtgcatttttttagagatatggaaagttaggaatggatgtatcattggccgaggtttttgtctccatatagaaatgaagtgtctaaatttattggtattgccaaggcacacgctgagaagtataatatgaggaagataatttgtccatgtgctgactgtaagaataaaatagcctgggacttcgatgatgcttttaaagtgaaggagcacttagtaactcgtggatttatggacaagtacgaaatatggacacgtcatggcgaagaacaagtggacgggcctgaaaatgtagatccgatacaagttgaagacatggtgcatgacgatggttttgttgaggacaaaatcgacctagaggaaatgttacgtcatgcagaacccgaggtgctgatggggtcagctagaggtttaaataactttgaagctttacaggaagctaaggaagttttgtacgatgagtcgaagggctgtgacagtgagttcacaacactacggtcagttcttgaacttatgaggttaaaggcgagacatggatggtctaataccagtttcgacagtctgttagaacttctgcagaaaatgctcccgaggtctaactcactaccatccattcacttggtgtggaaaagattcatgcgtgcgtaaatcactgcatagtgtacaggaaagagtacgcttctttagatgaatgtccaacatgcggtgctagccggtacaaatcgaatagcaatactggcctagaaccgtctgacacaactgagggaagacaaagaaaaatctcgcagcttgtgatgtagtaccttcctgtcaaagaccgtattaaacgggtatactctaacccatgagatgcggaactaatgcgctggcacgaagaagggcgcaagaaggatgggatgattcgacacccggcagatgctcgttagtggataaactttgatgctcagtatagagagtttgctaaagacccacggaacattagatttgccatgagtactgatggagttaatccttttggagatataagcagctcacatagtacttggccagtgcttctcaccatgtataatcttcctacctggctttgttaaaagcgaaaatacgtactactctgtatcctcatacagggacctcgtcagcctggtattgatattgacgtatttcttgaactattattagaagatatggctgatttatggaaagagggattgaaagtgtgggacgagtacttaagggaatacttcacagtgaaggccatcatgttcgtgaccattaacgattatccagcaatgttttcagtttcaggtcaaattaaaggtaaaacaggatttatgatctgcttgaatggaacgtactataggtatctcccgggttccaacaagcttgtgtacatgcggcaccggcggttcctatgcacaaatcacaagtaccgcaagatgaaggcggagttcgatggcactgaagagactgatcctacaccaaaaccaacatcgggagaaaaggtgtgtgcaatgatagagaaaattgtttgcgagtttggaaaagtgactaagaaaccatcaaaggggacaaagcgcaagaaacccgagaagaatacgaaacaaggggatagtaagaagcaagatgatagttcgaagccagatgataaactccctcccccattcaagaagcattccatattttttaagtacctcccatactgaaaagatctggaggttcggcatgccatagacgtcatgtatctagagaagaatgtatttgaaaacatagttggaacattgtcggacatgctgaacaagactaaagatggtctgcaatcaaggatggacctagtcgagatggaaatcagggaagagttacaccctcaagaaggagaaaagaatggcaaagtatatcttccaccagtctgtttcacactgacacctgaggagagaagtcattttgcaactcactccgtgatgtcagagtgcccataggtttctcatcaaacatcagtcgactagtttcaatgaaagatttatcggtatctggttataattcacatgattgtcatgtcttgctcaccgtgtttcttgcaatggcaataagggccataaaaccggagcatttaaaggttgctatcacaaggttgtgctacttttgcaacgcagtgtcatagaaggtcattagtcttgaagagttacgaaatcttcgtacattcgcacatgagacacagtgccaacttgagatgtgtttccctccgtcactttttgatacgatggagcacctcatttttcacatagtgccgcagatgggtgcgcttggcccattgtacctccatcaaatgtggtcatacgagcgttacatgacagttttgaagggttacgtccgaaatcgtgcacatccagagggatcaatggttgagggttatagtactgaagaggttgtccagtgctgtatcgattacctcaaagatggatatgcaattggagtacctgtgccccgacacgagggtagattgagtggcaggggaacgataggaaagaagagattcgtcacctatgatcacaaatcattccaagaagctcacttcagcgtgcttcatcagtttgctatcgttgagccgtacatcgatcaacatatcgaactaatacgagctaacaataagggtcacaccaccgagtggataatgaaagaacacaagcgtctcttcatagattggttgcgagacctagacttacctgagggacaaactactgatgaaataactatgaagcggttggcttgtggtccatcaactacagtaaattcttggcagggatatgacattaatggatactcgtttagtacaagagcccgagataataagatctgtacgcaaaacagcggtgtccgtgtggaggcaattgatgaagccgaggaaaaacaatcatacttcgggtttattgaagaaatatgggaaatcgactatgggcacacagtgcaattccccatatttaagtgccagtgggtaaaatacccaaacggggtcaatgttgataagttcggtcttactattgttgacctggcgagtgtgggtcacaaggatgacccttgggtactcgccaatcgcgtggcacaagtgttttacgtgaaagacccatcaaatttgaagaaagatatagtgctacccgggaaacaaaagatattgggagtggatggggttgaagatgtcgaagattacaatcaatacgatagtatgccactttatagtcagtttgtacagaagattaagaatgtcgagacatctactcagaagatcgtgaagccttacatgcgcacggacggtgtgggaaaaaaatgttaaagggtaaagattgttgagtcgcatgtaagcatctaagaaattagtagttatgtaatggtggtatgtaaggtgatgtgtgatcatatcgcaaattgatgaacaattgcacgcaacattttgcatattagtttgtattaattttatgtgcaattaccatttgtaaggtaacatttatagttttttattttttaaaattttttaaaagaggtttaaaaatttagtagcattttgttatgttcactaaccattgtttgaaaacttattttaaaaagtttgaaacatttaagtaatatttacatttgaaaagtagtaatactaaggtttatctatttgtatgtacaattaccatttttattacaactattgtagacattttcaaatcatagaaatgattttaaaataattatgaaatagaaagggtcagttctgcaaaaatctgtccgcctgcgaagattattatgccgagtagggtctacatcttcgcaggccgaccgatagtaaaaatgatcttcacaggtggaccgcccgcttgcgaagatcgtttccctatataagggcaagcccgccgcaccaaaatttctaagttcaaacggcaaccctagaaattttggcgctgtaaggtgccaaattttttcgccaccgcacgcctccgccgtcctccgccgccgcctgcttgtgaccttcaccctccgaccatcgtcctcctctgccgacgaccgtcgtcctccacgcgccgccggccttcgagctcgcgccggccgcgcgctctacccctgtcacgcccggaaattcactagtgatttccgaacttatttgtgcataaaatcctcgtccagaaatcagccgaggtacacaaactgacaatttaatatacaaatccatcataataataacgttacatacttacaaaagaaaagaaaacagcagcggaataacggtctagcgatggcttcagctccactcccacagacagctcaactggggtataagccaaacgtcttctctttctggatcctttttctgcaactgaggttgattgattattgcaagaatgagcatatgacatacttaacaagccacacagcaaatatgcaagtgcacaaggataccaaaggatggcataatatagtctcatttgcgaaagcagcatttagtaaagatttaagagtagtgaaacagtagagtaattaatcaaaaattttaatcaacactgaacagcacacccatgctgctcaggctcaaccatcctgaacaaccatacccggctgtacagatctaagctaaacaaattattaccagttattgcatcaataattatttgtgagaggtgtgagactaattacgaaaaacattgctcaacccgcccatgaccgcgggcacggctattcgaatagttttactctggccagagatgtaccgctgtacccacaagacacgattccacacatgttgccatgccccgaagtaccaccacagcactgcaaagggggaaatcgtgacaataccctttgcacaatacaactcaccacagtgcaccattcctggatcataatcaccccctctataaatataactagaggcatggactccccagcgatccccacggacttctcgccgcttctcagtctggcaccccataatgaaccatgttatataaaaggtaaagccgttgcccacgctggcttgtggttagcacggttaatgtttcacaacagtagctcgtgaaccggtccttaattatcatgagcacgaccttcaaaaccatgtgctcacaacccaccttaatccagttttaattatctaatattaacataacacgattaaccatcgtgagctaccattaaatataaccataattaataatataatatgattcatcccattatatagcatttagctgaaccaaaccaatatataaggttctagctaatcaaattataacccataggaaaataaagttatcttcggccattaattaattgggaaagactcaccacccgatgacattcgaaaataatgcataagttgaaataaaacattagttttaaacgggttcaacatgctcaaagggttgtttgggatctgtgtgacttgccttgagcttccgcaaaggcttccgaaccttcctcaacgaaaacgctctcctccggaacgtcggaaactaaagcaaatgaacgaaatcaacaaaacagcacaaaaacaagcataaacagtacatgtggatatttttaacaggtagatctcgattttagatgaatttagcaacttgaaccactcgaatccgagttacgatgatttagttatgaatttccgaagttaatcgatttgcatctaataaagaaaactaaaaaaagggaatatgacgtcatcgctgacatcatcgccggccatggcactgctccacacgaccaccggcaatagagagctcggccgggctaacggaggacgtctacgcgtagaggacgacgacgcgaactcaccggtgcaagaaactacgacggacgacgatgaacggcggccggcggcgaggtcctaaggcggcgcggctcgggtcaacgtcgacggcggcgctccggcggtcttcggcggctgcgaaggggcggccgggatgctcctcctccgttcgcacccaacggcggcgaaaagaggcgtcggcgacggcgctggcggcggcgcgacgcggctgcacgacggtcggcggcggcggcgactaagacgatgcggcggcggcgctacgagcgacgagggaactcgggagttggggcaaacgaaagaggacgccaaggggatgctatttataggcttggattgaagagatcggactccaaccgcgagaaatcaagccgggaaaaactagggttagtttggagagataaactcaaaacgaattcgatgtggtttatccgggcaaaattgatctccgaaatcttaggggaaaggaagaggataaggaggagatgattttccctcaagcaatcggactcaagggcgaccgattgaggcggatttggcggagagaggcggcggctcgggcttggcagccggccggctggaggaagaagaaggtactgtagcgaggggatgtaaaacagacttctcctgggcttccttttttcttgcttgggccggctgagagagagggacatcaaacagacttgcgcagagaagaggggaggcgctggatcgggctaagggagagagaggtgggccaaattaa

SEQ ID NO: 11968 - DNA, 4751 bp, Oryza sativa
aataatcgaggatttaggtgcactaatatgtgtacatatgtatatattagaaatatacttgtttttcgataaaaaagttgggtattcccgggaatacccgggaatcatggtagctccgcccatgaacccatgctactaactcagttgttacgtcaaccaaaatcaggagagatattgcctaaggatccaatatgatttggttttgcaagattagtaatgtgttatatatgttactcccttcgtttcacaatataagtcattttagcatttcccacattcatattgatgctaatgaatctagatttactccctccgtttcacaatgtaagttattctagcatttcctagatttatattgatgctaatgaatctagacatatatatctatctagattcattagtattaatatgaatgtggaaaatactaaaatgacttacattgtgaaacggaggaagaatttcggtttagcgatgattctaaaactaaacacttttccataagacgagggaccccgagtgaacattttccttagccgctcgcagggtccagctggggcgcgggagcgcgagacgcaagcccgcaacgctggcgtgctcgcgtgaactgggtcccgcaccgatttattgggtcgacgcacaaattggcatcgttttagctggcttcgttgtagatcctataataacgatacatcattaattcgatcatcccttggatgcggcctgcggcttacattaaatctcgatccaaagaagcaaagatgatgacagacagaaattaattaagctagaaatctcctcgatcgatcacacacacacacacaattaaggtacatacatacatgcactgctgcaactgcaactgcagggtcggtgcgtggctactacaagtgtacacatggtacgttggttggcaccatctcgatcgtgtcgttgtgctcacttgccggggacgaagttggtggcgtatgcccaggcgttgttggcgacggggtcggcgacgtggtcgaagaggttctcgatggggcccttgccggtgacgatggcctggacgaagaagccgaacatggagaacatggcgaggcggccgttcttgagctccttcaccttgagctcggcgaaggtgtcagggtcgtcggcgaggccgagcgggtcgaaggcgccgcctgggtacaccttgtcgaggccctcgccgagcgggccgccgccgacgcggtagccctcgacgaatcccatgagcaccacctggaccgcccagatggcgaggatgctctgcgcgtgcaccaggttggggttccccaggtagtcgagccccccctcggagaagatctgcgcgccggccttgaaccacaccgcctccccgaacttcaccccgttcttggacaggatctccgggaagacgcagcccagcgcccccagcatcgcccaccgcgagtggatcacctccagctccctgttcctcgcgaacgtctccgggtcggccgatagccccgccgtgtcccacccgtagtctcccgggaactctccggtcaggtacgatggcgtctgctccgagaacgggcccaggtacttgggacggtcaggtccatacctgcacatatatatacttgtatgttagcaattgcagtgtacatatatacagtacttatgtttgtatatacatgcatgtacgctacgtaccagatgctctggggcgcgctcttgacggtgcggcgcatggtgatgcggccaccggagtcgccgacgcggcggacgagctcatcccggcgaggggcggtgccgagaaagctggtggtctggtgcagcgccgacgcggccatcgttctaacgagggcgatgcggcggcggttgggttggttttttgtggtgtgtggtggagatgggcggcgcggaaggggagatctttatacggcgtacgagtggcggagcggtggactggtgaacgcgcggcgcgccacgtccgcgccacacaattggccgccgcgcccccgcgactggatatgggtatggcgcggaatctcctccccgtccactccaccaatccgctgatgccacctggacggaaagatctcgtctcctgcatccaacactatctgcacccaccaaccaactcacctagctagaagtagcttgctgctgaagtgctgatggtctaccggaaacaaaaaattgtacagctagctcagcatataaaaattaacttgttcatcagtgaattcacttggaaaaagttacttgttctttttgcaacacgatgaatcagactatcgccatagccaaagggtggcatttcttgcattcaaaatgatatgttaattacttcgtaggactaccttgccactaactatggtttgatgtgggcccactagtgacaaattggtgactgaaagacatgatgaaaactctttcaattaagacataatacatttttattaatggacgctagaaataacaaattgttacaaatacggtcttttctttttggaattaatatttttcatgtaatttatcatgttgtcaaacatgctatattttaagtcatatatattgagagaatttgctccatgtcactgagtttatcatagtttaacgatttgctatttgctattgacattatctttttttcataatataccagtgagtatatcaattgttctaaaatatgtcattaggctgattttttcttcaaaattaccaaaaatatccttacaaatgtacaaggttaacaataggtttatccatttagaagtttccaaaaaattatgaaacatttgtgtagtatctttacacaatataaaagtttctgtataggttttaaaatttctacattctgtttttcaaatataattcatccattatatgctatacataatactttcaaattgttgtttttaatgcaaataatatttcatatccaacacaaaatatttttaactacttttctaaaaacatgaaacttgtgcgcaaacttccaagttgtgtaaggaggctaaataaaaaatgatatattttttaaacttccaatgggataaatcaattcttaacattgtatgtgtataatagtgttttttttttctaaaaaaaaggcttagctcaatgacatattgtggaacaatgtcacatcacatttttcgtgttttctaatttgcttgatttgaaaattttacattcatatttattcgcctaaaatagcttaataaaaatttcataaatgaaaagggtttaatttgactaaataaattattaattatgccacacttttattttatcatttgttgattggagttatttgatttttatttgccttttggaagtggagctaaattcctaaaatctcataaaattgctaatccagaaaatttccccaacattcttaaaatgtccaaaattccaaatccttcaaatttagacttttctaaaaaaagttcctgttcttttctttttcctctctttctcctttttctttctttcttcgtcccgttgcctgctgtttatctgtcacgatatctcctcctatccctcgatctgtttctgctcatgggccagcatccaatgcccttcctatcccgtgaaggaataagttcactttgactcccttaaaagtgacctgaatctaattcatcaacctaaactacaaaaccggatatctcgaccaccgaactattgaaaccggtgcaatttgattccctaggcggttttattgacgtggcgcctatgtggcagtattgcccgggtcttctttacacgtggcgttaacgtggcgcttaagtggcattagaattaaaaaagtacgtgggaccaatttgtcaattacacaaaaaaaattgcgggacccactgacaggtagggcccacatgtcagtttatcccttcacccatctctctctgtctctcatttcgagcttgacacggcaaggctatcggcgccggcgccggctgcctcaatggcgtccactagagcaccctcgctgagctccgtcccgctgccatcatcaccagtcgcagtcccttgcgagcaagaaaaggagattggggagagagagagagagagagagagagagagtccctcaccgttgatggggtggctgagaaggcaatgggcgcgtgccgaagtggcggtggtggtggacggtggccggcgtatgggcgggcactggagcagcaccaggcgagggccacgatggcggcggcgggcttgagggcgggcgttggagtggcggcgacgacaggctggcgagggccgaacaactctccatggccacccctcttgtggacctcggtgtccgcgctgctcgatgccgccgccgctccaggtctaggggtgcccaccaccaccgttggtcgatcgcctcgccctttcgttcccctcagattcacttgccgtggtggcgccatatcgaagatggaagaggaggcgacgctgctagagaaacggagaagcctggatgccttgcgtcgccacctagctcttttcccctaccggctactgctcaccgccgctgccgagggaagtaaaggtgggagaaagagataaataagggagagaggaggaggacgaggggcggcatctctggagccacgccggttgcatttggggcagtgccgccactaccaatcgctctcgttggccgccaccgaaggggagagaaagagaaagaaagagagaagggaggaagaagggaggaagcagaaagagaggatgacatgtggggcccatatgtcagtggaccccacaaaatttatgtgtgtgaatga

SEQ ID NO: 11969 - DNA, 3358 bp, Oryza sativa
gactttgaggtattaaacctctcagctcttgcttggtcctcaaacatgttacgtagtcccgtgattattggatgagcatccaatgcctcatattgcctttgaagctcatgggacatagtagcaagcatgagacagcttatatcaaggtattccttgcatcgcctttcatgctccctacgttgagcagcaggagcattgttgggcaagtcagctggaaaaggctgtgtaagcacaaactctttgtgctcttgcctgagaacaattctcaggttgcgataccaatccatgatgtttgttctagtcaacttctctttctcaagaatataccgcaagttaaaattggatggtgcaggaactgctatgatgtacaatagaaatatatgtatgcaaaatcagcaccatgtttacatttaacctttcattaaacaatttaacaaaagatactcccactatgtattgtgaaacaaaattccctctagtaacatagtgagtcaagatcctcattttattagtgtctattgagctttggcatcacagctagacaactatcaaaataggtaagcaacaccttgctaatcacatcatatgtgactcttgtgctgttggggtgacatctccatatccaacccaacctatgccccaaggttcaaaactgttttgataaccttgtcaagtaaaccaataatctccgcatatagatgtccgacatctatcctattttatcatgataaaaagtgacactttgctatggcaaacccatcacttatgatcacaaccgtaataagtgcaattattagaagagcataaattatacttaattttttttgagggaatatatcctaccatgtcatatcaaatatataacaacaataaagtaagatagatataaaaaccccaagcgaaatctaaggggcaacgcacacggcgccctgaaaaggtcacggggtacatagatctcatctacgattcgccatgtgaaaaccttaacggcgtaaacaaattatgccgaaaccgagtcaatctcattggctcgtttttctcattggcgtgcggttccagtggacatcggactatccgatgaacacaatcgcgctcgtccttggtgagtactagacattccagtaaagtcaccaacacacataccgattgatctcatcaacccatgcggctatcggttcatctcatgttccgatcacctaagaactcatatacaacataatagatctcatctactacatccgcatatcaattatatgcaatgatctagatcatcaactatacaaggcggctctgataccactgttggaatacgcgtaggctacgatagcataaatcaaaattttctacctcgtaaaccaggaaccatgcaagtattagatcatagatcgttatcactcgacgcgctgtcaagcggaagaagacgctgagaagtcgaaggaactctcgcgaagtagcgcgcgtcgatgtagaggaaatagtcgatcgcaccggctcgaccttctcctcctcgtgcgttctgctcgccgtactcccacgccgatcagcactgcaaaccagcggcacctctaccggtatccacacgtacagggatggaacgccacgcgcagatgtgctagcacccgcgcgcggctagggttttgctcggggagggaagtgacggctagggtttctcacgtgatacaatgcctccgccagtcacacccctcacgaatatataggatccatcactcgggcctccaaggcccgtaggactcctattcggatccctatccgaattaagctcatattgcatttatatccaatccccttattccggcccattaagcgtgcgaccctgtaggttcatatatactcggctataacccgaaaactccttttcggtcgacgcgtcaacagcggcccctagcagaacgtattgactcaccgggcatacataaaaatcatatcggctgaacctctagtgtatacttgtatgaacccctttgcctcacgatattgattaagctcaaggctagatatgtgccattctctaatagctcaatcattcacttgaacctattgatagattatataacttatgattgactcctcaatcacctttggcatggccatgcactaccataaactacaacatcaaggggcccagagatatctcttcataggaggggcaaatcccatcttgattattcatatcccaatacatgtttcatagcatacccgaaaactacttttataactacccaattacggagtagcgtttagtagtccctaagtaagctactacacatgttgagaaccatgataatgtcaggtctaaggattcaacaccaacactcaatgagatcactgatgacacaacacatatggctcttgcagtgtctcatgttgggtatatccaacaacatgttcactaacatgtgtccacattattaatttgatatctctatagcataatccaagagacatgatcatcaattaatacatgtgttgatcatataaacatatttgttccacatatgatatttgatcagggatcctttagaaatagtaacaaacaacataaagagtctcatgaaagaatcacatattcattaaccaataaggagttatctatttcaaggaacaatgtcggataaatatgtaaacatagtatgtgatacaatcatctctatgattacctctagggcatatcattaacaataccacagggtgaggcggcagccatgggacactcatagcagctatattccttattttcacctactcaagcagcaccagcaaaaaaaatcctcacctcggccagccgcagcacctccacacaccagcaagcaacaacaccggccagctgcaacaccacacaccaacaagcttttcaagcagcaaggaaaaatcaacagcaagcagccgcgccttttctacaccttcttctccccacacgccatcgctgccttgcttcctcactagagcagttgcctccaccgtcaacacacttgcttcctcgccgggatctccacccctttacctcgtgctgagccgccacgcgcttgccccgagcaccgcctcggcagccggggccttctccgccgtgggctcctcctccgcgggcttcttcgccgccgggctcggatcaaccctagcaccgtcttccgtagtgtctccatcaatgccctcgtccgcatgggcgccgctgccgtaggccaccgccggctagggttcagccctcgctagctctgatagtcgcctacgatagagctcgtcggggcggccagcgggagaggaggcagcgcgcgccggccgacgagagggagggagagaagcggtggtgcgcgggcggaggcggccggcatgagggcgggag

SEQ ID NO: 11970 - DNA, 2129 bp, Oryza sativa
cgatcttttcgagcatgcggttgtgccgcacacccccctgaacgcgtagatcaccgcgtgtgcagggatgcatggtatggtgttgcggacttgacagaaccactgaatgtatgagcgaagtgactcatcatcccttcgctggactgcatgtaagtccgcttcttcacctgggcgcggatatgtgccttgaaagttcatggtgaactgttggcacaaatcctcccaagagtggacggacgcgggtggcaagttcattagccaaccccgtgcctgtcccttcagggccatgggaaagaaattcgccatgaccctgtcgtcacccccggcggcctcgatcccggtcgtgtagacctggagaaactcagcggggttgacgctcccgtcatatttttcggcgatggtgggccggaaccttgggggccaacggacgttccgaaggctcgccacaaaggctctacagccaacaccaccaaccgggggcacggagggctgatccccgcgtccgtgttgatgtgacactccggacgaggaggcgccctccgttgcgtgggcagcacgtcggccattacgccggcgctcgatactgatgcgggcatccggccccccacgcagatcttcctgggtcggaggcgctgacgaaggagtggcggccgaatggcgagcaaccaccgccgctcgccgcgccctccgccttgacgacacggagccggtggtagcagctccagaggtcttggtggcggaggactgcccaccagcacctaggcgctgccgtgccgtcatgaccaagttggccacgtcgtccagccaacattgggctggagactccgggtcagggacaacgggcgggtgacgtaggagcgcgcccgcagcttggagtgcgccctggggcgtgctgccgtcgccatagacgaggaggcgacgctccccatctcggcgccctcctccatcacccgtggatgtcgaagtcgcggatccttcgaccctctcgagcgcctcctcccgcctaggactttggcgtggagggggcggtggagtacgagctcgacggcgtgggtttggctccccgtcgtcaccgctaacactcggagagaggttgtgcgcctttgcttgttcagccattgggttgaacaggaaaagcttggcgcacacgaaagagtgcgagagcttagaagaacacacgcagaaccccctacctggcgcgccagatgacggagcgtggggctcctcaccgggagaccgcgcaggcccccctttgccggttcggccgggggccctgggtgagattctaagctctcggtgtgtggaaggttcgcgagaatggaaacacacaagacacgggcgatgtatacaggttcgggccgctgagaagcgtaataccctactcctgtgttttggtggatctatgtatgaagaagctacaaaagagctggagaaccagagagctcttactctctccctctctgatcgttctggatcccttccaaacaaaatctcccccttctaagtgggcaaggtcctccttttatacctcaaggggataccacatgcaccatctctctcttttttgtggggacttatcctatcttttcataaacagacggagacttgtatggttgccgtccgaatgaccttctgatgggacggcccatacctacctccacttccgccggaagcaggcgcgacgtgggaacatggctgtctgctgacgacatgaccagtgtcagaccggtcacaaatcggtcattcttgtccaccacgcgtcagtttatcaatctgcatgttcgcccctcttcatacaatgtcttgcttgtaatggttaggatgaagcctggtatatatctgaccgggaccaacgtgccatctccaggagctaacacgccggctccggctagggacgagtgcttggaggctctcatcctgacgggatggggcgaggcgtgcgtcagaccgcctgtcgtcacctaacccacgatctgatcggtctgtgactggtcacagaccggataaacgagtgcgctgcactgcgttacatgcggcgtgacgcgctcgtccaaaccgcaataaatgtggttaggtgagccccgctatgctcacctaccccatatacgcggcgcaaaacccacaagggg

SEQ ID NO: 11971 - DNA, 3857 bp, Oryza sativa
caacactgactgcgcacgaggccgcctgtgccgaagaggagtccgcgctccgcctccgcgaggacgcgctcaccgagcgggagcgagctctcgaggaggccgaggccgcggcgcaacggctggcggacggtctgtccctccgcgaggcagcgtgggaggagcaggcgcgccgtaatctggaaggtgcccgcgccgagagggccacgctgaactagcgggccgctgagctcgaggcgcgggagaaggagctggacgcgagggcgcgcagcggcggggcggccgcgggcgaaagcgacttaaccgcccgcctcacagctgccgaacacaccatcgccgatctgcagggcgcgctagactcgtccgccggggaggtcgaggccctccgcttggcaggcgaggtagggcccggcatgcttcgggacgccgtctcccgtctagactgcgccggccggcaggcgggcctctggggcgggcggactgcgaagtatgccgccaaccaggggggcctcgcccagcgcctctcggagatagccgggactctccaacggctccccgaggagctcgagaggacgattaagtcatcctcgagggacctcgcccgaggagtggtggagctcgtactggcgagttaccaagccagggatcccgacttctccccatggacggcgctggacgagttccctcccgggaccgaggacggtgcgcgcgcgcaggtccgggacgccgccgaccatatcgtccacagcttcgagggttcggcccctcggctcgcgttcgccctcaactccgacgaggaggacgatgacggcggagtgggcgacagtggcgacgaggctggcggcccgggtgcattggagtgagcccccaggcccccgccaatctttaaatagtttcttcttttcttcttccgaggccttcgggcccccttcttgtatagactaatttaatctgcaatcaaataaagaggaaattttttgtgtcaattctatttgttgtgtgtatgagacgaggatgtctgtgccacggtccttttgtgtcttggcttgaacaagggctcgtgcccaggtcctagtcctcaaatggctcgggtcggggctagtgcctggggagatccacatgtcgagactggccaggccgggagcgtggtgaccgagggttatgggtgacccgattgtgggtttttgtcgattcccccccggagttcaccacgccccggggcacggctcggttctgggccccgtttggcgattttagccgacccgagcccccgagggcaggattgaacacgagtgacctatttcaagtcaagatccttcaaaaggaaacaacagcacagatacagcctttaggaaatcgaaaatgcttttattgaaatacagatataagagaaataagaatatgcatatgtggtagcccccggccaaccctgcacgcccgaggggggtgcggggttggcccgagcccgaaacctgacacccgatccccctttaggggtagaagcgacgaaggtgttcgatgttccacgggttaggcagctctgtgccgtcgcccgtggccagccgaacggagcccggccgggggacgccgatcactcgatacggaccctcccacattggtgagagcttgctcaatccagcacgcgtttggacgcggcgtaggacgaggtcgtcgacgcagagtgatcgggcccggacatggcgctgatggtagcgccacaggctctgctggtagcgcgcggctcggagggccgcgcgccgccttcgctcttccaagtagtcgaggtcatctctgcgaagctgatcttgatcagcctcgcagtacatggtggcccgaggggacctcagggtgagctcggatgggagaaccgcttccgcgccgtagacgaggaagaaaggcgtttccccggttgctcggcttggcgtggttcggttcgcccagagcaccgctggcaactcctcgatccacgaatcgccgtgcttcttgaggatgttgaaggtcttggttttaaggcctctgaggatttccgcattggcgcgctccacttggccgttgcttctggggtgggcaggtgaggcgaagcaaagcttgatgcccatgtcttcgcagtaatcgccgaaaagttcactagtgaattgggtgccgttatccgtaataatacggttaggcactccaaaccgggctgtgatgcccttaatgaatttaagtgcggagtgcttatcgatcttgacgaccggataagcctcgggccacttagtgaacttgtcgatcgtgacatacagatactcaaacccgcccggggcccgcctaaaaggtcccaggatatcgagcccccagacagcaaatggccatgaaagtggtatgatctgcagggcctgggccggctgatggatttgcttggcgtggaattgacatgctctgcatcgccagaccaggtcgaccgcatcattgagagctgtcggccaatagaaaccttgtcgaaaggctttgccaaccaaggtgcgcgaggcggagtggggagagctgagatacgccttcaactgagtgagggcacgttcagcttcctccgtccaagtaaacggcccggagcgtttgaggagcttaaataagggtagcgccttctctcccagcctcgatatgaaccgacttagggcggccatgcaaccggtgacgcattgcacatccctaagcttgctgggggggcgcatccgctctatagctcgtatcttctcggggttggccttgatgcctcgggcaaagaccaaaatcccgagaagcttgcccgcaggtacaccgaacacgcacttatcggggttcagttttatgcgggcggagcggagactctcaaaagtttccgctagatccgagagtaaggtctcttggttgcgcgtctttacaaccaagtcatcgacatgagcctcaacattacgtcctatttggctacccaaagaaattcgagtagtacgttgaaaagtaggacctgcattctttaacccaaagggcattgtcgtataacaataagttcctatgggggtaatgaatgcagttttttcctcatcctccctagccatgcgaatctgatggtaaccagagtatgcatctagaaaacacaaaaggtcgcaccccgctgtggagtcgacaatctgatctatgcgaggcagggggtaagggtccttaggacatgccttgttaaggtcggtgtagtcgatgcacatccgaagcttgccgttcgccttgggaacgaccaccgggttcgccagccactccggatggatgacctcgcggatgaatccggcctccagaagtcgcgccacctcctcgcggatgaaggcttgacgttccggggcctgccgccgtactttctgccggaccggccttgcgcccgaccgcacggcgagacggtgctcaatcacctccctggggaccccaggcatatccgccggtctccatgcgaagacgtcagcgtttgcccgcaggaaagagacgagcgcgtcttcctatttgtcgtccagaagaccaccgatccgtgtggtcttggacgggccgtcgcccagggcaacctccttgaccgggacctcgtcgcatgtgactatccgctgcctcggggcggcggaggcggaggtgccaagcctctcgtcgcctccctcgggcttggacgcggcggtgaggtggtccgcgcgctgctccatacaagcaagcgcgactttaaggtcgccatggacaaagatggggcccccggggcccggcatcttcatctggaggtaggcgtaatggaccgccgccatgaacttcaccaacgcgggcctccccaggaccgcgttgtagggcagactgaggtccgccacatcgaagttcacccg

SEQ ID NO: 11972 - DNA, 3571 bp, Oryza sativa
ctgacgacatgaccagtgtcagaccggtcacaaatcagtcattcttgtccaccacgcgtcagtttatcaatctgcatgttcgcccctcttcatacaatgtcttgcttgtaatggttaggatgaagcctggtatatatctgaccgggaccaacgtgccatctccaggagctaacacgccggctccggctagggacgagtgcttggaggctctcatcctgacgggatggggcgaggcgtgcgtcagaccgcctgtcgtcacctaacccacgatctgatcggtctgtgactggtcacagaccggataaacgagtgcgctgcactgcgttacatgcggcgtgacgcgctcgtccaaaccgcaataaatgtggttaggtgagccccgctatgctcacctaccccatatacgcggcgcaaaacccacaaggggtcggggcgcctcggccctcggggccgagacgggagcggtccgacccctcggggagacaaagagaagggcggccgtatcaccctcgggcccgacccccccccccccgagggggttaggccacgtgggtgatcgtgtctgcctcaagtctctaagtcatgatactcccggtcccatgtcaccgacagtagcccccggcgttatgccagggcgatcgccctcctcgagggaagcggtcgggcgtgacgccacttcctaaggcctggtgacaggtggggccggtctaaaaatcgggacaagccggttcgtttttcttggagatatggtgatggcgcttcggtcggcgagcgtaattaatgcgcgcacgagatgttccatctcgactgccacagccgcatatccacctcatgcaccgcaaacgggcgaatgggattagtggaagcgtgggcgcgagaaacgagggggcaagatagtgggcgcgagaaatgaggagccgggcacagcgttggcaagggtataaagtcgccgaggaagagatttgcttccttcctctcgccattattccccttgtcttcgccgcttgcgccctaactccttgtttcctgtgccctaccttcgccacacgcgctcgctctcaaacatctcttcttccggcgtcatggcacggggctccgctccgcttgacggtagcgtgctgccgccttcccgcatcgtgaacgagagacaggccgggctgccgcgccgcttcatgccggaatctgccaccggccgggagatagtctcgctgggcgagggatgcccggcgccacgctacccggggcggtccgtcttcttcctcccttttgctatggcagggctggttccgccattttcttctttcttcatggatgttctggagttttacgatctccagatggcgcacctcacccccaacgcggtaatgacattggccatcttcgcgcacctgtgcgagatgttcatcggggtgcgcttatcccttcggctgttccggtggttcttcaccgtacagccggtgtcgccgccgtcggtggtcggtggttgctacctccagccgcgggcgccggtgctgaaccgctacattccctgcgtcctccgcaagaagtgggatgactggaagagcgactggttctacacccccctcgccgacgaagcgcgcctccgacttccgagccagcctccagcgcaggcctccaactggcgggcgccggtagatctgggagatggctacgacgccgtcctcgaccgcctggcgggcctgcgatcccaggggctcataggggccatggtgttcggcgactatcttcgtcgccggatcgcgccactccagcagcgcgcccggggcgcctgggagtacaccgggtccgaggactgtatgaggacccaccagggggtcagatgggattgggctcctgaggacttcaagatagtggtccaacgggtgctgaatctcagctccgtggaggcatctctcattcctcaaggagtcctccccctctgcagcgatccagaccgcgcctccatcctgaccatcatgcaggcggtcggggcgtcggaggagtgggctcctcgaggccacgatggcgtgggcgggagccgcaggggggaacaatctaccccgggagggggtcgtgcttccgggccccgcgacgggggcccggggagcggccgccctgccgacgcccgggggaagaggaaggaggaaggaacccctcccccatctcctccccgagggggcggggcggcgcgtgccagcagcaggcgcccggagggggccacgccgacgtcgcagcccgagggggagcggaagaagaaacggctccgcaagatggggggggacagaaccatcccggggaaacctcatttcccctctaaggtggtcgtttaaccgaccccctcgcaggttcgtcccactcccatcgtggccgtattcattctctcaatgcgagttttcactcatccatcttgtttgtcttctggtctttcttctgtttcagcgagatcccgtcgcgtccctcctgccattccaagtccggccagtctgaggccgaggactcgacgaccacagaggcccggaggcgggaatctgaccggcgagaagccgcggatcgccttcgggaagccgaggaggccgctcgggaggccgcccgggctcgccagaccgaggaagccgctcgggaggaggccggactccgccaggccgaggcgacgacatcctccgaggcgacccgtgaaactgactggcaagaggccgtggatcgccttcgagaagccgaggaagctgcccaggtggccgtccgagctcgccaagctgaagaagccgctcgggaggaggccagacttcgccaggccgaggcgacgacgacttccgaggcaactcgcgacgaggccgcgggcgcatcgcttgggcccactccctcgtgcgacgctcaggacaaaccaggtccgggggacatccccgggtccggcacgtccatcggcgggccaagccgcgcggcatcctcttcgaggcggctcttccccacgccttccgttgctccactgagcacagaaccccttctacaggccttggccgtcgcaaacaccacggtgttggacgggttaagtgcccaggtggaggccctgcaagcagagcgggcggagctcgacgccgcatgggcgcgtgtcgaagaggggcgacgctcggtggaggccatggtggaggtgggccgcaaggcacaccgccggcacgtctcagagctcgaagcccgtcggaaggtgctgggggagatcgccaaggaggtggaggaggagcgggggactgccctcatcgccaccaccgtgatgaacgaggcgcaggacaccctccgccttcaatacgggagctgggaggcggagctagggaagaagctcgacgccgcccggggggtccttgacgctgccgctgcccgagaacagcgggcggcggagaccgaggtggcatcccggcggcgcgaagaagcccttgaggcccgtgccatggcgctggaagagcgtgcctgcgccgtggagagggacctggcggatcgcgaggccgccgttgccatcggggaggcaacactgactgcgcacgaggccgcctggggtaccgagctcgaattcgccctatag

SEQ ID NO: 11973 - DNA, 10341 bp, Oryza sativa
atatcggagttagtttggtagacgtactgatgttaattcggttaatgtagtcctttaccaaactaaaaaacggagtgaacatatatagcgcgcggacaagcacttacaagaatgacggctttgacgtttgccatggtgagatcgccgccatcatcgttgttgtcaccttccttcgggatcctcagaagagtactcaacaggcactccctattgccatgcgtgccgccgtcgtcggcatgctcctggtgttgctcgatggcgcggcccaccatgtcgtacagcttggcgctcagcagcttcacgtcgcgcaccgcggatgtggcggcggtccggacggcgtgcagtgctcccccatgatggcgcgcagcgccaggtcggtcatcggcctaccgatcagccttcggacgttcaccggctcgccggagggtgcagcggcggcgacgacggcaccgacgaggcgggtgtcctgctcctcgcggatggggcggaacgagcgcacccgcttggcgctgagcagctcgagcgtgcagatcccgcggaggtggcgccacctcttgccgtacggcgcgaagaatagcccaccccgtcgccgaagttggcgctcacggcagtgctcatggcggcgtcgtgcgtcttgagcacctccctggcggcgtcgggggtggacgccaccacgacgcggagctcgctgaggcagaggtacatgaggggcgccaagtcatcgcaccgccgcacgaggtcggccagcgcgcggtgcaccacctaccggttcatggctacgataacataaatcaaaattttctatcgcgtaaaccagcaaccatgcaagtattagatcatagatcgttaccactcgacgcgttgcgcagcggaagaagacgctgagaagtcgaaggaactctcgcgaagtagcgcgcgtcgatgtagaggaagtagtcaatcgcaccggctcgaccttctcctcctcgtgcgttctcctcgccgtactcccacgccaatcagcaccgcaaactagcggcgcctctaccggtatccacacgtacagggacggaatgccacgcgcagatatgctagcacccgcgtgcagctagggttttgctcggggagggaagtgacggctagggtttctcacgtgatgcaatgcctccgccagtcacacccctcacgaatatatatgatccatcactcgggcctccaagacccgtaggactcctatttggatccctatccgaattaagctcatattggatctctatccaatccccttattccggcccattaagcgtgcgaccctataagttcatatatactcggctgtaacccgaaaactccatttcggtccacgcatcaacagcggcccctagcagaacatattgacccaccgggcatacataaagatcatattggctgaacctctagtgtatacttgtatgaacccctttgcctcacgatatcgattaagctcaaagctagatatgtgccatcctctaatagctcaatcattcactcgaacctgttgatagattatataacttatgattgactcctcaatcacctttggcatggccatgcacttccataatctacaacatcgaggggctcagagatatctctccataggaggggcaaatcccatcttgattattcatatcccactacatgtttcatagcatacccgaaaactacttttataactacccaattatggagtagcgtttagcagtccctaagtaagctactaaacatgttgagatccatgataatctcattgtctaaggattcaacaccaacactcaatgagatcactgatgacacaacacatatggctcttgcaatgtcttatgttgggtctatccaacaacatattcaccaacatgtgtccacattattaatttggtatctctataccatgatccatgagatatgatcattaattaatacatgtgctgatcatataaacatatttgttccacatatgatatttgatcagggatcctttagaaatagtaacaaacaacataaaaagtctcatgaaaaaatcacatattcattaaccaataaggagttatctatttcaagaaacaatgtcggataaatatgtaaacatagtatgtgatacaatcatctctatgattgcctctagggcatatcactaacagtggcagcctcagtccatccgtgctggcgttctcgcgacgacgacgtagtttcagcgaaactatgtggataccggccgggacaaggagcagcagcagtagcgtcaagttcaagctgcaactccataggagattgagctcatcagtacccgacttgtccatggctttttccaaatgcaaaccttttaattaacacaattaagctatgcacttgcgtggaattataaatgcatacctaagatgcatgcgataagttagtgttgtctgatttgatgcatgatatcccccttagggtatttataggaagcagctagctacctatacacgctttactttgggaattaaagcaacgctaattgggaaaactgctggatgttgcgcaggagacgagaaatctgacagctaatgaacgcatctttcgcgatgatttaaaagcaaagatcctaggcttggctgtccttaataagatacagattcgacaatgatcgaggttaacgtggttaaaggaaggtgatgttaattccaaattctttcatatcaaagcaaactcccgtaggagaaaaaacttcatccagaccctgcagtccccaaacggtttagcagtctcggcctaggataaggctgatactctttttcgcttctttttggataagctgggaactccatcacaaagacagtcttgcctcaattgggaagcactcaacttcacatccttcgatctagacgatcaagaagacgatatcacagaagaagaactaaaacaaacagtattctccatgccgtccgaaaagtcacccggccagatggtttcattggagctttttttaaaattgcttgggagataatcaaagacaatattttgctagctgctcaatccttcttggccacgaacacaaatcaactggaaaggctgaactcagccttcatatgcctcatcccgaagaaagaaggggcgactggcccagaacactgtctccttataagcctaatacacagcttcgcaaagatcttggctaaaatccttgcaaatagacttgctccgtgcctaaatgaattagtttctcaaaatcaaagtgcttttgtcagaaaaagggcaattcatgacaatttcctgttcgttcagaacctagtgcgtaccttacatagaagccatacagaaaccctctttctaaaagttgacatcaccaaggcttttgatacagtgggatggccatacttgcttgaagtacttcaaaggtacggttttggtaccagatggaggaattggatctcaaaccttctcgcaacctcctctcccaggttctacttaacggttcgccaggcactgcattgcagcatgccaaaggacttcggcaaggagatcctctatctccgctcctgtttattctcactatggagccgctgcacaaactctttcaagttgcggaagaggcctccctgctcactccaattggagggcgttttagcaggtttcgatgctctctatacgctgatgacatcgctttgtttgtcaagcccgaccctattgagattgatgcagttaaaagggttcttaatttatttgcccaagctttaggcctccacacaaacctgaacaagactgaaatctatcctatccgttgcgacaccaccgacttgacacatgtcattactcctttccctggaactttgaaatccttcccctgccgctacctaggcttacctttacattttcgaaagcttaggaaagtggatttcttgcctcttattgaaaagattggatcgcgtctccctggctggaaaggatgctacttcacgtcagaagggagaataattcttgtgcaatcagtgttgagtgcattgccgacctttcatctaactgcccttcaagctcccaaatgggtaatcagcagaatagatcgttaccgcagatccttcttatggaagggagaagacccagacaaaacaaatccgggaagtagcttggtaaattggggtacagtctgtagaccaaaaattttaggaggccttggaattccagaccttgagaaattttctcgcgctctaagactacggtggctctggttcaaatggaaagaggacaacaattcttgggttggaatggatttaccttgcgatgactgcgacaaaagactctttcaggctgccactacaataactgtgggtaatggagaaaaaaataaatttttggcatgataagtggctgcaaaatgcatgtccaaaagatattgcacccctgtgtttctacctagctaagcgcaaacagagatcggttaaaacggaattgacaaacaattcttggctcctttcctttcggcaaataactacaattgaagaaatcaacgatcttgtctagcttgggggaatgctgcaaaatgttcagcttctaccgcaaaccaatgacgacatcatttggaacctgaatgaatcgggatcctactctgcaaacaatgcttatttatttcagttccaagggtccttctcttcgattgattttcattccatttggaggtgcccagctgaaccaaagatgtgcttctttggatggctaatccttcaccaaaaaactctcacggcccaaaatcttttgcgccggcactggccatgcaagtggatttgtagcctgtgtggagaggcgtttgaagacactaaccatctcttcaatgtttgccccatcttcagaaaaatttggcttatggtgtgccaatggcaaaacatcccgggggcacagcctgtagatgacaacgcagcttggtgggctgatctcaatcaactacaccctaaacctttcaaattcagggttaaaggatctcttctcgccacttggtggaacgtttggttggaaagaaatagaagaatttttcaaaacatctcttacacagaggatcgcgttgcgagaatagtaaagaaggaacttgatctcagacacactgctttccaaccccctaattgtcttttctttttcggattccctttgttctttctggtttctcccttcttttccttcgatgtcttcccctgtattctatgaactgtttttctctcctctaatgaaattaatgaaattccggcagagctcctgccgtcgttcacctcaaaaaaaagaaaaaaagaaaactctattcactccttatagggtatccctcttttttcatgttacttaaaaaatcataaaaaaaagattaaaaaattagtaagataaatcaataggtgatatatcacttcacaaacatactcattcaaattcaacttatacatgtagaaacgaaaataataaatttaactatgaatataatgtatatataattcacggtcaaatttgttatttttatttgaattgtacatataagttgattttaacttgcatatttgtgaaaagatatatcatatattgatctatcttggtaaaaaaaatttcgaattttttatgattttttgaatgtcatgcacaatatgagaggatgttctctggaggaaaaaaatcacttcccgctaatagaatcatttctgttggctatacaaatagccacgtcaacttattgtagctaatgccagaaagtcaataatacaataatatatactatacatgtccatggctgcacggctgcacgtttatggacaagtatgttttttctaatctcagctttggattcatgattggccggttggccgctgagaagaaagaaggtataactactaagaaaagcattatcgcaagcggtcaaaacggtcttcgcaagcggggcggccgtccgcctgtaagccaacgactgtgaagatcgccgatcttcgcaggcggggcggctgtccgcttgcgaatataattttcgcaggcagacgttggctagtccggtccgcctgcgaaaataggaatcggccgcctgaaaaaaaaacttccgcctgcgaaaataggtagaaaatattgaaatttaataataatttacccgtaaattacttttaaactatttaatagaaattcttgcaggtagaatattatgtacatatattagaagattatcaagcatttggtactgataaatgtacatatattacattactcaaaagtgttgccaaaatatatatattacaatattttttttacattgtcacttcaaatacgccatgtagtaattacattatggtatagcactgttccactcccgaagatcctttaattcgtcacttgtggctagggcaccctctaggtcgaagaaatctcctttcacatgacagcactcatggtggatgaagtggcacagatcacgctggatattttttatgcctgtatcgtcaacgcttgttcgacattctaatcttggcaactgcatgcattgaagataaataatatattagtgtcataaatatatgaagctgtctagcacatagtatagagacttagatcctccgcgttagtcatgtacctcccattaactttaaggaattagcaagcgtaatacccgcaaaggacagttcctcgtggttgcttgtgacacttcatgacatatcataaaagatagttaaaatttgcaatttgtgaaacagttggtatacattaagtgagtggagtattaccggccaataggtacgtactagcagcttctcccttgttcgggtctgttctccacccttgaacttgtagtactagtacgcactgtatggatatcataccgtttcacattaaggaggatatttatttataatacattcatataaaaatgcaatagtcataatcacttactactgtaagattgttagaaattctttatatgactggtgtttgtaatcgagagggtccaagactaccacggttccgtctttagggtggatgagtaaacagatataatgatcgctacatattaacaacatcatagttagttaataccagctaaaataagacatatgtgcagaagataaatgtacccgacttacttaaaattataagcggctaggacaactctcttattttgaaagtgcaagaagactcgtccaatgtactgtgcgacagtaatcaatttctccttgtgcaagcccttcttgtattcagctatctcttttgaagtcttgcccttcagctggtctgaccctggtgctaggctcacagtatgttgtgtttggcagatccgagttggatccaagaagccgataggttcttttgtcttcttagcatctatgtattgcatcctagagaagaagtttgtcagtaacaatcacatggatttgtattgtacatatttttcatataattaattaaaactcatactcacatgcaccaaacaccgacgtagttgacgtccatcttatcccgacgatatatggcgtggagatatgagaaatctagccatacgtaaccttcttcgccgaaacaatctgccggtgatcgagctgttatattgcccaagcctttcttgctggcctgcatgtagaaggtatgtaaccttttcatctcccatggtacttcgttcagtgcccattccggcaagagtgctttcccatgttcgtactcagccgggcaatcatcggttgcgaagtatgttggcccggctagttcagcggccttctgggggtcatcatctctgagcttggcacgttccttaccccctctgaagacgattaccatgaacctctccttgttctcatctttggactttggagtcgtggctcctaagcactctaggcacctcagaacaggtagtggccttctcagggaccgtggtctcttgcacctcggggtctttcgcaggagaagggtcttcaaatatttctggctctgtaccgtcccattccaatcctggtacttcttctatttctgacccgactgatgccacaaattgcaccctctggttatgccactgtaatctccatgggtacttccgacactggaatctccatggctgcctctggcattgcaatctccggtggcacttccggcactggattttccttttgcatctcgggttcctccgccttatcagtcaccttcctcttaggaggtctcggaggttttcccaaccccagttttggcaccacaggtttttgcgtggcgtcagtgcccaatccaaaggatatgtcattcttgtgccagagaattacaagatcgaccgcatccccaagtacggatacaccatctgcagtcgagaagtcaatgtcgtaggactcaaacccatcgtggaccacttgcggctgcaccttggcatacgcatcgggtataaactcttcgttgtatgttctcccagggatagcaatggctatagcggcctcaagagttttcccagagcgtccaatgggaatgtgcaatctgcagggtgtattctctttgaggtcatcgaaggggtaatctggctcaggttctttggtttcggggcgaggcaaaatcatgtgcttgacgcagaaatccatcatttgcctttcaaactccgcagccccttcgtctctaagtttatccttgtacgcttcacgcttcttgtgggggtcatgtttgaacccttccttccaactcatcttgctcgacacatctcgaacccttcccccatgctcaggagtacccagccctgtacttagcacatctttctccctcttaggcttgaaaaatcctttcttctgtgaactggataaattctctattttattggcaacgctctgcagctccggaaattcaaacgatacttttccttcatccgtgatcttaggagttctagctcttacccagttccttgatctctgtgtccattcctccattggtaccggttgccccttcttcctcatttcctcctcctcttttgtccactgctccacctttggtgcgtatcccgtggagcctaagcgatgaggaaatttgttcttcttggccaactctgcatacttttggctcctttgaatttcttccggggagttcttcaacgtcagaaagtcgtcccactgattcagggttatgttggcatacgtcgaaaacagtgtgtgtcctgtcttcacaaatttcgtgttcaaggtggtttttcaaccacgccaagacttggccattgtttgcagtgcacaattcctcactgctgcctctgatccatccgggaattggaagattttcttcaactctttccataggacttccttatccccattcgatacatgatcccagtccttgaccgtgatggggatcttttcccttactattatgccacactgtgaactgaatttcgcacgtgccgtctttggggcgagcggctctccttttggcgaaacatgggtaacaacatggaacccttcatcctttctattgacgcttctctcgcgcttccttttcttcaccttagctgaccgttcgcttttctttgagctggttgtgttagctggtacctcgtcaatttgcgacagaactttttcttcagctgtctttttgatcgctgtggcgccgtttcctacgagaaggtatacatgaaagtttcgaattagctcgggctaatagttatcacggttaacagtttacatattaagtttacttaccccttctttagggggaatgtagtccttgtcgccttcttcaccgtcgccctttttccttctcttcaggcttgggcttggacaaggatcgcttggcgacgagtactcatcgtcttcgtgagcaacgtcgctgtcagaactatcttctggtgggaccgttggttccggaccaaccacaatagcaagggactactcttgctcctctaaacccttctcttcagtccctttagtactatcggccatcgtttgaaacctctaacataaaagaaaaagttatccctcacattttaaattactcaaattagtacaaacaactttaaattgcgaaattaattactacttactattatgctagtatagatatgttattaattagtacttactattatgctaaattaattagtacagacaaaattaaattgcaaaattaattactacttactattaagctaaattaattagtacaaacaaatttgtacaaaatttgaaaagttattatcaagtagtgcactaattcacaattacatttcctcgacatgttgtttaacaaaaaattaaaaaggcaaacatatcctccacaatttttttaaaaatatgttaacataacctcctacatgttatttaaaaaatttgacaaattcacatatcctgcaaaattgaacataccctcccaattccattcacatatcaccca

SEQ ID NO: 11974 - DNA, 5772 bp, Oryza sativa
actattcatacgttgaatttgtcttttttatatctcgacgtgtgagcggagtttggacttaagattttgtgaagttgtatatatgtgttgtatgaatgttgtcaaatttttctagaatttttcataaccgtttagatggtttttgagcaaacgagggaacatcccctcaagggattagaatagtttcccttctatatgtgtcaaactctgttttgacaggtttcgagcaaatgtgatttgcctgaaaacacagacaacttcttgtcctactatagtactcctactaacttttttttcttactactactgtatactactataacaaggaagaaagcctgcactaatgggcgggcatttatttatttttaatgataaagagaacactaaaagaattatctcaacatatacatcttagaaattcaccgtaagagatggtaaattatcttataatgataactaaaatggaagaaaaaaatacttataccgtgaaatagatcatagactttgatatactaaattataagaatgtctctcaaattttaaacaaaaatcacttagtcctgcttagatataaactcacctatcaccactatagattattattgtcttgaaagttgggtcccttgataaatggaattgtattagtaccataaaaagagcctaacacatcagtaatacagtaaaataatcacgaacactttacacataattctctgtcttatgtccaaatctatgtatagatatcttaaaccattcctaccaattaacagggtagtacaattaaaattaaatatgaatgtctccctaacatgtgaagccggctaatactacgtactgagaaccatgtgaaaaaaatattagctcgagtaacaatctctcactaacacaggggttagtgggttccgatttttctttcttgtattacatctgaacttttgttttattattttttcccgtgcaatattacatccctaggtggcatgcatttttttttcagcgaatagctttttagtcggacagatcataagcatacgaacataacaacatttaatctgagaattgagaggggagaattgattttttttttcctggtcttacatacgtaggtattatgtatgtctttttgggagaatggtgtgtcctacgtatgtatgcatttttttggcatttatctagcgaatagtttgcacgtatttttcttgtcgtcgtacatacacgtatggacttcgatctgctaatgacattgacaacgggcacaacactacaatttaattttgtacggtgattatggatggatgcttctcaattggtgtacaaattaatgtatggattgtgcgtcgtgctaaattgttacttatatgtatcagatattcagaaggtagctaggcttgttcatcttgccgagaccaactcgtacaaaacttctcgtgcataaaaaatgttcaaaaagagaagttcacacacacataattgtgtcatacctgcacgtgcagtagattagaagggagggtttttttttcggttgtatacaccctattacgtacacggaagaagattaggagtggtggatttttaaaagatctaatctaatggtctaaaataacataacaggtccaccgatttaaataaaaatagagggtttagatgtttcttgccacgtgacggtctaagagtgtttatagagtgtcatatggcggcttagtagcgtttataggatgtttcatggacttttagtatacaataactaggaaggtagcccacggattcacgcgggcatgtatcttaagatgtgtttgagatacttatatagttataaggatggaatattaacagtagaacaccgtcacgcttcgaaaacaatttctatgtgcattttttttgtcatcattgcctgtaattttttttgtcatcattgcttgtaatttgattaatccccataagaagaaggaaaacttagtttgttttaaaaaatatatctaacaaattaaatgtaaattaaaaatcctaaaaatggaattattagatcccaaattgataaattgttgtttaaatggaattattagaaataattttaaaagcctagaagaaaagatctaattttaagtaataaattccaatataaaagagggctagataaaattttattaaatacttctcttgattctatagttcctagatttttctgggatttatttgagccaagaaagtatttttaataaatggaattgcatttcatgaataatttaaaaggaaaaaggtttaaaaatcctttttttggttttgggcgaaagtcagcccaagtctctctctctctcccccggcctgtgcacgcccggctcaagccggcccagtccgcccctctttccctcctctcccgctgacaggtggggcccacctgtcacggtcgtcttccacctcccgccgccagccacccctagccgcgcgcaagccgccgccgccccttccaaattcggtcgcatctttcccgatccgatcaaattgatagaggggaaatgatcccttcgatctcctctatcttttcccctatagaaactttagctaatttcgtttggaaatcatcggattcgagttcgattcggatttgatttcttccctgcaaccctaaaccttgcatcgccgccgttagtcgccgtgggcctagccgccgcctcctagcccctacaaaaggatccccaggacgtcctctattcgccgccaccttcgccctagcccgccgtcgcttgtagcaccgcctccgcgtcagcccgtgcgccgccgtcgccgccgcaactccagccgtgcgccaccgccgctctggtcgtcgtcgtcgctcgggatggtcgcagtcgggttcgccaagttgttgccgtcctcgtcccgtcctccgtttccgccgaagatcgccggagcaccgctgtcgccgtcgacccgaacgtctccgccgcctcgacctcgccgacgtcactgtcggttgtcgtccatcgtcgtcagagccctcggtgagttcgccgcgtcgccctctacccgtaggtgctgtccgtttgcaccgccgcgccgtcattcgccggcgagcacgaggtgccgagccgccatcggcaatgacgtcatcgtcgacgtcagcgccacatcagccgtagacccgtggtagatcggttagatctcggcctttcgttttgtttagattagatctcagccgttcgttccgagactgcttctgtgcactcggtccaccgtgaacccgagccccgctgacgcaataaatcctttttccttttcaaaaataattctttattgcgtcataatccaatgaaaatctatataaatgatttaatccgatttaatctttaaaaattaataactaattcatcttagctcagatttagctggttcaagtctctcaatttctctaaaattgagatctacatgttaaaaatatccacatgtgctgtttatgattgtttatgtactgttttggtgatttttctcttttatgcttagattccgacgtttccagagagtccgattttgcaggagaagactttgaacaattccaaggccagcaaggcaagtcacacagatcccaaacaaccctttgtgcatgttgattgtcacgcccggaaattcactagtaatttccgaacttatttgtgcataaaatcctcgtccaggaatcagccgaggtacacaaactgacaatttaatatacaaatccatcataataataacgttacatacttacaaaagaaaagaaaacagcagtggaattacggtctagcgaagctccggctccactcccacaggcagctcaactagggtataagccaaacgtcttctccttcgcaacttgtcttcaactcaggtttgattgattattgcaagaatgagcatatgacatactcaacaagccacacagcaaatatgcaagtgcacaaggataccaaaggatggcataatatagggctcatttgcaaaagcagcatttagcaaacatttgagaattataaaacaatagggtaattaatcatcaatattaatcaacactgaacagcacacccatgctgcacaggcccaaccattctgaacaaccatatccggctgcacagatctatctccaaaccaggagctaaacaaattattaccaattataacatcttttattatggtgagaagtgtgagactaatcacgaaagacattgttagacccgcccatgaccgcgggcacggctattcgaatagttttactctggccagaggtgtaccactgtacccacaagacacagccccacaacatgtcaccatgcgcctcaataccaccacggtacctcggaaaagagctgtgacattacccctcgcacaacacaatccaccacagtgcactgttcccggatcatagtcacccccttataaacaaggcatggactccccagcgacccccgtgggcttatctccgccacttctcagtctggtgctccgcaatgaaccatgctatacaaaaggtaaagccgttgcctacgctggcttgtggttggcacggttaatgtttcacaaccgaaaatcgtgaaccggtccttaattgtcatgagcacgactctcaaaaccatgtgctcacaacccaccattatcaagttttagttggcaagtaattaattaaccaatcacgattggccatcgtgagctatcattatgccatcattaaataatagagaaacattaattatcccaatagtgtgctaatgtttctaagcatggctaagcaattatatctaatacatctagttgaaccaatatataaatccaactagtcaaattataacccgaggtaatcaagacatagggtaatcaatgcaaactggccataacaaaggaatagggtcacaccacccggtgacattcaaaaataaatgcacagttgaaataaatagagaatttaaatataggatcaacatgctcaaaggaattgtttgggatctgtgtgacttgccttgctggccttggaactcctcaaattcttctcctgcgaaaacggactctccggaaacgtcggaatctaaatagaaaagagcaaaaacaccaaaacagcacataaacaagtacgaacagtacatgtggatatttttaacatgtagatatcaattttagaaaaatttagagacttgaaccaactaaatccgagctaagatgaattagttatgaatttttaaagattaaatcggattaaatcaattatatgggttttaattgaattatgacgcaataatgaattatttttgaaaaggaaaaatgggtttattgcgtcagcggctagggtttgcggtggaccgagtgcacggcggcggctcacagaaacgaacggccgagatctctccatccaaaacggacagccgagatcgactggtccacggccggaccacgagagacgacgacgatgacgtcagcggtgacgtcaccaccggcggcggctcaggcttgcaaactcgccagcgaacgacggcgcgatgacgcgaacggagagcacccacgggtagcggacggcacggcgaactcaccggtgaccaaagcaacggcgaaagatcaacggacggcgacggcgtcgaggaagaagcggcggcgaccttcggcttgacgacgacggcggtgttccggcggtcgacagcaacggcggaggggcggacgaggacggcgacgcgacggcgaccacgatggcgacctctccgagcgacggcgacgactggagcgacggtggcgcatagctggagcggcggcgacgacggc

SEQ ID NO: 11975 - DNA, 830 bp, Oryza sativa
tctagaggatcccctcttcagtccctttagtactatcggccatcgtttgaaacctctaacataaaagaaaaagttatccctcacattttaaattactcaaattagtacaaacaactttaaattgcgaaattaattactacttactattatgctagtatagatatgttattaattagtacttactattatgctaaattaattagtacagacaaaattaaattgcaaaattaattactacttactattaagctaaattaattagtacaaacaaatttgtacaaaatttgaaaagttattatcaagtagtgcactaattcacaattacatttcctcgacatgttgtttaacaaaaaattaaaaaggcaaacatatcctccacaatttttttaaaaatatgttaacataacctcctacatgttatttaaaaaatttgacaaattcacatatcctgcaaaattgaacataccctcccaattccattcacatatcacccacattcccaaattcacattcacaatcacatataacccctcattcacatatcacccacccctcattcccaatcacactgacggagcgtggggctcctcaccgggagaccacgcaggcccccctttgccggttcggccgggggccctgggtgagattctaagctctcggtgtgtggaaggttcgcgagaatggaaacacacaagacacgggcgatgtatacaggttcgggccgctgagaagcgtaataccctactcctgtgttttggtggatctatgtatgaagaagctacaaaagagctggagaaccagagagctcttactctctccctctctgatcg

SEQ ID NO: 11976 - DNA, 578 bp, Oryza sativa
tatgagaatgtcccaactgttgttttgaccgtcatctttaggccttaatcaaacgggtcgcatctctgcattttgccccatgggctatcgcctgaatatataggggctagccaatggggtcatcgtacattcttgagggcccgtttgaattggaggaaaaacatatgaattttagaggattttaatcttataggaaaatttcctatgaagccctttaaaacaaaagattggatcctatctaatcctttaaaattcctatggaatggacaatcctatagagattttggaggaaatttagcaagagcttcaacctcttgataaatttcccttgagtctatctctctcattcaattcctacgtttttcctgcggttcaatcaaacggccattcctgtatttttcctgcgttttgcaatcctctgttttacacttatatttctattaaaatcctacattttttctattcctacgttttctcaatcctgcgaatgaaaggggcctgaactgtgtcattctttggagtcttgtttcacaactttgggcggcatgcaataggctgtaggctttagtcacaagtag

SEQ ID NO: 11977 - DNA, 707 bp, Oryza sativa
tcaacctcgctatggcagaaagaaggaagaagacaggagaaagaaggaagaaggtggaaaaggaaggaaattgacggaaaccgtgacgacagtggcatggttctaattttgtaaaatttcagtggcacggttacggatagactgagttgttgacgatcttgagttgtgcatctgccatccagccaaggctggtaagctgctcaatggtaagatcctcgaggcctgcgcagcggctatagaaggcttcaacgatgagtatcttggtctcgctttcatcggcatcacgtcttaccttgtgcaacttttcttggagcttgtcggtgcgctccttgatgaagccatccagatccatcgtcttcttgtatctgtctagctgtggcatggccttgaagcgctcaagaaccctcgtcgcctcctgcaccgacagccaaacctctgttgcttgcacctcgccctcaccatacaccatgaggcatgtatccacactacatagtgtcgacaactcgcttgccttcttcttctagcccttgagccgcttcttgaatgccgcccgccacttcgcatcattgatgatccgctgcaacttcaccttgttgcgagccatggccttcacgattcaccactttctagcaagactgcacctatggattgatgggaaatggttagattgatatgagttcaaagaaaggggaatatggtggttttat

SEQ ID NO: 11978 - DNA, 624 bp, Oryza sativa
ttctctgaaagaaaaagaacaatcaaaggtgtttgaggttctagtaagattttttgtacgggaaaaatattcaagaaataatcacggatggcctcaattgttccaagcaaatttatcatttatgccatgtggtgatcgctgcagagaagaggatgacgagtacttgtcattgctgtgatgttgtgttgccaggtttacacacacatttgcttctgatacaagtatcaccgaggaaaaagaaaatcaaacctccatactcatcaatttgaccagatcagttgttgagtactccaactccttttctttttttagaccagagcttcttaagcatgtgctttctcgtttctcctttctacctgcttgctgctgctgcatgagagttgagatagtaataattatggagtcctagcagtaattaacttaaccaatgggtctttttttaaaaaaaacaactgggctgttttggtcattccattttacgttacggcctgaccgcaatgtggtccatcagtggacgaaagctggtggtaaaccaccagccacttttatattgcactcctacctcacttttgacggtgatagtacgtactactcctatatcaatacatattactgacatgtggg

SEQ ID NO: 11979 - DNA, 663 bp, Oryza sativa
tggatcgacgaagcgggcaccacgcgcgtgacggcgtggaggtgaagacggccccaccgccctggaaccaaaaaatttttagggggggttgggaagggtttttggtcgggtgatcaccgcaaaacgcaacgcaaggaggcggcgggggggatggctcataccttggcgcagggtccaggggacgagtacggcaggaggcgggccaccggcgaagagacggcgtggcgacggcgaaggacggcgcggagcgcggcggccatggcgtcgccgcgagggttttgggtttgctcgcgtctcgtctccacccactccggtgaagcgtacgaaggaagcgtctgtggactgcgtgtagtgcaatgaatggaagaaggcaataagccaagggagtctttatgggccgggccgggcctggctcagtgttggaaatgtaaaggaaagccactgaaagcaaaatgctttcagtttttttttttttggagaaacaaaatgctttcatgtttgtgtgccattactagaaacttatattgctcatctaataaagtttatacaaaatgctttcttgtatttgggttgatgaaccccctggctatattctaaatcatctggtaaatgatgtaacaattttatcatatcaataaagctagccgaatggcgggtaccgag

SEQ ID NO: 11980 - DNA, 1048 bp, Oryza sativa
cgtcgcctcatgagtaggggccgcggccagaagctctcgcttcatggccttgaggctccggcgagaaacgtgagcacacactcccccatcgacagtggcaatggtggccccaggctcttggaaacctaggtcatcatcgccgtcatcgatgtcctcggcgggggccttctgcttggcctcacttcgccgattgccggaaggaaccgccggggacttgccctctcggcgctcctccctcctctcctcctcccacttcctcgtccgctcagccaaacttttgactgcgcggcagtccgcgaggtcgtgaagggaggtgttgtggacgatgcaccacttgccggttgggcgctccccactgggagcgccggcctccttctttttgtcgctcgcaggcctcccctttcgggtggcccgcgaagcgccctcgacggcgaggacatgaccctcgtcgtcggaatgggctgacctcttcttcctcctcctgtcacgccgccctgtccgagcagcagatccgggggcggccgaagctgccacaccggaaccggaggggttccaggtccatgcctcttccttacgagccactcggtccgcgagctgaaaaagctccgcggtagtctggggctctttggaggcgatcttttcgagcatgcggttgtgccgcacacccccctgaacgcgtagatcaccgcgtgtgcagggatgcatggtatggtgttgcggacttgacagaaccactgaatgtatgagcgaagtgactcatcatcccttcgctggactgcatgtaagtccgcttcttcacctgggcgcggatatgtgccttgaaagttcatggtgaactgttggcacaaatcctcccaagagtggacggacgcgggtggcaagttcattagccaaccccgtgcctgtcccttcagggccatgggaaagaaattcgccatgaccctgtcgtcacccccggcggcctcgatcccggtcgtgtagacctggagaaactcagcggggttgacgctcccgtcatatttttcggcgatggtgggccggaaccttg

SEQ ID NO: 11981 - DNA, 2202 bp, Oryza sativa
ttaccgacaactctggaattcttccgacttcttctactatactctcttcctattctagtatacaatatagtacaatagagcctcttataattcactcaagcttggaggtgtgtgttgaagtgagtgagatgatgtccttatataggggtaggtatgatagttggcgaaggggaaatgtccgatgttccccgcaaccgccatcagggagtgatttgggacatccatgccaaaacctgggatcaacgatgatcaccagggttcggccgaacctgggctgggcccccctggcctggcctttggcctggctcatcctctgatcctcctctatccattcttcggtgttttgggctgattttctggtgtttctacgaagttcacaacccatccttgtatggatacatatttctcctcactttagtctagatttcctcccaacatcggggtttatcacctgcatacaaatatacaccaacactgtgtaatatgtgagaataagcacctatcactatgttggatgttttattatccgaattttatacaggtgttggcggtatagaatcgacatttaacagccgccaacatggagtatcacgttgctgcattgctccgtcagcgtgaccacctccgttgttgtgagcggtctcttgttgttgagtatgtccttgagataacgggagtatgttggcacttacatagcgtccaacaatggcacgttgatgtggatcttctggataacttcaacaaaacgagcgagctgctcgtccactgacggtttcctactccgttggggaaacgacagcaaccgtgtgtcgcagtgctcctgcggcatggtcttctctggctgaacctctttgtcagccgagtcactagatgacgcttcttttgatatcccattagttcctgcagggttaggatatggcggatcacgagtggacttacctccccatgtcgtgatcgccttaacattttcaacggaggagtcgggttgccccggaatcctcccagtttcatttgtagagaccaaggatgctaactgagctagctgggtctctatcattttattgaagctcagctggttttggaaagcagaagcgaagccatctaacttaacatttatattatctaggatcttgtcattggcagcaagctttttgcttagcgcatcagtggttttagcttgcgcaaaaacgagatccttcaaggagggctggttagaaaagttaccgttgttgttacctccttgataatatgggtgtggttggttccacccctgacctccttgtggacggtacgcgttgttgcccatgtacatcgcctcctcacgggtttccgggcagtcattcccagagtgactgtaacgccccgattttcggtcgggattaaaaatcattaaataatgcatttttctagaaatttaataaaagttaaatcaatttaatcaagtgaattactgagggaattaaaaatttccttttaaaaatcattggccgggaatattttgtaatattctttgtgccttaaaatactctccggttttttctgtgaattttcggagctcaagaaataattttaaagtcacaaagttcattttatcaattaaaataaaaagaaaagcaataaaatttcctcctctttgtttttgggccgcccggcccaatccccctcctcctctccttggcccgctcgcctctctctccctccctcctccctctcgggccgacccctcccttctcggcccaatcgttttcccctcgcgtaaagtctaaataaccccctgggcttccccctctctccctccccgacaggtgggcccggtggccccacctgtcaggtcctcctcctaccttcggcttctcaggccgaagccgccatggccggcggttgccgcccatgtcccgccaaatccggcgccctcccgctcgcgtcctcgcgcccaaaccaagtaaaatcggtccccctccatgtcctccaccatctcccccactttcccccaaaaaaacggcgccggtttgacctccccacgagctccacgtcgcctcccatttcgacgccggttgccgcccatcccggcctgagccactccctcccgagcctataaaatcactcccccggccatcctctcccttttccccaactttcccgcactccccgcgctctctcccgctctccccacgcgagcccaagcgccgccgatcgccggcg

SEQ ID NO: 11982 - DNA, 11915 bp, Oryza sativa
ttcctgcagcccaccactcaccgacgagctccagccgccgctcctcgccgctccagccactgccaagccgcgccccgccaccgtcggcttcgctgcatcgcgtggtaccccggccgctcttccaccttcgttggagaccgccgaatcaccgccgtcgtcttcgccccgtggagtgctgccgcctccctctgctcgagccccatcagcggcctccttcgccgccatgcccctcggtgggctccgccgcctccctcttcgcctcctccactcgttttcgccgctccccggccgccccctcgctcgtcgggccgacgccgccatcaccattgtcgtcgtcgtccttcccgcgtcggtgagcatctccctcctcctcccctccctttctttttctctctttgcccgccggccgccgcatgcgtgtcgccgtcgcgccgcgccgcgccgccgccggtgtcgccgccggtggccgttcggcccgtctggtcgggttggtcggcgagccaacccacccctccgtcttgcacctctaccgtggactcggtccacagtgggctagatccttttgcccgctgacgcgtggggcccgctcatttggtggacccggtccaagcccgcacctcctttacccgctgacgtgttggcccgcctgtcggcgccggcgccccttgctgacgtcagcgaatgccatttcctttgagaaaatatttaataattgcgcaataaatcgagtttaattatagaaatcaatttaaatggctcaaaacttctaaaattcatatctaattcattctaactccgaattgggccattcaacttgcaaaattcatctaaaattgagctctacatgtttgtttacttttcatgtactgtttttttggtttttattagagtttttcctcattttgcgtgctagcgtgtagaatccgtcgtttcggaagatcgcggtcgcaaggataagagtttggaagattgtttgaagaagcaaggcaagtcacacatttccccttgagcatgttgatcccaaattataaatgttttagtatttgcaactaaatatgcatcgttttgctaattacatgggaccagggtttacctatctgcttgcttgtgccatattatttgatatatgtccttcgtcaaccgtgggtgataattcgactagcttgtgtcacttatgttgatctagctagaactttatgcttagccatgcttaattaccactatctcagttgatgggataattgcagtattagacatgttagtatcatgatgagctgcgtgctcgagacatctggccatgtttcatggtcgtaattatccaactaaaatacgactgaatggtgggctgtgggtgaatggttttgctggtcgcacccatggcgattaaggaccggttcgcgggatgcactagaagacatacagcgcttgccacaagcgggaatgggtaactgcctgacttaaagcatagcttttctctggctgacgcatccaggcaagggtgggcgtgatggagcggggcgggccctgcgacggcctctgtcgcttccggattcacctaggcacgagaggggactgcccgctgcctgctgggggcgggggtgaaacctgaggtgtggtgtgcttggttagagcgagtcatatgaagggtcttgtcacaatcactcgacatggtgacgtgtccggccgggcacggtaacatgccggtggattgtgtcttgtgggtacagttgtgcacctctggccagagtaaaactattcgaatagccgtgcccgcggttatgggcgatctaccagaatcactgtgattagtctcacacttaataaatcgacccaatgcaccgtagttcaggtgggttggttgggcctgttcaacgtggtgtagcgttgatcagtggagatttaatattactttaattactcaatagttttaccgttttgctcaataaaatgttttacaatcgcctttatgcaaatagccacaagccatccttgtatcccattgcacgtctgcatcgttggtgtggcttgctgagtacggtggttgtactcagccttgctattattccccctttttcagaagtgtagtgcttctgagttgaagacgaagttataagaccaaggctcagaccccagttgtgttttgcctgtggagtagagctgaagccccgctaggatcgcctttttccgctgctgtcgttctctttcggtgtgaggactaagtgcctcttttgtaagtatttacgctttatttacgtttggaactgtatattacttgtcgttttgtgtgccctggctggtcctggacagggatttaatacacaaaatagtctggaaatttgggctaaatttctgggcgtgacagtgacccgtgccgccgcagacctcacacgtaatgtgccagtccaaggccttgacggtgccttgtggccttttgttgtggtcatccaatcgcttcatgaggtctagcttggcagcaagcaaatccgtctccttgatggtatgcatgcctcgctgacgggtttggagtcgttccacgctccaacccatgttggagaccatcttctctattagatcaacggctccttgaaccttttttagagaagaaagttcctccagctgccgcgtccaggtgatcgtgggacaccggggtgagtccattgtaaaagttctgcaggatcagctagtcgtccatcccatgatgaggacaggcggccacgtacttctgcagtcgttcccaggcttccggaatagactcgtcccttgtctgctgaaaacttcaaatccttccacgaagggcattggttttgcccatcgggaagaatttcgagaggaatgccatagagcatttgtcccaggtattgacagcagcacggttggcatcgaaccactactttgctctcccgagaagggagaacggaaacagccacagtctgacggcgtcgggattgacgcccttgatggtgtacgtgctacagatctccaggaactgttacagatgagcatcggcatcctcattaggcttgccacagaacgggctagcctgcgccatcgtgatgaggctagacttcaagtcgaaatccacgtcttccatgttgatctgcggcccaatggccacattgtcagtagagggagcagcgaactcgcggagagtcttgttagccatagtcttgaaggtcggtggcgctggtatggctggtttctctgtcggtagagttttttgcagagcagcgattcgcggcatgacgctttggaagaaagcttctagattttctttgaagtttttcggcaagttgaaaccagtcatgcactaccctgttttcacaacaaaagtgaaaacaaccaaggttagcctgcaaaggaaaatgattatacagagataaatataaagtattagttcaggtaatctccattatgaatcttccctggcaacggcgccagaaatgcttgttggtattttcttaacgacattactagaaatataattcccagcaatggcgcagaaatacccatggaatattatggttacagagtttatccgcaagcgcacgaatataccattgtagcatttcaccgagagtattctaaggatatcgtatttattttatcccgtgggaagatcatgtagagagaactagactaataatttatatattacttgtgataatcatattctaagcaagggttaagataatccaagggtatagtgacacacaagtattagctactcattctcataatatattatctaagctaagtgggaagaaaagagaaagaaaatatattcctatacttctaatatacatagtatacatacattccagttatccgatatactaggtaataccctctatccgatgccctcctggtacttcgagaagccacccctgactaccgagttccttacgacagtccgtcatgaccatacaaccggggctaaatacggaggaatgccctccctagggaattaacttaggattatatacaggcacggaggaatacccgtactatgctgtcaccatcagcggcccacctctcatccgtagcatataaccccaaataatgatatcccataatctagacatcacgcctaaactaccagatactactctaatatcatcgtcatgacatagagtaattgcatatgcaaacattatacccgcaccaaagcatctcccagataagctagcagtatattcagtataacatgaatataatgtaaagtaggtatttatatactcggaaagtatttcaataccataaatgtataaagaagaatattctaataatagtacaaagcttacaaaagaggaaaggaaagctactagagccatacccgaactcttccgaaggcttccggactcctgatttctactctattcctattccactaacttaagaacattaaactaacttgagagaatatgagagaattcttgcttgaggggtgtgtgtgtgaagtgaagtgagtgagctccttttataggcaggtatgacggttgtaattgctgtgaaatgtctgaagtaactcgcaaccgccatcaggagaagatctggagcgtccctaccaaactccacatccaacggtggaaagggaggttcggccgaaccaggggccggcccaaccagcccacaatttggctggtggcctcccggacttctcttctccgcagtcttttgaattttggcccagttggttgtgtcatttctgagtttctagcctattcatacataagtctgttcctcgacatcgtctgattaatttatcgtctgagttgatgtcgattctccttcactttatgattattctttgcaaaaggttagtaaacctaatactagtggaatattattattctaacatatatatatatatatatatatatatatatatatatatatatatatatatatatatgcattgtaagcatcactagttctcctctattttggtaatattgacggtcaaaactgatcgataacgaccgtcaacaaacattagtatagatttttcaagaacaagtaacaaattttatctgtgatttttattctaatggatgcagaggtgagaaactccctgttcaaagaaccagtcctgcatgacaccaataaggttggtgtgaactttaggaagcaaaagctattgcaaatggcagaataaaataatgccccaggagagccagaagtggtgatagttgaagatgctgaagtggtgattgagcctgtgccaaaaaagaagtgcactggcaacaagggattcactatccctccaggagttgaagtcattcatataccctccacccctcaggcataattataatacgataaattgtccacatctcaataattttaggatattgcccctaatgaatgtgcaccaatatcataactagtgtgagtggccacttccatttcaataatttattgtgctatgtatcttcttcctttgagatatcaatctaattttcttccatttcaaatctacttttcagcctaacttgcaatgattactgtaattcataactaagagatcaacgcattgagctgtctttgcttcatgtagatgaaagatgtttgatgatttgtattttttccagggatgatggcttgtactagtagtgactgatacagactttactagctaaatatgttttcatcctcaaccttaaagtttaatgtgttgtgataatgatttttgacaagcaagcttgggatgcgttcgattcccctgattgggaactcattccctccacatggaaaacagagcggtccattagtacgtgattaattaagtattagctatttttttaaaaaaaaatagatcaatctgattttttaaaataactttcgtatataaactttttattaaaaaacacatcgtttagtagtttgaaaagcagccttggtagttttcttgataacttttgttgctacctgtacctgtggtgaccactgaccagccttcgtgaggaactcccaagtatttaagctgttaatggaaaaaaaaggcattattgaaaatctataagtttctttgatataactaattgtcactctacttagttccgctggttatttgtgagtaacaattgatagtgcaatgcatatgagtaaatcatgtgtacatgtatttctttgtgacctatatttgcttccatatcataggcatagtatgatatgcgcacgaggcataaattaccattcatagatgagagttgtgtgcgtggtttagcttaggcatgttccggtggttgtgttttgcttgcatacttgaaatttactaactaacgtaacttaaacaaattttgattgattatgtattttctttaataatgttgacgtgccttacacgtgcatgctcactagtgaaaataaatatacgagttttctttttttaaaaaaaagacagcagaattatagcaacagggactctgtaccgcacggcagtattgctcatcgatctgcatcaactccggactcggactgtgtcacaattgccgttagatcatttgtctcggaagtcgtaactccgggcctccgggcataaggccagtcacaatgggggtttcactggtgtgtcatgcacatttaataggggtaagactgaataaaaaatgattatttgcatgaaatggggatgagagagaaggaaagagtttcatcctggtgaaactcgtcagcgtcgtttccaagtcctcggtaacagagtgaaacccccgttgaggccgattcgtttcattcaccggatctcttgcgtccgcctccgccgtgcgacctccgcattctcccgcgccgcgccggattttgggtacaaatgatcccagcaacttgtatcaattaaatgctttgcttagtcttggaaacgtcaaagtgaaacccctccactgtggggattgtttcataaaagatttcatttgagagaagatggtataatattttgggtagccgtgcaatgacactagccattgtgactggcctaatagcacatggcacctactgtactgaacgcgtggtttattaaaaaaaaaaaggaataggtgaccattgaccagcgaccatgcagctaccacaaccacaaccacaccctcttgttagtattaaactgttgatctataaataaaaacaaagaaaaatgtagcttcttcgttgacgcatgtactatagctgtgttcggtttcacgggatacgaactaatccctcccgcacataaagcggagcgatccattaatacgtgattaattaagtatgtcctattttaaaaaaaataaattaatttgattttttaagcaactttcgtatagaattttattttaaaaaacgcaccgtttagcagtttgaaaagcgtgcgtgtaagagagatgggttgggaaaagagggtgccgaacacaccctatgggtagtttggatacatagactaaactttagtgtctgtttagatcgcacccaaaattttacatcctgtcacatggaacgtttgaacacttgcatgaagtattaaatatatgctagaaaataactaatggcacatattgcgactaatttgcgaaacaaatcttttaagtctaattgctccataatttgacaatgtgatgctatggtaaacatgtgctaacgacggattatttaggcttaataaattcgtctcgtggtttactgacagattctataattagttttttctattagtgcacgaacacccccatacgacaccctatataatacctgatgtgatacgccaacactttacacccctgatctaaacaccccttagtccctgtcacatcagatgtttgaacactaatttagagtattaaacatagactagttaaaaaactaattacacatatggaggctaatttgcgagacgaatctattaagtctaattaatccatgattatcacatatttactgtagaactacattgtcaaatcatggactaattagtattaatagatttgtctcgtaaattaacctccatctatttaattagttttataattagtctatatttaatacttatgtttagttcacgctaaaattgaaagtttggttgaaattagaacgatgtgacgaaaaagttgaaagtttgtgtgtaggaaaattttgatgtgatggaaaagttaaaagttcgaagaaaaagttcggaactaaactcggcctcaaattagtgtcaaacttctcttgtatggctttgtttataattccaaactttttctttaaacttttaacttttttatcacatcaaaacttttttacacacctaaacttcctactacttttaaccctgtcaagtgtcgactggacaagagaaaacctaccccctacgccgctagctacacccgagcctatggcggccaaggaaaaaggatatactagtagtagtaataaaatagtagtatttaaacactgcaagcatcttcacacgggaaacacgacgagaactggttcgtttcggccaccattattccacatcatttccacggcccctattgtccgcttgctctcgcgtcgctcccgtcccgtgccgtgcgctgcggccgccatgggctcctccgactcccaggcgccgctgctgctcccgagggggagccaccgcaaggaggaggaggaggaggaatacgcggcggcggggaaggtgcggggctgctgcggcggcgatggggaaggagggtggtggcgggaggcgactgcggaggccgggaggctggcgtcgctggccgcgccgatgatcgcggtcgcgctgctgcagctgatgatgcagctcatctccaccgtcatggtggggcacctcggcgaggtcgcgctcgccggcgccgctatcgccaactccctcaccaacgtctccggcttcagcgtcctcgtgagtgcccttttcccttcgatcatctttttttacccttctgtgcgtgagaccacgccttctagggatagaatgggattcacttcgtgccctgtggctgtggccgtgtggtggttggcatctcgcgcagccgccagcgaggtgcttgtggaaatgccccgcacgacaatccgccatgtggttttgcaccgctggtcaaatactcgaaacatactaatcaacgcaccaaaagttggtagaacgcgagctggatcagtaattgcgtacgcgaatccaaatccatgtgctcttttctcaaatggtcgactcaccttcgttgcactgatttgtgttaattgctgttttgggttttgattattggagctgactgttttcactttacgatgctactcctacttgactatatgctattctcagttcctcacatatgaggctaaggatttggaagcttcagttcaggttcaccgtgcgcattggaaaggcttttctgtctttccaaacatttcgtcgttgtatattgattataagctaagcgccagctctttgatttgagattgcttccatatgcatgtttcgtcctttaggttgtggaccagtgcttcatctttcgtataacaatgaaatatagtacccgactaccgtgccgtggccgtgtatgtgcttagggctctaggacaccctttacggaataattaattatttgccactcttacggatggtgataaaatgtcccactctttactgcagtaatcaagttcttttttttggttttacattatgtacttctgtttggcaatgtattgtccacagctttggaatagttgcatgctatagaaacagagtaaaggattgcggactttgtaaataaatgacaaatacacatctatattcctttaaaagcctctagtggtggcagtgaatctgcccacccccactattgcttttgcagttttttacaaattgtccccctgatattttctaatattgtggaatagtccaacattcagttcaaacaagtgaataccagataatcataaaagcaaacaagtgatactaagatatttgataaacaaatatttttctatgacatattatgattatttttcttctgcccatagcaaagcttgggcattttgctagttattaataatatacacaaattcgaacatttagagaaaatggatgtcacctttagttatctaaatgtacaacaaattacacttttaacttttaaaattttctactccttttgttccaaaatataagcacttatggagtttttcaccgcgattaaggagagagaggtgaaatcaaatgacggattgttgtgattggttgagatgaggagatagatggagaatattaaatgagagatggctgtagttggttgagatgggactaggtgcataagttactacattttgcgacaaaatttaaataccagaagtagctatattttgggacggagggggggggttgttaacagccatatcttgtaaaagtaggtcaaagcacaccttaaaaggggcatagccaagggtcccaacctctatatagtgaagacgagacaagcaatggattgaacatggagtggacaagtcacttgtgtttattacttcagaaaaaaaaactttgtagaggtagcattactcttacataagaaggcttgagtgatgttaggagctcgtctagtacaaaggtttgaggcaattggacaagcacttctaggaagacgatgtgacatggaaggattcaatattggtgttgacaattgatggtacttgttatgcagacaccgagatcctcctccatgtcacagcctcaccagtcacactgtgtttctagaagtacttgctgaatttcttaaggctttggactgaaggagctctgagcatcgtgatcaggagcatcttcttctacattggctacctctaatgagtttcacctattgtaactgctgctgaatatataagcacatattgatttaatttattccataaataaatcatgacattgcaaattaaaactagcatcatcatatcatacgatctacacatgtaaactagatagtagcgaatgcgtaccgagggttctagaagttcggctacacaacatgaaggactcgtggtactgggcattgacgacggcacgcagcacccgagcgaagaggaaggcgagccgttgtggatgaatagcaagcagtcgcgtgaagcgcttcccaaaattcccgccttctcccagtgtaggacatcaaaggcgaaggttccggagacctgctctcccgatcgtcggtgcacaccgacgagcgggatggagtagactacgagtgacaacgcagaactgaggaggagacaaaccctagattgatttcgcgtgtgttgcaaggaggcgacggctcgatttatataaagatatcaggacacctgcacgatctccacaccacgtaaccgaaccgaataagtcgcgcgtaactcatccggagtccactcctctccacgcaccggattattcggtgtgtttccaaaaacaaaaccgaaatttgcagcaaagcaaaattgcaaaaggaagctgcatctcgcctggccatgcgaggcgagcgagcgcgcgcgtgtgttcttctagttttctccaccacacatgcctcaagtggctaggagagcaacctcccttgtaagaaggtctccctcctctagaataggcaaggtggtactaaacttcccatgtatgccatcccatgaggtgggcttttgtgattttccgaataattaatcttcatatgggccttagcctacataccaattccaacaattgccactagatgatgagttcggctacctcccatgagtttcctctgtcataaccaacatgaatgaaattttcgccactttcaatctgtattttttttctcaacttcattttgacccaatagataaatcaaatagatgctttcaaagttgagggtgtattttggacctgtgcgacagttagaagttctaaaatggacttattcctataaaagaaagagctcccttctagctattactataaatagactgcatag

SEQ ID NO: 11983 - DNA, 731 bp, Oryza sativa
agctgcccgtcaacttctcctggatcgtctcgtctaatcttgtatcgtagtgctttgcaaacagggcatgcttctaggttctcttactcctcaccgcgatataggatacaatcattcggacatgcgtgaatcttctgaacttccagtcctagagggcagactatcttcttagcctcgtacgttgtctcgggcaatttgtttccctctggaagaatgttcttgacgagtttcaataaatcgccaaatgccttgtcactaaccccattttttgccttccattgcaagaactccagagtggtatccaactttttgggcccctgctcgcaacctgggtacaacgacgttctatggtcctttaacatcttgtccaatttatgggcccccttttcactttcgcagtcctccttggcgtcctgcaacatctgaccaagatcatccgcaacgtcgttaccatcagcatccctttcctcctcacctgtttgatttccttcaaatccaatgtactgagcaaagtccggaatattgtcgtcttccacttcatcttctttcatttcaacaccttgctctccgttggatgtccaacaattatagcttggcatgaaccccgactcaaacaagtggaaatgaatagtcctggatgcagaatactccttctaattcttacacttattgcatggacaacaaataaaacccttttgcctgttagcttcggccactctcaaaaaataatg

SEQ ID NO: 11984 - DNA, 15819 bp, Oryza sativa
  unsure (1)..(15819): unsure at all n locations
ctctctcatcaacttacaactaaattttggagacaaaaaaagtgtgcaaaacatagctccaaatgtaatatggcaaaaaaaaacattagaggatgaagttgcaaaccttttaggcaccttcgatttgtatgtaatcaccaaaataaattcactagaaattttggcatgacctctcctcttttttgaagaaattttgaagcttgcttgggcagctagaggaggaagaagacatatatataggggtgggactttagtcccgggtggtaacaccaaccgggactaaatatcccggggggcctgacaggccctgacagcatttgaaccgggactaaagatgatctttagttccggttggtgttgatcaaatatgcccgttaccctttttaaccgggactaaagatcatctttagccccggtttttattgcatccgggactattgtggaattcagccgaccgacaaaagatggtttctccatcagtgaagacacaatgtgtgtatgataggtgggaccatatattaatagtatagtaagcaactattactctctccggttccatattaattgacgttttagacaaggttgatgtcaaatttttataacttagactatcaataactttaaaaatatttagtttaaaggaactagaacaacatatatatatatatagatttgtcttttaaagtactataacaaaagtaaacatgcatttatttattatatattataatagaaaaataaggtcaaatatgtatcttgtagaccgtgtcattgtccaaaacgtcaattaaaatgaaaccggagggagtatgtgaattggctataaatgaattggagctagtagtggactatactattaacctggctcaaatgccaaaattggcctgttcagtttcctcgtagctaaactcttggggtcaaaaaaaaaaaagtcctgttcctgatgagagagtgagacgtacaagcaaaatcaagggagaaattatattagcttgcatgccgtccctttgtggctgatccgacattcgaggggggcgcctcttccaggatccgccttctccggctacgcgcctctcccaacgaacgccaacccagacaggctgcctgttcgtcccccaccacccattccgattccaccgcgcgcgcacgccatgagcgagccggccaccaccacccccacccccacccccgccggagaccacgacgcagccgccaccgcatgcaagcctgcggagacgaccacggccctgatcacctgcaggagcagcagctgcagcgcccagcagcagcagcagcagcagcagcagcaggaggagccgctcggcgacgaccagctgggtgagctgcgggagatcttccgctccttcgaccgcaacggcgacggcagcctgacgcagctggagctcgggtccctcctccgctccctcggcctcaagcccagcaccgacgagctggactccctcatccagcgcgccgacaccaactccaacggcctcatcgagttctccgagttcgtcgccctcgtcgcgcccgagctcctctacgaccgcgccccctactccgaggaccagatccgccgcctcttcaacatcttcgaccgcgacggcaacggcttcatcaccgccgccgagctcgcccactccatggccaagctcggccacgcgctcaccgtcaaggagctcaccggcatgatcaaggaagccgacaccgacggcgacggccgcatcagcttccaggaattctcccgcgccatcaccgccgccgcatttgacaacatcttctcctgagaatatagcatcagtggcattcacatgcatcgatcgcggctgttcatcagccgatcgcttcgtcagatgtttgggggagatcagatcagatcagaattcagaatcagatcagtggggtaaatttaggtcaggtgttcttcttcatatgtgatcgagctcttgtgaataacgaataaatctttgtaaaacaaacagaagtaaaacatacgaatttcagtttagaaatgaactattcgtgcattatctttcttctcatgttggtctgttctgcaatggtcgtcctcaagcaaggtcattagtgattgtagttgtaggaaggatatcaccaagaaaaacaaactcaagcttgtataataatagtataatactcccccctctcttttatattataagacgctttgactttaaactgttttaaatctgactaagtttatagacaaatatagtaatatttataatactaaattagtttcattaaatcaataattgaatatattttcataataaatttgtcttgggttaaaaatgttagtattactttttttctataaacttggttaaatttaaaacagtttaactttgatcaaagttaaagcgtattataacctgaaagagaggtagtaatgttcatcctccctgtgttgttggagttggacgttggtctcaatcatctgatggtgaggtgctggatccattgctggatcgatcgttgattcagtgcattgctgatccgtcaatcttcgtactcccaaatataaaattcagcgcattgctggcaaattattgagttttccctctgtcttcaactttaagtttattggtattctagaattaataagtgctggacaactgatataggcaatcatgcatactcgcctttcatgaactcggtcttaatagccggaaatattggatgagaatttgtcttgtcagatctgtccagctaaaattccagaacatttttttttcatttttggatgaggccaatagttcctcactacgaatagtttggaacatttcagatctgtccagctaatagttgctcactaagaatctattatctattatatatatatatggtaaataaaagttcattaaaaatcctatagacgctcttaagcctgatgttgcattctataaactcctaaaccgccacgtgacagcggcggcggcgcccccttctccttgtagcggcagcggccccttctcccgaaagcagcggcggctacaaggaggcagcggcggaggcccccttctccttgcagcggcaacggccccttctcccggcagtggcggcagcccccttcgccggtagcggcggtggtcccctcatacagatccggggaggaagcgagaggaggcggtgctatgcgcgggtaatttttcctcctgtggttgaatcggtgatgaatgtcgtgtgagattgatatgatcgggaggggaggagaagcgaagcgagcgctcaggaggaggggcgttgcggcgctagcttttttccgcatctgattattttcgttcttttttttttcgcatccgcttttttccgccgtaacagatggacatagagatagtgatagagaagagaagtagcaactctgtgtagttgctttgcacggcccaataactgctgctcggcagctataggcctctagcgcttgctcaagcgcgccagctcgggctcgggccggagagaacggaatgcttcatctcaacaaggcccgcgggcgcatgacctagatcgaacgtcccacacttctccacaccttacgcgaccccgaacctaaaccctctgcgaaacgctcctcctccggacctccgcccaccctcccccaaaacctgacctcgccgacaacacccggcggcggcggcggaggcggagatgatcaagcggcggtacttccgacaggaccacggcgacaagagcggttcctcatcgtcctcttcctcctcctcctcgggttcggactcggacagggaacctgcggaggaagcggcccccactgaggaagtagaggaacagcaggaagaacaagaagatgagcagcatgtgggggaggaggattcgggagaagagcaggaagaggagctagagccagtggtcgaacaagagagtgggttcctataatttgtgagtttacattttctcgtatttgcgcaactgggatttccgaagtgaccacgtgagttttgctttgtttcctcatgccaaccaggttcagggtaccaaagtgagtacagctccggtaacgatgttgatgaaccttctgcaggtattctgcgttcctgctgataaatctcagctttttgtgtggacttctctcattcgatttggcgtatgagagatctggatgccatcgttattgttatttcttttgagatttgcaggagttttgtaagaacgtgaattgtggtttagattaagttgcattttcttgctcttctaaggacctctattatgttagatttcgtatgtttggctgtttatagcatatggaggctacttgcctcttgcatttatattctgcatacaaaatattgggcattgcgtaatttaacatcgctatctctgttcttttattccttttcattataattttgtagaagtatgatcatgcagtgttatgtgtaactagcatttcttttacatagtctctctatatatcggtgaaccaccactgttagtttgtgtttccttcagtgtttgtggtgatttatgacacaaaaattaagtgcctagctaatgtggatgtagttgtcttaagctcagggatctcattttggtactccatggtttagctttttcaaaagtgtactgtggctagtattaattacctgcccccagcgtccttgtgcttcatttagttcaatctgggatctgatcactttttatctttctgatggtcatgtggtacacttcttatcattttggtatcaatagttcctgcctggctgcctatcataccaatttcagtatttgcatggaataatgagttaatgactgttagcaaagattcatatctcatttctcaatgaaagctcattaatcacttggcctgaagcattctataccaaatcatcctatggaatgtgtttgtaagaataatcccgtgttatgaatttattctgaaatgttgccgcaagataagtctctaaaatgaattgtttactgatggctttgctttcagatagtgatgagcatatcatcctaagacatgaagaagatcctgagataaattcgtctgttaagagagcctcaagtggtaaagctgattcaaccaaagatgcatctgacacggatgatgctcttgaggttgatttcaataactacattctgaagtgcaaatctgtgtacaagtgcaagctttgtcctagaatcatctgcttaaatgaggagatggtcagggtacatcttaaatcaaaggtgtgtaattcaggtggaagnaatataaatgatgggacttatctggtgagaaatacctttgtctcatgtcttaattttggtttggttcttgtagagacatgctcgatcaaagaaattgttaggagaaggtaggcttaagttgatgcttaatagtgatggtgagttggaggaagagcaagagacacatgctgaacgacatgctcgaactgtagctcttgctcaggtgtttgcccaaatcattttataagttttgatttcttatgtgcaaaatgttttcgtaaattaaatttgtacttgttatggcatctaattctgatcatgctgctaaatgtttcagcaagtacaaaaatcaaagaaggattctggcaggcagcgccaaaaccgaaggaggaagaaggtaaagtcacacccttttgcctatgcttttgttgcaaagcacatatcgaaggctttttaggcttcatatagaaaagcctattgagctcaaagcttgtgcaatatcatacttatcgtttctctagatcataatgatctccagcagtaccaacaccgtggagatcatactaggatgatgaacatgcttcaacaacaattcagtttctattttgtggtatttgcatcagtaccctcaatgtggatgctttcctcacagttatctgcttttttttttcagagatctcagaatcatgttgagaagaaacagaagccactaacatctgacaagaaaaaacgcaaaattgaaaagtaaagtggatggtcagaaatgttacaagtttttccccctttctcaattcgcatatgctaacttttagaggtaaaatcatgtgatgtttctcgagcctttgctggctgttttttggtggtcgcatatgccatcttttagaggtgaaatcatgtgatgtttctcgagccatttctggctgtgtctgtgtaagatttgttagcgacaatttgctgatactatgagatcacgttgaatgggaaattaattgtctcgcttttttcactttcatgttacaagaatcctatttatggtgaaaaaaggttctataacgtttgtcagaaacacactcaaaaagcaatgaataaaataccacgaatgcataataaatttccaagtttaatttttattctcttgttacgttttctggaggaagaaaagtaggtttgaaagagatgatactggcggtcataaccagggccgtttgcgggcgaagaggaggtcgaagagtgcgcttgaaaacacaaaaatgaaaatggtgagcattgcaatgggtcgataccaccgtaaattggctgagtgtaacctatcgcatgatttttttttttaaccaacagctttttatcgggagttttcatttttatgtgaccaggtaggaacacagttattttagagtgcgagcaggaactctttttatagtagtagaaaaaaaataatgtaatcgatcaacattacgggagatcaacgagcgattgatctctacgcgccttcgagatactattttcattctaaaatataataatttttagctatatatatggccataccttcttcggagagaaggtagacacatcaattatttcgcgtgttcttatgagttacgagaactaacccaaatgtgaagttaaaaaaaatataagtaaggaaaaaaaataaatttccaggttatttttaataatgtttattaagctgtaacagctattgaatttttgaacttggttatataattgattcgaagtttatttcctcattcttcgttggttgccttctcttccatatccatactgctaaaagccaaaagtagaagtgtaaacgtctcaatctaaaactaatttttattgcaatgatcacgtttcttcagcttgtaaaccttcggccttgtttgtttttgcttttttattcttacaattctgcttctttacagtgattttcagaggttgaattattaaaagctaattctgatttgcctcttgataagaaagaaacgtagaatttatatgatactcctagggacagttttagaacattactcaaaatccacaaaagcagctccatatcagcttttcgatgttagtaaaacaacatactgccaactactgactctaaaacttctatagccaatctaatagcccatttatacaatagttaactataaaaatatactacaccattaatacccggtcccacctctcatacacacataatatcttggagtccgtgttgcagccggctataaatctgtagcccgctttattatttctcttctattttcttttctcgatatatggttatagccggcttattacttattgtacctgctctaagaatcaagctgtttgtttttgtcctttaagcaaaagaaacatggcctagccagacccggataaataccttccaagttccaagcaagaccaagaaaacaatgctaagtctggcttaatgcctcgattgtagtgttgctgtggtcatttttcaaacaacagccaaatacccatgtgttacaatggattttcaaaaaatgcattcataagttttaaacttgaaaagttttgtatctgaatcctagaagagaacacttagctcgcgaataaacatgaatccacaaataacattattaaaatccaaacgcacaaattcctatcagggtgtctgttaattagaggtatggaggtgtccatcacttatcagttttatttataaagtacaggttattttaggaatggtttgtgatagtaaagtattttgtaagataactgttgagtggtagtaccacgtggcttcctttaaatttcaaaaacatacacaaggctgaaaactatttttttttaaatgttgcttcaaataattctagaaaatcttgaaagtattgagaaactataaaaatcgcctatagtaataaaacttatttgtcacataaaaaacaattttagttctagaaactattttatgtgacaattatatttgattttgtcggtgcataatttgtactagttaaactactctctgcatttttaaaacactacctttagttttaatatgacacattaggaagctatgatatatgggccctatgaaaattttaagtcaaattttgctacaggacactgctatagtgtggttttagccgtgggacactacccaaactcacttttgagggaaaacacttcataaacgtgataatttgtcaatggacatcacgccgattaaaataacgatttccggttgaggaggagagagaaatcacgtgaaatgtcaaaaatgcccttggggccacatgttagctctccatctctcttcctccctttcttttccttctcccttcttcttcttcctcccaccgcagccttcttcttcttcctcccaccgcaggtgagcagcggcgtaacgcacagtcggcgcgacagctcgagccggggcggctcggcgcgcggccagggaagcggcggcgcaacgcaggggacccaccaccaacgatgacgaggcgcagtggccacccggcgcacgacgcgacggcaagcggtggcaccgagcacacgagcacggcggcggcacaatgtcgttaaaattgggcacaaccggctacttctacacgatctagggttcatagggatgtcaatttcacgataatataacctatgttgcattgggattacgtttacccacagggagcacaacggtggcacaatggcgaccgggccgacatggctacggaggcgcctgcccgaaatcaagggggccaccggcttctaggtcactaggtgaggctcgcgacgtgcgacgtggtgcggggcggtgcagaggcgaaacggcgtcggcgcccgattcttggcatctgggatgcgacattgggagcaagattccagcggtggcgatggcgagggcggtgcggcggagcaaggccgggtcgagctcgaggccgacgaggaaaaggaagaacgttggcgtcgtcgaggactccgacggcgtcgtcgaggactccgacagcggcgtcagcgaagtacgccgtcaggtgtggaggatgaggtcctctcgcggccaccggtgccgactaggccgcgcgcactccaggcatcgccgccgtcaccgagcaagccgcgaccaggataagagagaaagaaaagaaagagaggaagagagatggagagctaacatgtgggcccaagggcatttttaatatttcacgtgatttttctctcctcaaccggaaatcattattttaatcagcgcggtgtccattggtaaattaccacgtttatgaagtgtttttccccaaaagtgagtttgggccgtgtccgacggctaaaaccacacaatagcagtgtcctgtagcaaaatttgccaaatttgaattgggaaaggatgtcaaacacgtggttttagagttgagagacttctacttttagccattactaatgcaaattcgaggttcacaaaactagtacggggttgtgtccttgtgggcctttttttccagtagagtgtaactacttgcaactttcaagttgtgcccgtgtgggtcttttcttccgatggagtgtaactatttacaactttaagagtccctttgaatcacaggaacgagaaaaaaaatagagaaataggagaaaacacatgattctgataggactctgatatgttatggggggtcgaatggactttattccttctattttagccattactagtgcaaattctcatgttcgaggttcaaaaaaactagtatggggttgtgccctcgtgaaccttttcttctggtggagtgtaactatttgcaactttgagcgtccctttgaatcgttggaatgaaaacaaacagataaatagtaaaaacacaatattctgataggaatgcaaatgcaaaataaaggattacaaaacaaaggaataaccatttgattcaaccgaaataaaaccgtaagaattggatgagagacatagactcaaagcaaaatttccaagaggtagaagctcttgctaagttttctccaaaatctctataggattgttcattccataagaatttcaaatgattggatagaattcaatcttttgtttcaaaggtcttttataggattttttaataggattgaaatcctctaaaattcgtatagtattccttcaaatcaaagaggcccttaaaaatagataatctctaaatgccatttttaaagttgattctatgtgttttgccatggaagtgtggtaactagtttttttctacttccgccaacctggcatggcacattgaggtgctaacatggaccactaatgcataaagtccagcttgccccttctggagcccaccaataagagaaggacacagacacatcacttagaacctgatacactcacagctgtagggtgacctgtactttcgatgagttgaagataacaaaagttgtcgacctgactacaacctatcatatgttgttatgttgcgccttagcgatcaatacatctttctatgggttattgatctggccggtgcatatcaaccttattcttgcaagtaaataaaagaaacaagcaagaacaaggaaaaacaatataaattgcaaacagtaaataaagctcatgacaagggaggtttcaaagatgagtaactagacggccctgccaacacgcgcaattacgaggtaaagtaacactggttaaactttaaaataacaaaactctgaaaccctgaagaggtatctagatatttaagaggtgggaggacgactaaggcatccctagggtcgtggtccactaggttggggagaactctacatggggccgcacttgggttaggccctagatgaagttacaagtacatagaggccattatagatgacgcaacaccttattcctagagtgccgctaactgagattgaaatttgaggcgatgctgaatccgtaggaaataaggatctgagggctttccatcaagtacttatggacctaaaatgaagctcgtatgcacatttggcggtcattcgaagtcagtgatgttataggtggccaaattggatttcaaaacttgtgtagctgatctcaatgtctttcagtgaacctattatgtgagcaataggttgtatccatagtagttaaggtcttgtaacatcattaattattttagcaaatacaactattctaggatgtgagggcacacaacaaagcataaggataccacgttgctcgccttgcttagagcatccctaggagatacgctacccgatcctccatctgtaatatggtgtataagagcggaaaacccacctctagcagatgcaccatccagtcatccaaaagtggcggatgttccaaacacggagagagaaaagccaaaaatagcgtgtctctctcctcatgccaaatcacaaccaacgcgtatggatcaacctcccacccccatctagacttccgcgacctcctctccatcgccgtcatcaccggctagcaaaggtgagtattctgtgccagtttttgttttattttcagcggagggaggagagggagggtgtagccatggagtgagagtggagagggagaggcgtaccagatctagaaggagggtgttccttctctgcgccctcgtccagttgtccaccaccgaccctcggccgcacgcccgccgccgtccctcgccagcttgcctgccgcccctcacctgcccgaccaccgccgacactcggtcgcccgcccgctgccgtccctcgccagctcgcccactgccccttgcccacctggccaccgtcgaccctcggctccacgcccgccgtcgcccctcgacagctcacctgccgtcatgcctgctagctgcatacgtgaccgactgctccatccctctgcagagaagggtagtagtagaaaagaatcggttcatttgaggagagaaaagatagtagtacgttacttgcattgcttttatgtttattgagcagagaaaagcaatagaagtagagtacaaactagatttatgttgctatatttttgctgtgcttttatgttcattttatttatgttgctacttttttcttcctaggtgaattcatggacagctatgttaatttgttgggttcaaacattaatgtagaaacttgggatcctagtcaaaattctcccccaactggacagtagccacaacacagtcctatggttagtgaacaaccaagtgctgaagttggtgggatcctctagacccaacaataagagatcaaaaaaatttagcattgcggaagatcaaatgttggtgttagcttggctgaatacaactttagatgaaatcacaggtgatgagcaacatcgtgactcttattaggcaaggattcatcaatacttccatgaaaacaaaaaattcccctcagatcgtaaccaaaattcacttaacaaccattggggtaccattcaagaacaaattaacaagttttgtgggtattatgagcagattcttaatagacctcaaagtggaatgactgttcaaaattatgtaagcatctaattgagctagcatctttctttcttaaagaatgttgttttttcttcttattgaccttgccaattaatgcagataactcaggcttctactttgtacaaatcataacagaagaagacattttttaaatgcattgtcgggagattttgcatcatcatccaaagtggaatgataggttgtcccagaaaaagccgaaggctcacatcgatcctttggtgagaccatatgcaagcacaaactttagtgaatttctttgcagccccgacattaatatctctcatcctttggtgagaccatccgggaaggtggaaaaggcataatgcacacgaggtaatacttcttcatgctcaagtgagagtagtcttgtagttattgcattaaataacatgtggtcagagaaaaaggatatgagtgcacaatctagggaggaaagaaatgactggttggctgaagttatttcacttgagaaagagaggttgaaagtagagaaacgaaagttagatttataaacctatgaaagagaaaaaagaattatgaatatggatcttagtgctatgtatgggccaagaaaagcatattacttgcgtttgcagcaggagataatatcgcgtcatatggatttagttcatgatgtatggatatgtactatttattaccatttcttaatgggttgcgaacttttatgttgtacgccgtgtaggctttgatgaattatgtactattgcttgtaagagctttatgggttgtgaatttttatgttgtatgtcgtgtaggctttgatgtattacgtaatggttattgttagaatttaatggtttgtgacctttatgttgtatgaaaaaaatgctatgattaattgtgagcacaaacaagttgcatacataattagaattgcatacataattgaggattgcatacataattgaggttgcatacacaattgtgttgcatacataattgatggattgcttacataaatgaggttgtatacacaattgaagttgctcactacataactgggaggttgtatactacactagttactaccatgaaattgccatagatgctcaactagatcttcttgaagctgagagcgagtctgtctatttctaatgttatgatgattctgaataaagtcatgcagttcagctataggggtatgcaaaggtgtgactcgctctccctcatcattatagttgtagcaaagatcttcttcatccctctcatcttctactattatatcgtgtaaaataatacatgctgtcatgatttcacttaatatgtctgaataacaaaatctagatggcccacgcacaattgcaaaacgagcttgtagaactccaatcgcacgctcaaaatctttgcgatctgcttcctgttgttgggcaaagtgttttttcttatttccttgcggttctgatattgtcttcacaaaagtggcccatgagggataaatacgatttgcaaggtaataaccaattgtgtagttgtggctattgatttcataattcacttgtggtgcctatccttttgctagccttgcaaagagagggaaggatgaagaacattaatatcattgtgaaatcccagcaaatcgaagaatgcatgccaaatccaaagatctcttgaagcaacatcttccaaaacaatagtaggcatacttgattttcctttatactccctccatccctaaataaaagggattttggtaggatgtgacacatcttagtataataaatctggacataagcatgtcttgacataatgaatctggacgaagagagtacatgccttgccatgctgaagggcaatttttccactcccaatgcatgcaatctatggatcctagcattccagaaaaacctctctgctctcgaagtgcaagtaatctaaaagtgtcagcactagttggataacgcaagtactcgtcttcaaaaatctcaacaatagctctcacaaaccttttcaaactctctatagtggtattttctgcaatttgcagatattcatcttgagtagcggctgcgactccattggttatcattctaagtgctgcggtaatcttttgcaatggtgatagacccaaagcactggcaatatttcgttttttcacaaaataattataatgggctaccacatcattaactatgcgcaagaaaagaggacgactaattctaaacctgcgcaacaaaatgtgaattaatagaagtagtgaacaaaatgggatcaaccaaaatatgtaaattaattgcaaacctttgccggaataagactaggccatatgtaggatgctccgagaagtagtcgtggtgcaacctatcatggccggctcgatgattacgacaaacaacctaatgaccaggaacataaccaccttgtcgtggagcattcgactgctcatattcatcttgcgcgactattgctgcagtaacgatgatttcatcgccggatgacgataattcatccaacagaacatgtctcaaaatgaatctcattgagtgatggaagaactatgcacaataatgtggatggagcaaaaagatagcaagtaatgtagcggtatgtatagagctgaactttacatgttgcatgtgctagccgttggataatttgaatgagctagctagccgttggaaatgtagccgttcgaaatgttgccgttgcacacataaaaaaatgcttcactcaattcaaatatatcaattaaaaaattacccattaaaaatatatccgttaaaatttactcattttgaaatattatcgcgataaataacaccgtcaaaatttagtcgttcaaaatatatcccttaaaagtacaaatgtaaggttagttggagaatattaccccaatataggatggtgtgatatgaatgatctgttggagtgaaagggatatgaatgaggaatcttttatcttttttggatgataatccatatgggcatttggaggatcaaatatggatgagctcctgggtatgctcttagaagctaagttctcgcatggtgcagttgtattggtgcatggtaacaatattaagcgatttggttgctttcttcttccgaaccaacgtgactatttaaatcaaaacaacacaaactcaagataacattattagttgatatgtcccaaactact

SEQ ID NO: 11985 - DNA, 12509 bp, Oryza sativa
  unsure (1)..(12509): unsure at all n locations
aaaactgctactagaaaattgcaaaaatatcactagaactgtcattcgagtggcatccttgtaatattgaaaaaaccgatggaaaatttgcaaatgccccttttcctaaagttcatgtttagggtttggtccctgccgaactacctggtggcgatcccatcagcttctatctgaatattttgccgcctgattggttggagaagaaacaaggtcaaggaagtcttacctggttttgttgtttggtacatgtgtatgcctcctcttttgttcgtgtgtgaaagcacgggtggattagattctaagtgctttggtatatcgtcatcatattttctgaattaatttgataactgttttatttggtaccgtaaaagagagggataaattagggtactcgctgttgggtactcatcattagtcatgatactactcccccgtctcaaaatataagaacctaggaccggatgagacatatcctaggttcttatattttttgatggagggagtactttctagcttgctatttttatccacaactataggaggtcctaaatctaaacacatgtaaactttgtgcaccaaatatattcctctatcattatatttgccaaatatatgacatatagtattagttgatctagcaaacaatttctccttcaaattaccaaactctcaaaagtcatcaaactgagcatggcttagagtatttaaagacaacagttgaaattcttcattctcgctagaaatgatcacataaaagaataactataggaatatcttgtccattcacaagttgtggcttaaatatatgtgaagtattatcacacaactcaacaaggaaatcttgatgtggctataactaccatagatacaaccattattcgaatcataaatcaaccataagatatcgagataaagccgcagaagttctgtaatccaactcggccacctacaacagtgttgacttcaaacagccgccaaatatgtatacgagctccattttgagtccatgagtacttgatggaaagctctcggagtgcgctttccaatcggatatatacagcctcatctccaaattgcatcttagttggctacaatcatagaaaaaagatgttgtgtcacctatattgggtctatgggcttgtagaatggcataataaattcgatttgagcaagattataataaggtagctcatacgcttcatacagagaaaccgtcatatctttttggtgatgaaggtgttgatgtcgagcatgctatctcatatcccgttgtgtgtgcaagaaaaaacatacacaaaaatatacacgctcctatcaactactaggtagtgtaggctcaacaacaccggatttggtggtgatcagggcagaaagaagtgggaaagtggcagcggcctccttctcaaatgtacagggcgccgtcaccacccaaatgtacagggcgccgtcaccacccagaaacattaggcgaattagtccgagaataatttatctactctaatctaatccgatgtcgtttgcttaaaatgggatggaagtgttacgtatcaagaaaaatcagtggcctgtgctgtgcttttggtcaaaagcggaaaaatcgtatgctactacctctgccccaaaatgtgtatccgtgggtatccatatcaaacgtttgaccgttcgtcttatttgaaaattttatgaaaaaattaaaaagaattagtcacacacaaagtacttgctcatgttttatcatctaataacaacaaaaatactaatcataaaaagaattttaaacaagatgaaccgtcaaacgttggatatgaggggtattttttttggactgtctatgtgacatgcggcttaaaatttttgttttgtcaaccgtttttttttccgctggccgtgcgatcggcgcacggacgatccatgcgcgcagaaagaaagtagcatgatttttttttcttttttttaggccacagcccatttctgtttttttaggccactgcccacatcctcttttctttaaagaaacaaaaagcccgtcacaatttgtgcagaaaaaaaaggaaaaagtacaccgcaggtccctcaacttgtcatcgagttacagaatcatcccctaaccacaaaaccagatatatagcatccctcaacttataaaaccattcattttaggtccctcggtggttttaaacctggttttgtcctatgtggcggctgagtcagcgtgggacccacgtgagtcccacatgttagcgtcgctacgtcatcaccctctctcttcccctcctttctctctctctcactcttttcttttcttctcggctgaggcggaggccgccgggggagaggaggaggcggcaggcgacgaggcggcagcaacgccggagaaggcgagggcggaggccggtcgcgaatggcgtcgacgacgctacgtcgccgccggcggcgaagcggccccgcgcgggcgggcgccgcggcgttgggtgcggaggcggaggtggggccgggcaccacgacggtgggcacggaggtggaggcggggctaccgggcgcccgcagcggtggacttggcggactcggagccccgtggaggtggaggcccccgcctcccttctcaagcggcggcgacggcaacgacatgggaggcggcggtgacaacgatgtagagataccgctctgctcccctgatcaccacgacacagtcgcccgtgcgcacgtagcacgacgagccggcgctgtggaggctcgactcgagtactcgacgcgcagaaggctggccaatgtcgccgccggcgaggccgtggcacgcatcctccacgccttcctcggcaccaagggagatggtccagtgccctgatggcgaagccaccattagtaaccacctgctaacctcctctcctgtcttccctgtttggcttacttcctgttgttgggtgggttgcttccaggggatctggagttctggacatttcaacggtatgctttgaagcttagtgcctttccttagatcaacatgcttgtttgattcttgatttcactggaatgttctgtacgaggtgcaagtgtagcccgtcgtttctgcagttgggttaattgctgcactagtgagggaatgtgcaccctaaagattaaagatctgtttgatggatcagttcttgtcatacatgtgtcgatttgggggtctgggtttatggttttagcagttgatcgtggggttatgcatgtatgttacttatctgaatcagtcccctgaccaccacgccacggtcgcccgtgcgcacgtagcatgacgagccggcgctccggcagcggaggcgacggtgggggtggagtcggcgacgagcacggctgtgagggatggcttggcggagagctggagccgctgattcatctatctctcctgccctcctctcacccacctccggcgggagcacgagcgcgccgccttcctcgtagtcggcgttcgcgtcggcctcggcctcggcctcggcaatgctctcgggattcgagtgtgacgaggcagacaagtacagtggcgttggcaccaggatggtggtctccatcacagccggcacgccgagatgacgagcacagggggctccgggcgcggcgacacggacgcggactaccgaaagagagagagagaggaggaagggagagaagaggtgaaagaggagatgatgacgtggtcaccttgacgtgtggggcccacgtgggtcccgtgctgactcatctaccacgtcagataaaactggagtcaaaaccgccgaggatgcttgcactggttttgtaagttggggatgcgttgtatccggttttgcggttagggatgattttgtaactcgagaagaagttgagggaccttcggtgtacttttttcccagaaaaaatacaaacaaaaaaaagcccactagttcacatggcccacatcccacagcccatgatgggattaaaaagcatcatgacgatttatctttgttaataaaagcccacacttgcaaggaggagagaaagcaagaaagaaaagaccatatacacgtgttttgtccccataaaaaaagcacaggaaaaagaaagatacacatatcacgcctctcatatgccagcgtcacccacaatcatcacccgtccaccaccttgcgatccaagaaagaaaaaaaaaagaaaacaaggggtcagctcaatcgggaaggagtgaatattgtgtgcaacgaaaaaatctccatggatgcatcgttgaagatgaagagagatgagaagagaggcgattcaatgctgaatattggggaagccctaggtatgtgcagaaatagatgaaaaactctaggttcaagtacttacctccctgattctgagtttgaaacccatgaacttgtttttctatttgactatcagatctggaatttttcaaatcactctgtgttgctttcatttgtggtggttcaccttgtcttgatgcatgaaccatgtttgataaaacacacttggttcagaataaaaactgaaaaatattcagaaaactgccagtagataaagttgcatcatgcaacttttgattacaaaaagttgcattacccatagtacagagatcaagacacaaactagttcttagagcccctgatatgttcaattctcaatgaaaacaactgaaaattgcaaactatataattccattagttgtctggagagcagagtgtcacatgagttggattgttctttctataggtcatgttagttttagattttcagtagcttaatagggacaaagacaaagacaaaacatatggttcttgaggtttttttttttttgctaccgtatcagatcacaaaacaaagctatggtaggtataagttaggtttaatctgaactagaaagcagttctcaaaaaaaaaaactagaaagcaaaaaaaaaaaacaaaactgtatacaactagtagaactgtactaactaaaaatgtgctgccattttttctggagatatatgaatggtagcgttttctacaatcttgagtcaattcgttgaacgctaattacagcagaaccgaaagtgtgtagaactctagattctactagaaatggtcaggcatatcggaaactgaaagatccagtctgaacagaaacagaacagaaacagtttgaacagcagtcttgcctctgtagtttgcacaatgtgaagtagcacataggaattgctcactttggcacatttggaattgcttgggtctccagataggcatcgtcagccatggcccctaggctcctcttgctctgaactcctacagagaaaaataatagaaatatgtagctaaatcttataaaagttgataaagacaaagacaaaaccaacctagtgccaagaccaacctattgccaagacgcatgttgcaaatataaaaatctaacaaagacaaatacaaatacaaagacaaagaaaaaaaagacaaagacgcatgacgcatgaaaatataaaaatctaacaaagacaaatacaaatacaaagacaaagaaaaaaaataaaaaaacaaactcagagagtgtgcacaaagctgacacgatataacttcacaaattacaaaaaatcacaaatattacatgttgtgtttttcaggttgggtgaaagactcacataaagaagattatgtaatggcggatatgtatgatcaacagtccttaacgagacatcagcaggtaaaaatggttcttcattgcattctccctattgtacctgacaaatattaatgaaaaatatcatctcttgtcaggttcaaaataaattgtgattagagtttacatcaatttgcactggcagaacatgaaaagtttacatcaattcagctatctcagtacatgtatctacaaaactgcagctaaactgtctattgataaatatccatgtatccagtgagaaataaatatgcatcttgggggcgaacttgcttgcctcgtgttctgctgttggaaacacgtccttgccaaccaaaacagaagaaaccatcgaacccttggcaactgatacgccaagctcaagggccccatccgtagcaggaattgcctacaagtttttcatgagtgacatataggggaagtcccaaaaatgtatactacaaaaatccaaaagatacaccacaaaagcatgacaaagttataatttcaggatgatcatgccacaaaacactcacatataacaacaaattatggtcacgcgtgctgttcaatgcaaatagtgtcagcatcccatagtctagttgagaaacatgagataattaaattgagcgatcaaatcatcgaaagccttcgtttacctaacaatgttgataatacaatgggaccaaaaaatggaacataccaaatttcatgcagccaccaaattgcaaactgaacatcaacaagccttcattcggttgcagcgcgcgtcaagtactcaagtcgatctgatattcagttttagcgtctctcttgcactgtcattttttagagattttgcatgataaatagcgcgcacttacactgtaggggcgacaggagtgcacagccatgcagttgttccaacaaaacagatatggattggacatagcggataatagaagaagaaatacgctaccaccagacaccagtgcgagggtgacatactgatgaatagcatacaggccaccatgtactgaagtatactgaaagtaacttccacacgtgcaagggtagaaaaaaaactttgcatatggtataaacaaaaactgaaatgcttaccactccaggatgtcatagtagatgtttagttttttttctcagacaacactaagcacaaatcaaatacaattttgcacggggaatcaaatatgagtttgcacggggcgatcgagattagatggccacattaacagatctgactcacagatgaacgtttccaaaaacaaataacaaaaaactaacacaaattacaaaacaaacgaaacctgtgtagccttgaannnnnnnnnnnnnnnnnnnnnnnnnnnnnnttggaggtcgatttgcccccatggctgactgagagttcatggcaggggcggatccaatgggtaggcttcatcaggctcgagcctaccctccgatttttgtaaaaaaattttaattatatagcatctatcccatgggaggagttggagaaggcagggagaagagaagaggcgaacaactgtctctggcggcacgaggaagaaaaataggagcgatggaggtagctgaaccggtacgcagtatgttgcttcttttacttaacatttatttatttctaccatttatgtattactaattttcttcatttatatattcaggtggctgctcactttaatctttgctaaggccaaaaaaattagcatcttaagtcaaggactcaaggtattcttttataagtatgtttttctatttaatcatgtaagtgttacatttgaattgataatggcatatgcttcattttaacattattaacttagatttagacttatagtccaacctatcctcaattttgtcctggattcgccactggttcatggatcagagatccaactgcgagatccaccaaatggttggtcccctcacccgcctgagagagatggttggtcgcctggcccaccggagagagaaccaccatggccaaatcagtgccacgcgcgaagtattccgtcgggggctcgctgacagacgtggctacctcgcggcggagcagcggcgacgcggcggagttgcggcgatagcgccgagaactccgcctctgcctgtcctctcgaacgagcggatgagaacgaaggagaaaaagaagcgaattgttttttgaaacagtgcacgggcgcgtgtgtagctgccgcaatgacatgcgtcatgggttgggctgggtatactgtgctgcatgggccacgggaacagcccacagagaaagagacagatgggtcgggccaaaatgtgctgcgtgggacacgtgaatagagaattttttttatttatacttttttttattaaaatatttacaaaaataatttgttgttttgaaaatttacaaatctaatcgcctgccgccctttgggagggcgatttttaaaaatcgcccttccacagggcggcaagggacctaaatgtaaattttccagcataacttgttagctctatgattttacaatttaaaattatattatataaagtcagatgaaataaaactttatatcaaaagtgtagagctcaaggagatctacaattttgtagttaataactttttcatttaagatgtccaaatattcgttataaaatataaaacacattttaaaaaatctcagatctacatttcaaacgatattggatggagataaactttatataaaagttgtagatcttgatgagatctataactttgtagtttatcacttttccatttaaaatcatttggagtatcgaataagcattattagtttttaagcaattaaaaccggtgggaagggtttgaacacaaataaaaattttgtatttaggtcccttgccgcccttggagagggcgatttttaaaaatcgcccttctagagggcggcaggcaattagatttgtaaattttcgaaacaaaaaattatttttgtaaatatttttataaaaaaatgtataaataaaaaaaattccgtgaatagatgggttcgttgcacgcatcttgagcagaaatccaacgggcaagaattcggctgagaatgaaaaaaatttcagcaggcagccgtctagtaattcccatttttttttagcgggttgttttgtgtgccgtagatggaattttgtcttccctaatcggacggctactcgcgtcgggtagggttgtgagtttgtgacgtcgtcccctgcaaaaccacaattctccacacgcagccgccggcgcccgtcgaaatgctggccaggcctgggcggctcgccgcttccacccttcccaacgattccgccgccgccgccgcatccaccgtcctctccatactccgcggcgaggaccccgccagcctccccgcggccggcatcgacccgtgccccgccgtgttccagcaactccgcccgtcgctgcccaccgtcccggactccgcgctcccggcgctggcccgatgggcgggcgaagccaccgccgtctccctcctgacgtcccgcggcctctttgctgccgcctggcgcctcctcctggccccttcccccacgcctcctcccctcgccgccttcgccccgctcgtccgacgctacgcccgcctcggccgcgcccccgccgccctccgcgccttccagttcctccgccgccaccccgaccgctacatggccggcggcgacatccctgccgcggcgtccctgctaaacatggcggtcgacgcgctctgcaaggagggccacccgcgcgcggccgtggagctcttcgagcggtggcgccgcgaggagcccgactcgccaccagatgagcgggcttacaatatccttctccacggctggagccgcgccggcaggctcgacaaggtggggaaactctgggccgagatgcgcctcgccggggtgcgcccgacggtggtcacgtatgggactctcatcgaggggctctgcgtgaagcgcaggccagaccaggcgattgcgcttcttgacgagatgcgggaagaagggatcgaggccaatctgcttacttgcaaccccattgtgtacgctcttgcgcaggccggccgattccaggacgcccacaaggtgctcgagaaatttcctctgtacggtgtcgcgcccaacatttccaccttcaactcgctcgtgatgggctattgcaagcatggggaccttgctggggctagcagtgtgctcaaggtgatgacagaacggggcatttcgccgaccacaaggacatacaattatttcttcatgacctttgccaagaacagcgatgttgagtcagggatgaatttttatagcaaaatgatcggtaatggctattcaccagatcagcttacttatgtcctcttggtcaagatgttgtccagggcgaaccggcttgaacttgtggtgcaaatgatacaggagatgagaactcatggttttgagccagatttggcgacgagtaccatgctgatacatttgctttgccggcgtcatcaatttgaggaggcatgtgctgagtttgaggatatgtttaagagaggaattgtgccccagtacatcacttaccagaagcttatgagagagctcaagcgacttggtttggttcatctgatccaaaagttgacaaatttaatgcgctcagtgccacattctacaaagttaccaggcagctatagggataaggaaggggatgactccatggaaaagaggaaattgatattgcagaaagcacaggctgtttcagatgttttgaaggagtgtaaagatccaaaggagttgggcaagctcaaagaagatgaagagactgatgttgaggtcgcagataggttagtagccaacattagaagaagtgtatatgggggtgcctcaacgagctctgtaatggcacctctttcttgaatatggagttgcaaaaatgaaaatcataaagataagggacatgattgcatgtgaggggatttactgatagattgcattgttcatctcagaagttgaccacctaaatgattcgtgcacatgtttactgttgttgtttgggcccttcaagataaaagataacagagaagaggtagtgacatactactgtggttgtggtttactggatattgtcccatgaaggaattagctggttgatgtgtttcttgttttagggaaacattgatatggcagttatttactgatggtaaatttctaacatgagatgtcttttcttgatgtctaaaaatttcatacctgaacatttttgtgataaatgtatcttattgattgcagtgctcatctgcagatgtcttggattgctatgagacctgtgtatgcctcatgcagtgatattgcattgaatcaggcaactcaggaaaagatgatgcctcattcgaagtctaaccagtgaacatagaattggtaggacattatttagcatgtggcagcccttgggtttggccgcttgtgcaactcatatacacaaaattttccattgtgtaaagaattttccgttgctttgttggtcggatacttcttcagatgctgttgttaaattgagatcatttagaaatcccatttcctgttaaacaaatacaattaaactttgactctccatttcctttatgttcagataatcttgaaataaattgctcttagaactactcaatattgctagcatggctagaaatggactcttgggatcttttcaagaattgagttcgctcacccttctcctttgccaagaattgtctcatttgcgtcagtttgttgttaaggaaaatcttggtgctcatttctaactacctttatcgcccattctgacaacttgctgatgatcaataggatagatggagttatacatgggggactgatgtttttttttttaatttgcatatgatgggatcgatgcaggttcctaagccctttttgtggacactgaaatccaattgtcttagtaagtggaaggtattctttaatttttctggctgctgcttaaagataggaaatactaaagatttattaaggctgaagaacatatagcgattgagagaacatgctttatactttgtcataaccaaatcaaagaaactgagacatttgtttttcacttcttacagttagagatgttggacagatggtctgccggtctggtttgaagtgctgtttgttgctagctgacatgattcacgatggaacaaatgctcaaaggaaataataaccatagcatatttgtctacgagacaatttagaaccatcgcaataaattaaggacttttttggcagtaaaagcctccatgcaagcctgcgttttggtctagtttttcttatagttaatctaagggtggttgtttttataaatcatggctgaatattttgcttttttttttctttacatccttctccttcaactcttcttgtaaataaatctcttttaaagaatttcagtagggatcttccctcctgtttacgtgaaaaaaaggccgaagaaattaacggcagatggctaattaaatgtggagttccaagtttgtttaacaagcctaatgtccaagaggatgagcttaattctttttagattgtttataccggatcattgaaacgaactattttctccatgcttcaaaaaagcaatttcttataaaaaattctttattatattgtttagaccacttattttaagttatttattaaatttgtttatcaaaacatttaatttatcctagatattcgccgtaacaatccgctcaatacattgtttcagatttcaagcctaatataagcacacctaacttgttactcgacacttttctatcatcatacttcctcatatcatggatcttcgctaacttcaaagttggagagggaaggggctagcaacttagggtatgtttagatccatttgaaatggcaaatggcaaaa

SEQ ID NO: 11986 - DNA, 60730 bp, Oryza sativa
  unsure (1)..(60730): unsure at all n locations
catctatactctatggtggtggctgttggtatttgctacgcatactgataaatccgtaagcgcacaagtaatgatgtagcattttctcttagagtattttaagggtatcaaaaataaagacgtgtgtgtactatctacaaacagaattcccccaaggacaacaattgatgataagattggcaagagaggattcatatggacttcactagttgacttaagttaaagatagaactctatcgtatgtttcgcaccggctatcccttaatctgttaggttgagtctggccttgagctatatgatatgcccgaacgtggagggatgcaaagtacgggcagggctgtcaccacctgctacccacctcactttgcgtggagcacacaatctctaaccttccacagaaacttccttctttatagagtcctagtactagagcagttgcaactaagcaacgaacccgcatcgatgagaatatttatcactcaagtaaactaagtaaaaaaaaactttactttgttgtgtgttgtgaagtgtgttgagctcctcctttcatagtgccaaatgatggttgtaatggtgattagtgaggttggtgcacacataacagccatagtcaatccaatggggagctgccacattgaaaggggtagccaggggcaccacggcttgttcagccgaactaggcctccgccttctggccaccgattttggacagttactgatacgtggactcttatgacggttaaagatggtttggccctatctcaaatcggttttgacagtcaggtgggccctttagttcttgtgctcgcgcttgattagtcagatgggccctttagtccttgtgctcgcgcttgattggccagagcttcatttttgtcagatgacggatgtattttttccttatttgacccgcatacttatatgtatcaaaactaatggaaatggttagtagtaaactcctaccactaagttttgatagtgtattttatttttttaacgcaggagttgatggttaaagtttatacttaacgtcaacaatggcagtgaatccgccaccacatcaactccattttattttttttatcaactactccttatgtactttatttttatctaagggacaagtgtatccataattcattcttatccattgcaaagcatgaatatttagctagttataaaaaaagcaacagtatagtaacaactttaaaagtgattttcatataaacaaaaaaaaacatgtttttaaggtaaaaccgatctttcaggaatagatcctctacgaaagtagatagatgatcgtcatacatctcttttgtatatattttgtgaaaaactgtgctagctcaccgaactaaattctgtaacatatgctttagtccctaattcgtgtcttcacacatatatagggtttgtttgggggagcgtaggattccgaggagcagttgggtggtagtcagctcctcagaacctggaaaagctgggttttccaacttctaacttctagtttatttcctcgattttacaactacagcttctcagagtttaaattaaaagctagactatttggagaagcttctgattctgggagaagctacagcaagtagaagctctccaaacaagcccatactttgtatctaagtctgcttcaacactttatctccatctatttgagattaatcaacaccaagaccaacaaagggagaatctgcatgtgtggataatatataaacaaattctccacaagtacatttgctctaaattctgtctaaattttgtaacatatataaacatcctctccgaattaaattatgtaacatatgctctaagggaccacctatatgtttgtcgataaattttctcctacaaatttgacagatgcaattatagtacaatcgtagtgtaattacactgtaacttgcatgtaagtttcacgtaattttgaattgttagatatattacaagatttgttctaatgaggaagaaaaaaaatcacagaacaaacatatgtgaaatgatttgttcccatgaccttcattttaccgaaataacatgttacagagagatttttaaaagttacacacaagttacagtgtaactacatgtaagttacagtgtaattacactacgattgtactatgattacatctgtcaaatttttgggagaaaatttgtcgttaaatatatagcacaattgggagaatttcgtttctaaaaaagttttagggaataccatgtgtaggcccaggcgcccagcctattaacgacccaactagggcctgttcaatgcgggactttcagcttctcagcctcagtccgagtcgaaggccgtagtagatctttttgctcggtgagagaacccgttaacggtgcgccgctgctttgctgttgctgtgtcgtgtggtcgtgactcgtgtgactcggtgcgtgagcataatccacacttccacagagagagcaagacgaggtgaagcggcgcaagcaacagtgcaacacgccaggcaacacggaagcgactagcgagcgagataattatcatcgtccactctatccgcctccagcttgccccgcctcggtcctcggaggtgtaggagcgaccgaccatggggagcgcgggggcgctgctctcgcactcgcctccggggctcggcggattccctcctcgccaccatcaccaccaccgtctctccgtcctccgttgcgtaccgctcctcccctccccggcgcccgagcccctcagctgtcgccacggccggcaccttcgctgcgccgccgtcgacgggggagccggccgggagacggagcgtccctcgccgcccgcacctcagagggaggagtcgccgtcgggcagcctcggcgcagccctcgaggacccatctcctcaacctggtgtgccccttatccttctccctttatgttgccgatggtacctcaagtactcactagcgagccgtttccttggctggaacaagtgttgcgattgaactgggaactggacagctgcttgctaaaaatcatgagaaaaaaaatgttacgaagggaatgaagaaacttagtagaacttcaggcatcctcctggtgtaaccatacgtgctacagatttaacaatcaacgcaatgaaactgtagattaggaatacagttttgcatagcaataccaactacagatttaacaagtcgcttaacatgcaatagttgctgaccgtgagctttcattgattcatttgagcttcatatatatgttcgtgaaatcttgttctgggtatattgagtactccctccgtttcacaatgtaagtcattctagcatttcccacattcattaacatcaatatgaatgtgggaggggctagaatgacttacattatgaaacggaggaagtagctaaaaagcagggggctatcctcctttggcatatctgatactaatatctaattaccccacacccaaaagacagaaaatctttctagagtgcaaaaccccagctttgagtagctaaaaagcaggggcctatccgcctgcggcatatctgatactagtatctcattactccacacccaaaagacagaaaatctttctatagtgcaaacaaaaccccagctgataagcaatagagatgcatgtgatgctatatgcttggtcaggtcagtcataagacgtgaaggctatctacaactggtcttaactctgtagttatgctaaggaaatctgctctgaatatgtagttcgtacaacggtacaagtgggttccaaatctagtcgcttttgttcttaacccatctttatgatcacccattatagatgtcatttgtataatcacctgttagagttccaacattttataaaaccattgatgatctattatgcatttaattttgttttccttcacttgatagttactatttttgaaacagttatgctaaaattaagttgtcaccttatcattgtatcaggatttagtgaaccatattttgaatagcaatgctatatcagaagggccatttagtatgagaaaagctagatttttaggctctgcttcagcctttagtgttaaacaaactgagtggccatgtgctacaactgactcaaagaaatgttaccgtaagttgctaagcacgataaaacaaagtcagttaatgtgtaagcacatactttcaaaacttcaactcaaagtttgcataatatagtaacttaaacaatgaaatccatcatgcagacataattgtcatttagcataatatattttgcataatatagcataattgtcataatatccttaaatctggaagttaggtaaaaactttcatccaatccacaagccacaacagaagaacccctaagtcctatgtgtgtatgcttccaaacatccacagaagaatcagatgaaattcatcatcaacactagctgtgtcttttgtaggagtaaaggaaacaactggaagagttgaatggatgaaacttatacagttttagatttgttgtggctaaaatctttaggctcaattttctagaagtattaaagaaaaatctatgtcattgcattgtacttatcataactattttattcccattgtgtatttttctggtgataactgctacatttatattcattgtacaaaatgcccttaattagtattatacgttggtggagttcctttttagagtacttgacaactcaaatttaacttgtacagtccaaaatggatcttttggaggtatcacagaggatgaagaacagagtagcctgtacaattttctttatccgagcaaagagctacttcctgatgataaggagatgagtatatttgatcatctagaggaacttcgtgacaggatatttgtctcagtattggctgttggtgctgcgatacttggttgtttcgcttactccaaagatcttattagaattctagaagcaccagttagtgttcagggtgttcggtttctgcagctctctcctggagaatttttctttacaacattgaaggtaaaactcttaacaaattaacatgacatactctaaatgcaaattaactttgtaagttttgcatctccctatggaaccaaccttgatgcttgagtaaattttgcaaaactccaactactttgataaaactatcgcagaagtacatatttaagccacatcattacaaaactacaaatttaggacagtatcacaaaaataagtagatttggagttttatggtaagccatggtaaatctgtagttttgtggtattgtggcttaaatctgtaattttgtcatgtttttgtcaaaatatttgtagctgtgtgaagtttgctgtttcttattaaatgtttcaacaatgtgcactgcactttgaagttgatcctggtcctgcgtggtgcgtagcacatggactggttttagtctggggagtctatccgttgtaaaggcatttagtgcaagcatattgtcatgggcattaggccataaggccaaggcccataggcagcccataccagttaagttagagataagataagattaagtcttacttagagttcaagttataccatctatatgaggatgtgattgtgtctattatcgattaagcaatgaatatcaattagtctaatctctccctccccacaatgttcttctccctagcctaaatctacatcccttctccaggagccgacaccacccggctatccttccggcggtggttatctcgtcatggcctcgggtcgtgacacatatgaactgtactgtagctatcaaaatgactatcattaagattgaaaatatttaaatcctccctcacatggtcaggaagcttaaacacaagtcgacatgtgtgggactgtttttgcctcccaggcccccatataatcacaacacaaaactgcaagtagcttcatttgcctatgcctgttgaagctagctcaggaagtttctcacttctgagtgccatgggtagcaagattggtgcagaaggaaaggaggtgcaggtttatgactcgtgtttttattacgtgtacactaggctcacattcacaaaaccacacagtaatgcacactgcctcactcgtctataaactgctctagagaccactagagtatataatcatattcattataattttttaatcaatcttcttgtgtactagatgttaatgacgcttatatcctctcatgtggtcgttaagcaattcgactcttgctgacattgttatttcaatgatgtgcaggtctctggttattgtggccttctacttgggagtcctgttattctgtatgagataatagcatttgttcttccgggtttaacaagggatgaacgtaaattcctagggcccattgttctgggctcttctgtactattctaccttggcattttcttctcctacacggttcttgctcctgcagcattgaatttcttcgtgaactacgcagatggggcagtggaatcgttatggtcgattgatcagtattttgagtttgtgcttgtgcttttattcagcacaggattatcttttcaggtaaacacatggtcttataagttttcttttttaacacagtatcaaggttgattgttgtcatattgtcctctgtttccacatgttgttgtaattgtagcaaacatagtaggaaagccagttcatggtaaccattactttattgacgattgaactggttcggagggtactgcctcaccttctgcgaagatcgtcgtccagatttctcataatagaataatttaatgggtgactgcagatggttaatctccatctttaacctgagtctctaccttcttatcataaaaatatagagattaactcaatcaatcatagaataattatgtaatctgttgttcttgcgggtgcttttgttcaatccatggttgtagtgatagggcaaattcaaagcaactaggtaagtaaattctatggacaaggttacaggatatcttgatcttgcataatctactcggttgccaattggtgttggaacctgtatgcttgaacaaatcattatttgatctaactgtttcaatgctcattgacttgttatctggtgctaatataatcatcaattaaatggctggtgtggaaacttctctagatgttagtgatctgaattatcagtctgatttactgccgaagataaagaaagagaataattgtagcaggaccatctcattagaatgaatatatcccctctcaaagctgaatgaacataatatcttgtatatttttatagtttccatgctattttttccaggtccctgttatccagctactgctggggcaagtcggtttggtttctagtgaccaaatgctttccatctggagatatgttgttgttggcgctgtagttgctgctgctgtgcttacaccgtcgacagatccgttgactcagatgctcttggctggtccgctgcttggcctgtacttgggtggtgcttggatggtcaagctaactggtcgataattcctactagtattttgtattaattagcatcatagtcatggcggtggttctggacaaatcgcattccccattgtaacatagttcgtataaaattaactctttttttctcttcaacaaatctcataaatattgtttttcctcttcttttgttctcctacatgctcctgaatcttatgtgctccctccaatcatctatttgacgttgggagagctgatgactaagatctcctaatgtcaaaaaaagattgggagtacatatgcctctacactcaaaaagatgtacacaagcaaggaggggtacatttttaatactccctctgttttaggttataacctctgttttaggttataagttataagacgttttgactttggttaaagttaaactgttttaaatttgattaagtttgtaaaaaaaataataacatttccaacctaagacaaatttattatgaaaatatattcaattattgatttgataaaactaatttagtattataattataaatattactatatttgtctcttgaaacagtttgattttgactaaccaaagtaaaaacgtcttgtaaccccttaaacggagggattcaggagcggagggattcaggagggagtaataaataattcatttgttcttgaaagttaattgactattgccctgcatttttcaactcaccttgcttgtttaccccaaaattcatgacatgaccatttcggccttggttaataggatgtgctggcatgggagaaaattcgttctcacctataaaaattaagtatgatgtttggttaatacttcccccgtttctaaatatttgacatcgttaactttttatcacatgtttgaccgttcgtcttattcaaaaaacttttgtgaaatatgtaaaactatatttatacatgtaagtatatttaacaatgaatcaaatgatagaaaaagaattaataattacttaaattttttaaacaagacgaacgatcaaacatatttaaaaaaaagtcaacggcgtcgataacaaaatcggtagtgatgattcaacttaggcggcaagtactgtaccttttcatttctttcacgttacgactagtagccatcaaaccaatacgtttggaaaatatatagtgaaaatccattattactacataaccattattactgcataattactagaggtaagtataggtataaaatacatttacaccaaatcttaagtttatactcagcttcatttgatagggaaaaaaagataaattttaggtgaatagtgtcctactactattgatctgatctttttttaactccctaataaaattgagttcgaacttgagattggtgagaatatatttcatgcctacacctatccctagttattttttgcatgaatttataaaacttttaggtccaattttaatgggttttcatttatttgatggttttcaccggatatgctccgatgtaggtatttgtgcgcaaattatttagatcagtgaattcttgtaccctagattgggttcaaaccctagatgaattcttgtaccagtgtgttggtgatatgtcctagagacaattaaagagatgattatatcacatactatgtttatatatttatcatacgttgtttcttgaaatagataactcattattgattaataaatatgtgagtccttcaagagacttttatgttgtatgttgttatttataaatgatccctgatgaaatatcatatgtgtaacaaatatggtttaatgattagtacatatattgattgatgatcatgcctcatagatcgtggtattaataatgtagacatatgttggggagcatgttgctggataaactcaatatgaggcacatcaagaactatatgtgatgtgccatcagtgatctcatttagtgttagttagaaacatcagacctgagattatcatagttcccaacatatgtagtcgcttacttaaaggttggtaaacgttactccatgattgggtacttataaaagtagtcttcgggtattttatgaaacatgtagttagatatgaataatcaagataagatttgccccttgtcgatttctaatatcggcaatattatttatggggtgcactagatcgagaagagatggtgacacagatttgtactggttcagaccctgaatgtgaggaaataccctagtccagctggaatagattggatatataccggtgtgcgtaggttagcaacgaaatagccaatggcgcgtatgaatcatggagtgtctaaccccttagggtttccctcggcgccctttgtatagagctagggtcgccggtagttagatggtaaggttgcccttataatttaggcacctaccatctatttataagggataggattaatttccttatcctacatctttttcttagcttacaagttagccgcatgggcctagggcactcgccccatcctatactgcacggcccaaacgcctcctcttaggtactcgggtaccctgtacctcatactacctccgtcccattttaagtgcaaccatgatttttcgtgcccaactttaattgtccatcttatttgaaaaaaattttcaaaaaattgaaaaacataagtcacgagtaaagtattgttcatgttttatcatctcataacaacaaaaataataattataaaaaaaattcaaataagatggacgatcaaagttggacacagaaatttatggttgtacttaaaatgggacagagggagtagtagccaccgagtattgagtttgatgaaggctagtggcatccaatgaagaagacgagactggctaagtactcctcccaaaatctccaaaaaaaaaataatgcaatatgctgccgagtttgaatcagactgctgatagcgatgtttaccaaacgggggaggctttccagacttccttcttagggaaccctttcctgggctggcccgccgaagataccgagggccataaataccccgggcgggagtgccgttgccctagattcccaaatcaaacaattattttctcttcttcttcttcttcgtgcgcccaaacttctcgtcttcggtgatttagggttttctctccccaagcagatcggattgaatccaacagatccaacccaggtccgcctctcttgttgaagctctctactttccgctgtcgccatgtctcaatccacaacggagtccgtcctaatccgggactaggccgcttcctagacgcactcgacggtgacgatggtgatgctggaggaagctgttgaggaggggatcctcccttctcgggatctcatcggctggcggggggccaccggggaggagttcccgaccctgaacaccgacgatatcatggtgttcctccccttctttaggtttggcctcggtcttcctgccgacgattttctccgagggctgcttcatttttacggtattgacatccaccatctcaattccaacttcatcctccaatcgccatctttatccatctatgtgaggcataatgcggtataaacccacacttcacgttctttcgttacctctatcaactcaagccatagccggggaagaagaaccccatggtggttggagggagcggcatccagatctggaccgagcggaaagcggagtttttcgatctcctgctcaggtctagcacaagggctggcactctaggtgtctactgctccaacttgttgcaggtctgcctccatataatggccatgccccgggcgtgaaggattgttggtacacactccctagccgcgatgagatggaccaagttagaggggtgctgaggggagtgcgtcttctaatcgatgctggcttgacctgcaacttcgtcacttggaggattcaaccactgaagagtcgtgttcacccagtctgggaatatttaggaaaggatgacccgaccagggagagcaatgagttgattgacaaggaccaggcttccgagaggttgaactagtttttcgagcccgagacgttggtcagcatggaagggtgctccaatcctttcaattgcagcaagaaatggccggaggtatgccctacccatgcctgcttcatatatatgtgtataaattggattgtgatcttcaacatctatgtccttgcagggagccgtgacctttatctccaaccctccactgcttgggacctcgagcaagaggcgtgttgacgatcccccttctagtagctgctctttcaagcatgtggcctcaaagcagccacgcaccccgggtggccaaccggtaggtccaaggttagtgatggccattccactccaaggatcgccgagacgtctagcaaggggaaggacgtggtggtgactcccgacccggtctccaagaataagttgataggttcgccgggataacccgggaatctaggggcaacgacgagggtggcggcgtctgccgctaaggcctcaaaggcaccaggagtggtagcgaagacgatgtcaccccggtctgaccaagggaccgaggataggggtctgcaaggttcggcggtccaccaggttagttgtgatggtggtctcctcttgttcacttgtatgtaatggaatcgtcgtagactcgtggtgattaagcgtagagtgaatgtagcatgtcgtcaatgcgagatgatttgagccagctccagtcggcaaaggatgccgacagcgcctctacttaggccactctcgagtcgggtcaagagaccgccgcccgggtggatcggggctgccagagccggcacctccgggcccgaggtggccgggcagaccacaggggacctaggcgagctaggcggtgacatgacagcggcaacgacgaaggacgcgacggatcaagggaccgacgggggaattggcggtgggggctttgtgagctacaaacgagacatcgcatgcgcatatgcctcctcaccattctccgttgcgagcttctcccccgtgagcttctcctctgcgagtctcctccatggacttctcctccaccgagtcctcagccgcctccacaccactgacccgggaaggagccggttggcgaggatgaggaaatcgtggaagaaattccgcgtcggcagtgcgcgctgctgtcgacccagtatgtctcgcccctccaaactgcctggttctggggggggcaaaaaggggttcgatgatgccgctgacaaggccgactgcacgaccatgtatgaggcagggctggttctgctggagaagatgcaggttagtagttatatcccttagcccccgacttcaggacagagtgcgagtagttattgtgcgctgaagtataatggagagtgggtcttatctttgtttgcgtctagccgggtagatccttgatggcgtggcatagtgctgggtggcggtgcgccacatcgtcatgtgcagttgtcttgtttttgagccgggtagcccccgacttcatgttgggacgactataggagtcgtagcatggagttgacttgattgttgcattgattcttgcagaagatagtcaatcgctctactgccaagagcgaggcgctgcggagcgtgtttgacaatatcacagagatcgagcaaatctagcgggccatgtagcgtgtcgatctccaccgactgaaggaggtgaaggaggggcattaccgggagagggagctctagggccagatttgttagctatggagggacggtgagttgctctggctgagagactttgtctttatgctagcctttttgatggtgtgtatatgttcgcagtcgaggatgagcgggagaggggcaaacgctaggcggcagagtggaagatgctggtggactaggctgaagcaactggcgggtgggcccagatcgtcgaactggaggcgtagttgcaggagtcctgacagggtgcgcaggatctacaagacaagttggatggtgagtcctgtaatgcgtgtttggtctgtttttgtactctgctattattgacgtgttttatcttgactgccacgcaagctgcaggtgattggcccacaccatcccgctgccccatcccgcacgcctccactcggtgccgcgtgctcctctcctgatcgacgtcttcttttctctccttttttttcgttttctaatttcccttttcttttctcgcgatcattctgtctcctccctctccttctaatctcctctacttcctcctcttttctcttttcctctcttttcttctttttttctcgatgtgtgaggctatgaaaagttgtaataagggattcttcatgtgatgacgaatgaagtgagcacagccgagttcaatattatatatgatttataactttgttttgccattgttttgtttgtcttgttttggtttaccgtttaaattatcggagttttttattaatcatgaaaattattcatatgttgcaacgcacatgcattttcactagtataacaacataaaacatgcaaccatatatagtaaagtcataactcacttgagtaatatttatagtgcactatgatcattagatttataacaaatgtcgctctctaatttattctactttatccatataaattatagatatttatgtgactacatgtggcattgaatattatcttcatacataattagttaagagaattctagattatgttgaggtaaaatatctcctaaattctaaaaattagttatgcaacttgatatcacagtaattactagtaaataatgtaaaaattactactaatatgtcatgataactactactccctccattccatattataagtccttttgacatgaccaactttgtacaaaattattaacatctacaacactaaattaggttaagtaaatgtaatatattttgataatatgtttgttttgggttaaaaaatataatctatttgattaaaaaatattaattcaaataacatgcaagtaaaaatggaaaaaaatcaattagaaaatgttagaaaagatataaatataacatatttcaaggtggccaagtatccatgcgtaattgtgtccacgaaggaagagaaattgtcgtgatgggtgccttgaggatatttccccgtttgctcggcgtcgacctcgattccttgtgtggtgtggattccttagagttgttgctaaaaccacctactgtagttgcaaaaatgtctaccatccctttgtttctactagctaaaattatttcttaattaactctcataacaagtgttgatttagtgagaaaatattttccttttaactaatgtgataagcgacacaattttgtatatcctcatgagatctgtttatcctcattctacatattgaaatattttttcttagacaacgctacttggaattgatctaataaaacaataagaaaatagatatattttctagattacatcgtgtttgcatgtttttttgtgtaaagagtgtgttattttatttagtgttagctggagtgtaatcgctattgtcggtgacatggggccgggggtattgtgactagaggcttgggtagccgcgatcactcacgtggcccgacctcctcgggggggtcgggcccgacggtgacgtggccacccctccctctgtctccccgaggggtcgagccgctcccgtttcggccccgagggctggggcaccccgaccccccgtggtgttggcgccacgtgtgtgggttaggtgagcacaccgggctcacctaaccgcatttatagcaggttggacgagcgcgccacgccgcatttaatgcggcgcagcgcgcgcttatccggtccgtgactggtcgtggtgtgtgaccggtcacagaccggtcagatcgcgggttaggtggcaacaggtggcctgtcgcacgcctcgccccgtcccgtcggaatgatgagagcttcctggctctcgtctctagccggagctggcgtgctgactcctggagttggtatgtcagtcccggtcagatccattccaggcttcagcgcaagcatggcaagaaagtcgctggccattgaatgaaggttgaaacgggcgtccaccgggagagctgacgagcggagcaggaggcgtgtgtactgcttgtcagaggtcatttccggctgtagattagccctcattgtaaaaagcatgtttcctttcttaggtagcgggaggcccttgtggtgaccccggaccagataaaaaggaggcccaggcctaggaaagaggggagaaaaaaaaagaggaaggagaaagaggctgaactctctctcgctctcgatctctctggctctggagctctctgtattccttcacacacagatccaccagaacacaggagtagggtattacgcttctcagcggcccgaacctgtctacgtcgcccgtgtcttgtgcgctccttctcgctgacattcctcagatcgagggcgaagaacctcacatagcgcccccggccgaaccggcaaaggggggcctgcgcggtctcctggtgaggagcccccacgctccgtcatctggcgcgccaggtagggggcgcgcgtgtctttctaagccctcgtcctctttcgtgtgcgccaagcttctcccgctcagcccaatggccgaacgggcagtggcgcacagcctctctccgagcgctagcggtgacgacggggagcagaacccgcgccgtcgggctcgcaccccaccgtccccctctcgccgaagtcttcggcgagggaaggcgctcgaggaggtcgaaggatccgtgacttcgccacgcgcgggcgacgggggaggacggcgagacggggcgcatcgccgcctcgtctacggcggtggcaacacaccccagggcacgctccaggctgcgggcgcgctcctgcgtcacccgcccgtcgtccccgatccagagactccagcccgacgttggctggatgacgtggccgatttggtcatgacggcacagcagcgcctaggcgccggcaggcggtcctccgccaccggaacctctggcgctgccgccgccggctccacgacgtcgaggcggagggcgcggcgagcggcggccgctacccgccgttcgtccgccattccctcgtcaacgcctccgacccaagaagatgtgcgtggggggccggatgcccggctcgatatcgagcgccggcgcgacgatcgtcgcgccgcccacgcaacggagggcgcttcctcgtccggagcgccacttcggtccgggcacgggggccggccccccgtgtccccggttggcggtgctggctgtcgagcctttgtggcgagccttcggaacgtccgttggcccccaaggttccggcccaccatcaccgaaaaatacgacggaagcgtcaaccccgccgagtttctccagatctacacgaccgggattgaggccgccgggggtgacgacagggtcatggcgaatttcttccccatggccctgaagggtcaggcgcggggttggctaatgaacttgccacccgcgtcggtccactcttgggaggatttgtgccagcagttcaccacgaacttccggggcacatatccgcgcccaggcgaagaagcggacttgcatgcggtacagcgaagggacgatgagtctcttcgctcgtacattcagcggttctgtcaagtccgcaacaccataccgtgcatccccgcacacgcggtgatctacgcgttcaggggggcgtgcggcacaaccgtatgctcgagaagatcgcctccaaagagccccagaccaccgcgcagctttttgagctcgcggaccgtgtggctcgcaaggaggaggcctggacctggaactcctccggttctggtgtggcagctccggccgcccccgggtccgccgctcggtcagggcggcgggacaggaggaggaagaaggagttggcccgttccgacgatgagggtcatgtcctcgccgtcgagggcgcttcgcgggccccccgaaaggggaggcctgcgagcgacaaaaagaaggaggccggcgctcccagcagggagcgcccgaccggcaagtggtgtaccgtgcacaacacctccctccacgacctcgcggactgccgcgcggtcaaaagtttggctgagcggacgaggaagtgggaggaggagaagaggcaggagcgccgtgagggcaagaccccggcggctcccaccggtaactggcgaggtgaggccaagcagaaggccaccgccgaggacatcgacgatggcgacgatgacctggggttccaggagcctgaggccaccgtcgccaccgtcgatgggggagcgtgcgctcacgcttctcgccggagcctcaaggccatgaagcgagagcttctggccgcggcccctacccatgaggcgacgcggcgggcgcggtggtcggaggttgccctcaccttcgaccagaccgaccacccgccgtgcgttgcccggggaggacagatcgcaatggtggtttcccccaccgtttgcaatgtgaagttggggcgtgtcctcaaagacgggggtgcagccctcaacatcctttcccccgcagcctttgacgccatcaaggccccggggatggtgctccggccgtcccagccgatcatcggtgtgacgccggggcacacctggccgctgggtcatatcgacctcccggtcaccttcggtggttccgccaacttccgcacggagcgggtggatttcgatgtggcggaccttagtctgccctacaacgcggtcctagggaggcccgcgttggtgaagttcatggcggcggtccactacgcctatctccagatgaagatgccgggccccggtggccccatcaccgtccatggcgacctcaaagtcgcgcttgcttgtatggagcagcacgcggaccaccttgccgcggcgtccaagcccgcgggtggcgacgagagactcagcacctccgtcccggccgccccaaggcagcggatggtcacgtgcgacgaggtcccggtcaaggaggttgccctgggcgacggcccgtccaagaccacacgaattggtggtcttctggacgacaaataggaagacgcgctcgtctccttcctgcgggcaaacgccgacgtcttcgcctagagaccggcggacatgcccggggtccccagggaggtgattgagcaccgtctcgccgtgcggccgggcgtcggcagggcgtccccaggggtaccctcctgcttcctcttcccccgggcgtcggcagggcggctgccccccgggcccccgtcgcggggcccagaagcacgaccccctcccggggtagattgttcccccctgcggctcccgcccgcgccattgtggcctcggggggcccgctcccccgacgccccgaccacctgcatgatggtcaggatcttggcgcgctctggatcgcagcagagggggaggaccccttgggggatgagggatgcctccacggagctaagattcagcacccgttggaccaccatcctgaagtcctcagggtcccagtcccatttgcgcccctggtgggtcctcatgtagtcctcgggcccggtgtactcccaggcgccccgagcgcgccgctggagcggcgcgatccggcgacgaaggtagtcgccgaacaccatggcccccgtgagcccctgggatcgcagacccgccaggcggtcaagaacggcgtcgtagccgtctcccagatctaccgtcgcccgccagctggaggcctgcgccgggggctggctcggaagtcggaggcgcacttcgtcggcgagggggtgtgtagaaccaatcgctcttccagtcgtcccactttttgcggaggacgcagggaatgtagcggttcggcacctgcccccgcggctggaagtagcagccaccgactaccgtcggcggtgacaccggctgtacggtgaagaaccaccggaacagccggagagatgggcgcaccccgataaacatctcgcacaggtgcgcgaaaatggccaacgtcattatcgcgttgggggtgaggtgcgccatctggagatcataaaactccagaatatccatgaaaaaaatagagaatggcgggaccagccccgccattgcgaaagagaggaagaagacggaccgccccgggtagtgcggcgccaggcgtccctcgcccagcgcgaccacctcccggccggtggcagattccggcatgaatcggcgcggcagcccggcctgcctctcgctcacgatgcgggaaggcggcagcacgctaccctcgagcggtacggagccccgtgccatgacgccggcggaggaggagcttgagagcgagcgagtatggcaagggtagggcgcaggaaacggagagtcagagcacaagtggcgaaggcaaggggaagagtggtgagaggaaggaaacaaatcccttccttggcgtctttgtacccttgccaacgctatgcccggctcctcgcttcccgcgcccactacctcgccccctcgtttctcgcgcccacgcctccactaaccccactcgcccgtttgcggcgcacgcggcagatgtgcggtcgtggcgtttgagatggggcagatcgtgcgcgcgtttactgcgctcgccaaccgcgaaaaacgccatcatcatgtccccaggcgaaacaaaccggctcgtcccgattcgcgcgctgcttgagtaatgtagcggtcttgaagaggccgctcattattgtcgatcggtttttcccttgccgatgcgcgcgatttgcgaccgttgggtttctgcccgcctgtggggaccggccccacctgtcaccgggcctaaggagtggcgtcacgcccgagcgcctccctcgaggggggcggtcgccctggcgtaacgccgggggctactgtcggtgacatggggccgggggtattgtgactagaggcttgggtagccgcgatcactcacgtggcccgacctcctcgggggggtcgggcccgacggtgacgtggccacccctccctctgtctccccgaggggtcgggccgctcccgtttcggccccaagggctggggctccccgaccccccgtggtgttggcgccacgtgtgtgggttaggtgagcatagcgggctcacctaaccgcatttatagcaggttggtcgagcgcgccacgccgcatttaatgcggcgcagcgcgcgcttatccggtccgtgactgatcgcggtgtgtgaccggtcacagaccggtcagatcgcgggttaggtggcaacaggcggcctgtcgcacgcctcgccccgtcccgtcggaatgatgagagcttcctggctctcgtctctagccggagctggcgtgctgactcctggagttggtatgtcagtcccggtcagatccattccaggcttcagcgcaagcatggcaagaaagtcgctggccattgaatgaaggttgaaacgggcgtccaccgggagagctgacgagcggagcaggaggcgtgtgtactgcttgtcagaggtcatttccggctgtagattagccctcattgtaaaaagcatgtttcctttcttaggtagcgggaggcccttgtggtgaccccggaccagataaaaaggaggcccaggcctaggaaagaggggagaaaaaaaagaggaaggagaaagaggctgaactctctctcgctctggagctctctgtattccttcacacacagatccaccagaacacaggagtagggtattacgcttctcagcggcccgaacctgtctacgtcgcccgtgtcttgtgcgctccttctcgctgacattcctcagatcgagggcgaagaacctcacatagcgcccccggccgaaccggcaaaggggggcctgcgcggtcttccggtgaggagcccccacgctccgtcagctattatggaagagaacatctttaaatttttttgaaaggttccctttaattcgacaccaatcaaattaattaggtgcgactgaggtgtcgtaattgatctcatcaaaagaaacataagaatagctagaagtttgctaaatccgcctataggttgtcaaatgggttgtgtctttctgtgtctgtctggacacacatttagacaactcaggaacaacatgatccgtttggctatgggttttgctggcacgaccgatccagccacaccgtgcttgggctgctacctggcttggtgtatcaacacgacaagtgcatgagcgagccagcacaacatggcctaggaatagcacaacacggcctaacccatacggtacgatgatgactggtgactgacagtcgccagtcatgaaactgtcatccaagcgggagctatgaggaaaggagatcgaaagaattgagtaagccaggagctcgagatagagaaagtgatggtggatgctcgtcgatataggcctaccacgatagcatggtggcgcggtcaaccctattcatgagtacaaccactaagcacgtggtcattgggactcaccggcttgggatgaaggaagtagaaagtgaagggtcacagcggtgcttgatgatgaggaagaggaatgtgctatcggtgagtgaaggactctctgcatcagagtgttctagtcccatggggcttcatttggagaatgcgattagtacttatattttttaggtttcaaccttttgcgtagggtgggaatggggtgtgcaagcaatccgggtggattgagtgctaggcaaaattactaattagggggtgtttagacgagaacactaataggcgatcagtcgcgcgcctcctctcccgcgcgactggacacgtggcacgtggagatgggcgcgggcggcggcgcggttttccttttttttttggttttcttttttcccgcacgttcctctttttttgtttgttctgtttttttttccgcggtttttttttcacacggtttcttttttttcggtttccttttttcccgcccgttccttttttgtttgttatgttttttccacggttttttttcgcacgttttttttctatccgtattttttttcagttttttcggttttttaatatgtatgtatgcaaagtttgtatacacgtatgcaatgtttgtatacatgtataaaaaagatacggatagaaagtttgtatatatacgtatccaaagtttgtatacacgtatgcaaagtttgtatacacgtatgcaaaacaaactttctatatatacgtatataaagttggtatattttgtatacatacatatataaactttatatacgatatatacaaacttagtatttatatacatcgtatacagattttatatttgtgtatatgtttattatacatataaaaaaatatacatatacaaaatatatacacatatatatacactttgtatatgtatataaagtatatacatatgtatgcattgtagatgagagagactagaaggccataactgaccgcgcgccgcgcgcgactgattgccgatcagccaggcccggtgtttacatccaggggtgtaaagttagttttgctgtgtcacatcgggtattaaatagggtgtcgcatatggtgttcgaacactaataaaaaaaactaattacagaatccatcattaaaccgcgtgatgaatttattaagcataattaatccatcattagcaaatgtttactgtagtatcatattattaaattatagagtaattatggttaaaagatttgtcgatgttacagggcgaaaattttggggtgggatcagggccttacccagttaccctcgccatttttgtgcgtatccctcctcgtcagtttgcccttgtccaccgcctccgcctccgcctccgccgatccccatccatcccgcgagcgagcagggacgccgtcgttagtcctgctgcttccgccgcatccatcctggtgagcacatcctccgcaccgccgcctgcgccgatccccatccatcgtgtgtaattgttcctaagaagaaggaaatcgtcgttcagtgcagtgcggtgcctcgaggatatttccctgttccctcggtgttgactcctcgtgaattcgcccgccgcctgtgccgccgccgatcaccatccatcccacgggcaagcaggggcgccgtcaccgcatcctggtgagcatccatccgctacgcacatcctctttctcatccctctttacccacgctttctcgaatttgtgttaccatagcttctcttctagaaatttgcattaaccttaattctaagaacagtctgtttgctcccaaaaagtttgggggttcaactgaaccccaatgtcccatgttagatccacccctagctcatgttctgggcagacatgaatctctgaatctcctccaggaccttatttgtatggtgggtcaggcgatcaaaatcagtcacctgagctcgaagcatcaacgggagctctaatccatcacattaatccaataagccggcagcactcatcaactgtcattgaagcctaccttaattgtcttgtactgccatagggaccacgttagcccgaagccctcttgttgttctgtagagctatacctcaccagccaccactactggcatgttgaagcttcccgccgaagcaacaatttgatgattaacatctccaatcactctacactttgcatggtttaatttttgtccctcaactccaaactgggtaaaacccatgtccgaactttcaaaattaggtaaacctcgtctcttcacctgttgatagttgttttgatccatgtggctcccacatgggatccgagaatccgagatagtagttgggtctgcttgtcatggagaggttttgacagatataacatccgcattggatgagagtgggagttggtttgattgtcttgaaaaccgtacccccatgtaacatctgcaattccgcattggctgagagtgtcattcatgtaaatattagttgttcacatcttcgactcaacttattatttttctagatttctttttattctttgctgctctgtttcaaacaacaatcaatatatttgatacatagctagaatttttatgtttacaacataataataacagcccgtgcaaatgcacgtgtaggtggttacaatgaactgattgttgactaagtagattgtattaatcgtgaattttagtaggattttgtgttaaatagtatatgcatttgaaaatagaaataacatgtactctttagttttagggggtgtttgggaactagggactaaatttagtccctctcacaaaagtattaagtccctatggtagggacttatgtttttgtgagagggactaaagtttagccccactttagtccctccaaccaaacaccaccttagttttccaaaaataataattctataattcaaagtttactatgaagctatacattggccattgtggactctcattttagtgtgaaaataatttgattcaaaattaaaaaatagcaagtggtaactaatttggattcctctttaagtctaagcatatataatttgaaaagtattcaatatgtttatatatctgcagtaacaacaataaaaacccaatacaacacacaggttggcaactaggagtgttaatgtttctaaactcagcgaaagctacagtaactttatagtaaacattgaagatatgggggaggccaagccattgctcgtctctgcctatctctgtccttggtcctactccaaccatgttggcactgttttgcagaagggaagaggaagatggatcagcaccacgtgcagcagcagcagtatgttgacccttatcggacaatggtgctgtcaccacagcctgaccacctcaatgccctccagtacaatcaccagcagcagccacagccaccaccgcaagcaactccaccaccaccacaacatcaccatgcctcactcgcctcccacttccatctcctccatgtaagtcacagtcctgatctcttaatgcttgtctttgtgtctaataaattgaaggggaaggatgtcatgacaaattttggctgccggagtgccggtagttggtcttccattatctaaaaaaagtctatacacacaaaggttcagctcattctgcagttgcaacttggccatagaagcatcctagaggctgttattcgcttgctatattataattggataacttaagtgcaaattgtctgctgcatcgtctcttgtgaagaaaaaggttgctacaaactatgcattttgctaattacatgtctttcttaagttgacaactgttgtaaatcaagtctgctcgagttatttatgtgtctgcaagagcattagtgtattggctgccacttttctgtgtatttggatgcttacgtgttgcttctgtccttttaggaatatagaacttcactattatgcatgctctacaatgctcagttttccttaattgttactaccttcatcccgaaatataagggatcttttttggacggaggtagtaccaaatactacttacacaggaggtcactatatttgcacacctttatcaattaactctatgaatcatgcaaattattttcttgcctccctgaacttgcttctattcgtatgttaagtcattattgagataactaacagaatgtggtgatctggtcagcaccagtggatggtgtcagtacatactccaatgtggaagagtacttttagggcagtggtggagctggaaccatattgagggtggtgccctactttactatatagatggcagcaattactctaaataatggtatttgttcatttgtagataactattgacacaaaaaatcattgagtagcaagtaaaagtgcttaccgaaatataagatgaaaagaaaccgcaaaggggaacatcaaaaaatacataaaagacgatcaatttatgcaaaatacatcctcggcctcaaagctgtcaatctcaatatcatcgataggtaatagcctacaataaaagcagaacagaagttagaaacatattaatttcaactaaaaatttatatccaatgaacatgtaaaaatataaaaataaatgtgttaccttttagtatactcgtgttctcatgttcataaaacggtcaactacagctttgttggttactcttctcatttcttctttctccacatagcaaataagactatgacttaagtagtcatcacccaactattgtcatcttgttctgaacaagaatttcgtacagctacattattggaactatcgggcgctttcctcttgagatacttgtccataacctgtcaattaaatagttttattatgttagacttacactgcacaatagaacaatgtatacccccaaaacaattaagcaatgatggtgtcacagtatgcttacaattttactaagtgatggttgatggactgatggctacaggacaataggactacttgtcccttctagagatcaattgaaactttcagttcttcaaactttaaaccctaccttatataaatctggatattgacagggtgctatcaacaagttacaaatgaaactaatatgattaaaaataagactagaactagaagagaggataaattgaaagtttggaactaattaaaaggaagataatacatctcttaatttagtctcttgcttgtgcactgctgactgctcggctgctggctgctggctgcaggctgcccctgtagtctggctgctcgctgccgcagtgccgctgtaatgctgccggcggccggctagggcgaccagcaccaggccaggacggcgagcaatggcgagtcggcgaccaacggctgagcatgagcagcaggagtagacggcgactcggcgagcagtggcgagacgaacagacacacagccgcgcagatgctgtattgtggtttggaaaaagaaagaaaagaaaaagcaaaaaacgggagtcgaggaggtgtgcggtgccggcgtggctgtgattgacgctcgaggcgtcgtctcgcttccagtagcccagacggtgcactgttttcatgggccttaggccttccacgacttgcttatgggccaggggtggtgcacgaatttgggccaaggggttcccatgtggtgaaaataagggggtaagtactaaatctgaaaattgggccgggtgcctgggaacccccctaggcccattgggctccgcccctgttttaggggtctatttattaaataataagttatcaaaaaggactagaaattcctgcactgttaaattaagcaataggtgaataggataagaggcaacaatgtagtaattggctgggagagggacaacagctgccattctgccacaagtggagtagatggactaaggggctgcttggttggcggcttggaatgccacgccacggcgtggctcgccacaggagtgtggcggacgtttcgtcgcctcagaaaacactgtagcgtggcgaaaatactgtagctatggcattcaatggctgggatccaaacacaccctaagatgtgaataattaaatatggatgctaattttagtcaggtgggtgaaattctgaaaaggagatttgctacaatcaacgaatgaaataccggtgtgttttttttaacattaaaaagctatttttgagctgcttttggaatttaacatgtggcagtgtaaatgatgattgcttgttatggaatatccgccaagcacatctacacaatggcgtatatctaattttcttatttcatttacaagaaagtactacctttacaaatcaatggttttttatttgtttatcagttgacgacaagattagctgatgctattggaaagggcacaagggatcaaaattctgatgcactggtaagaaattcatgcagctcttaatagtgttttaataaattgatgtgattctactccatgatgcatgattcttgttgtaaagaatgacattaatttctctttggagtgtacatattcttggaaagtttattgtgtaggaactatttttcagttgttttgcttcataaacttattatgaaaccacttcctgttgtaatataatatggaggaaatgtatggaatatgctaggtgactgattcttaccatataatattttctactgagagcgatgaatctgaaagacaatatgccaatgttgtcacattgttgctgtgtcatatgccgtcctggtgatgggtggcacttgcctggggtcctcatctaggatgagagctagagggagggagctgagtttatctgtttatgtgttgcgctactcctttcctttttatattttatttccgtagcattgctatggcctgacctggatgccaccctggctctgtgggcttacggtgccttgccagagcaccgtgacaacatcaatatacttgaattatattattataaactacatattttttatagttaatatgtacactgaactgggattaatgctctctgcgatctgtttccacactctttattgatgctatcaaactttccagttagtaaacctgcgtattttgtatctcatatgtgcctgtgcaaaattgtataactttccagtttccactatcctgttattgttgtactgcttataatgttatagcatgaatatctgagtaattagatggtctttttatatgtttgtgtaggttgaagatttgaccagtcaatttgctaggtgtcaacaactattaaactccatatcgggaacactaagctcgaaatctatagtaagttttgttacatctaatgaggtatttggcttgttaaatttgctatgcgatctgatcacatagtaatagatatcgttaaatcttctttgttgtagctaggctgtaattcaaatacatggtaacaaataacagcgtgatagaaatctggtatgtcccatccttggaaatcagtaatctgccgagtgccaacgtacacatcagatctagttcttgtgattttttgtctgaattgttgtcttgcctttcgtatttatgtggtgaattgcttgtttatatgttcattgcatggatgatcacttattcgaaccaaacgatggaaagggtttccattccattccttgattcagccagacaaagtcggcattttgcttaatccatttcagtttccagtgtttctaagttccaacactacctatatgactcctgttgcacgaagaccgtaagagtgaggagatacaaaatctaagaatcacgtaatggcatttcaaagttttgtagcattgaagcatggtaggcaggaaatattctaatactatgctcatgattcatcaattgacaagcattatatgaaatgacccttcgattataggtggagtaattttactaaacaagaataactaatttgtaagtagttgggcatacagttagctgttctgactaatatctaatacatagctcaatgtttgttttcatgaaaaaagatggtgactgagatgataataattctaatagatggtccggtaataaaatattttttgaaatctagcggccattttggtttgctaccaaaatgtgccctacgaattcatttggcaactttaatagtgctttgatattgtttggattgaagccaatttatagctaaatcaatgtgatattataccaaattgttggtagtaccaaaacttgcaaagaaccaaatgttggcgatatggcatgagacccttcgaccaaacctgccgaaagcatgcgaccaatggggattaaagcccgagacgtcagggttagtcaaggcgaacccccccatggcgaagactatggagcaaggatggcgagaggcagggaatcgcagccaagctagaggcctcctgggcgaaggacgcaaggcgaagagcatatgccgaagggggacgacttcgccgtagcaggttcggccccgggagggccgaagaaactatcctggcccatcaagcctaggggtcaattgggtcgccaataacccgtcggcccgctaagggcccatggactgcaattacgctatgtacccatgtaaatgtccctttcataagggcaaccatgtaaattcccctgcataacgaaagccctagtagtaagacctgtaatgggggctataaatagccccatagggccatgtaatggggggatcccaagtaaaaattctcaaattaatacactttacttcttttccaaccactgttgagtgaccacgtctttcgacgtatgcggttgtcgtttcgacaacagctggcgccgactgtggggacctccgagcgaaaccactgagagcgaatgccaccgaaggtcgtgaaggagaaggttacaagacgaaaggaaagcgaagccggggcggatatggccggcgaagagggagcagagccttcggcgctcgtcgccgaagatggaggagcgccatctgcttccgcacctgcgccatcactaccgccttcagcccctgccacctctgcacaggtgccgaatgcggctgacatggcgaaggcggctgcggcggcaaggtcactccagaccagggcggagatcctttcgacaagccaactgctggtgccccaagccgctccgtcgcagccggcagcggccccaactgcgctcgccgccgtgcaagcccaagtcaaccctgatcccgaaacacaaaccgaagccgacatggaagccatgcgacagaacatgacacgactccaagacatacttcgccaaatgcaagaacagcagcaggcatacgaggcggcaaggcggtccaaggtcacttcggccccaatcctccagtattcggcaggctatgtcccaccccaagtttatccacaagtaccgacccaaccctttccgccacaagttgtgcaagcgccaatgtacttcgctgggcagccatcgaccgcagcagcgcatccggcccctcacgtgcaactgcaagctcaaccggtcgctgcccaagtacaccctcaactgcctggccaagtgccacaaacaatggcagaaggggcttcggctctgcaggcacagctccaagctttccttcagcagctcagccaaccccacaacatttcaggtacagccccttcggctcacccggaggggaatacaagtcaaggtgcgcctagttggttgccgtcgaatcagctaggtctgggggcttcaccgtggagtcaaagaccgcagttcgacttcatcaatgctgcttaggcaccaaccgtttggccgcaagcaccaacgccaggcttcggagcaaaccgagcaccaaaccaggtcgctatgacatggtcagagccaactttcgacccatccatgacagctcagcaagcatcaccaatcggagccgggcaaccgaatgccatggcccaacctcacgcgcaagccgtgatttcgcccttcgcctcgccgtaaccgcagcaaggtgccgtgaatagggcagggggcgaaaaggggctaccgctaagtgggggaatcaagacccgtccaatcccaccccagttcaagttcccacccgtcccacgctactcaggcgaaactgacccaaaggaattcctctccatttatgagtccgcgatcgaagcggctcatggcgacgaaaataccaaagcaaaggtaatacatctcgctctagacggcatcgcccgttcttggtatttcaatttgccagccaatagcatttactcatgccagccaataccaaagccaatagcattgtccttaactttcgaggcacctatgaggagccgaagacgcagcagcatctactcagcattcgccagaggccgggggagtcgataagggagtacatgcgtcgcttctcgcaagcccggtgccaagttcaagacataaccgaggcgtctgtcataaacgccgcttcggccggtctacttgagggcgaactcacaagaaaaatcgccaacaaggaaccacagacgcttgagcacctacttcgcatcattgacgggtacgcaaggggcgaagaggattccaagcgacggcaagcaatacaagctgagtatgataaggctttcgtcgccgctgcccaagcccaagcacaagttcaagttgccgaaccacctcctctcgctgttcgccagcctcagccggcgatccaaggacaaccgccaagacaaggtcaagcccccatgacctggaggaagttcagaaccgaccgtgcgggcaaggctgtgatggctgtcgaagaagtgcaagccctccgcaaggagttcgacgcccagcaagcaagcaaccatcagcagcctgtccgcaaggtccgaaaagacctctactgcgccttccacggacgctcttcgcacaccacggagcaatgccgaaacattcggcaacgtggcaacgtgcaagatccaaggctgcagcagggagcagctgttgaagcacctcgtgaagcagctcaagaacaagcacccctggccgaacagcgccaagatgcgcagcgcagagtaatccaagtgattacaagggccgacccaccgatccagctgtcgaagcgacaaaagaagatgcagctacgaacggtccacaatatcacttcggcaggcgaaggggccccgcagtatctgaatcagcaaatctcttttgggccaggagacgtcgaaggagtaatgttcccgcatcaagatcctttggtgatctcggccgagatagctggtttcgaggtccggcgaatcctggttgacggagggagttcggccgatgtcatcttcgccgaagcatatgccaagatggggttgcccaccctagcccttaccccggcgctagcctcgctccgtggttttggcggagaagcagttcaagtacttggccaagcacagttgttggtaactttcggcgcaggggaaaacagacgcgaagagcaagtattgttcgacgttgtcaacatcccttacaactacaacgccatcttcggccgtgcaaccctgaacaagttcgaagctatttcccaccacaattatcttaagctcaaggtgcccggctcggtgggagtgatcgtggtcaaggggcttcagccttcggccgcttcaaaaggcgatcttgccataatcaacagaacagtacataatgttgaggccgaaccacatggctgggcgaagcacgcgccaaagcctgcccctcacggcaagataatcaagatgcagattgatgacgccgatcccacaaagctcgtatcgctggggggcgacatgggcgaagaagtggcggcaagcatccaagaagtactcaagaaaaatagtgatatcttcgcctggggccccgatcaggtgggaggtgtttcgacagacctcatcatgcatcacctagcagttaagccggatgccaagccaaggaaacagaagctgcgcaagatgtccgttgatcgccaagaagcagcaaaacccgaagtccaaaaattgctcaaggctggggtcattcaagagatcgaccatcctgagtggctggcgaatccagtgctggttcggaagtcaaacggcaaatggcgcatgtgtatcgatttcatagacctaaacaaagcatatccgaaggacgatttccccctgccacggatcgaccagctcgtggattcaacagctggctgcgaactcatgagctttcaagatgcatattccggctatcaccagatccacatgaacccggccgacatccccaagacagccttcatcacaccattcggcacgttttgtcacctcaggatgcctttcggcctaaggaatgtcggagcaaccttcgccaggctggtgtataaggtcctttacaagtagttggggcgaaatgtggagtcttatgtcgatgatatcgtcgtaaaaagccgcaaggctttcgaccacgcgtccgacctacaggagaccttcgacaacttgcgcgcagcgggtatgaaactgaatcctgagaagtgcgttttcggcgttcgcgcaggcaagttgttaggcttccttgtttctgaaagaggcattgaggcgaatcccgagaaaatcgatgccattctgcaaatgaagcccccgtcgagcgtacgtgaagtacaaaagctcgcaggccgaattgcggcactcagtcgattcctctcaaaggcagccgaaagaggtttgcccttcttcaagaccctccggggcgcgggaaaattcaactggacacctgaatgccaagcagcgttcgacgagctaaagcaatacctgcaaagcccgccaactttgattagcccagcaccaggaagcgaactgctactatacctagcagcttcgccagtggcagtcagtgctgcccttgtccaagaaacagattcaggccagaaaccggtctatttcgtctccgaagcattgcaaggagcgaagacaagatacattgagatggaaaagctcgcttacgccctggtaatggcttcgcgcaagcttaagcattactttcaggcccacaaagtcatagtgccatcgcagtaccctttgggcgaaatactccggggcaaagaagttactggccggcttagcaagtgggcagcagagctatcccctttcgacttacattttgttgcccgaactgctgtcaagtcccaagtgctagctgactttgtggccgaatggacaccggcactggcccccgagcccgaacccgtcgaacagccctgggtgatgcattccgacggttcgtggtcgcacaagggggcgggcattgcggcagtactcacttcgccaagtggtgtgccgattcagtatgccacaaggctgcagttcgacataaccaacaacgcaacagaatacgaagccattcttctgggcctaagaaaggcgaaagcaatggggattcggcgcctgctaatccgaaccgactctaagctggtggcgggccatatcgacaagtcctttgaggcaaaagaagaagggatgaagaggtatttggaggccgttcggtctatggaaaagtgcttcaccggcataacagtcgaacttttacctaaacctaatcaccggtttcgcggctgtgctggagatcgccaagagggtgttcgctacgacgatatcttgcagtcgcgtaggcgaaacatgagagcctgccccggatttcgcaggggtagggctgggggtataaccatgagagccatcctcctcagaaccggcctccgcatcctcctcttcctcctccccatcactttcgacggcggccttcgcgctacggcgagttcggacttggccgcctttcgcgaccgcacgtttgcgttttttcaaagtgccagcctcgtcatcgccggcccgagaggggttcgatcggcttggcaatttgccggtatagacacggttcactcggccgtcaacatggcgctggagcaagcgggcgaactcggctgtggttagagctccgatcatcttcgacgcctcaatctcagcgtcttccaaagtccgcactgcgaaaagagaggaacacaaccgtttagccaaaaaagcgcttccacgaaggaagtatgcggcctaagtcgaaaacaaaaaccttactttcgaccccggcggggagaacaaggcggggaagcccaagaacttcttcgccctcgttcacagaaacgtcccacacacgggcgagagggaaatccgaaggagacaaaactcctcgcaaagatcccgggtgctcagccgccgggcaaccttgcgaaggagaatgagtcgggactcaagagtcccgtcgatctccacgtttggcttcgcgttgatgcagacggcagaacgctcaaaaagcagccagtttgcctgagtattttcggtggagtaggggttgctgatatagaaccatttctgcatccagttcctgtcccatttcgccatcgatgcaggcactggccaagcatctgaacgctccggccgcagcatgaagttcacgcagccgaaaacggttttcctcggacccgccggcgtttgcacgtctttggtcgaggcgcatgcagtaatcagagcggcgaatagcttggcggtaggggcgaacccacaggtccggcacatccaagcgaaaaccgccatcttcgggaacgctgacgggctaagttggggaagcctaacgtcatacatcgaaagcaccgaaggcaagaagttgtcgcatgggaggcgaagcccagcagcgaagtatgcggcgaagacaaccggtcgcccatccccaggcgagggaacaacagccttgcccccacacgatccttggccctctatgagaagaccggatgataccagttcgcccaagtcggcctctttgacaagagatttgccaaggaagcacgaccatccttcgccaaggcttccaggatcttcgccagttgacccggccttggtaggcttgcggggagccattaggcttgtagcataggaaagagaggtaaaaagccgaaaggctaggagcacgacgatggcgaaaaagctaaaaaacaggagagcgaagagagcacggagcgtgtaaagcggtaaaaaggggaagagcacggggagagtgaaaaatggcaggccggtttgggggcatatataaccctgtagtgagaccgttcgcctgccaaccaatcgagctctgacacgtgtcaaagggcagacgaaacggtaaattcccatcgggacggtgctgaacagtaaaaagcccgattacggagaaggaaaaacccaaagggcctattactattcatagtaataaaagagactaaataagcccccatcgacgctttgcaacgaacgtgaagaggagatttttctgaaagaaattttttgtaaacgtagaaacaaacaaactttacttgtaggaacaatataggtttcgacaggagcaccggtcgaaagggggcgccacataccataccacatggtttgcacggtctcggccgaagctcctatctcacccttgcccgtgaggggcttgttggcgatatggcatgaggcccttcgaccaaacctgccgaaagcatgcgaccgatggggattcaagcccgagacgtcagggttagtcaaggcgaacccccccccccctggcgaagactatggagcaaggacggcgagaggcagggaatcgcagccaagctagaggcctcatgggcgaaggactcaaggcgaagagcatatgccaaagggggacgacttcgccgtagcaggtttggccccgggagggccaaagaagctatcctggcccatcaaacctagaggtcaattgggtcgacaataacccgtcggcccgctaagggcccatggaccgcaattacgctatgtacccatgtaaatgtccctttcataagggcaaccatgtaaattcccctgcataaccaaagccctagtagtaagacctgtaatgggggctataaatagcccctagggccatgtaatggggggatcccaagtaaaattctcaaattaatacactttacttcttttccaaccactgttgagtgaccacgtcttttgacgtatgcggttgtcgtttcgacaacaccaaacaagccctaaattaggttatctacccccattatagttattcttgaatcagggttgatattaagaccttgtgattactgtgattacaagatatatcataatgttaagagaatttcttcagcatccctgaatattaccaaaaattcagagctttccttcacttcaactgatttttttttatttctctggcctgccattgagaatttaagctttcgtttaatgccatttgatagcttgttcctaactttatgtattcctcccattaactttattggaggattgatttttccctttttctgcaatgggtgaaactagcctgcatattgtgttaggtaatagggccaatgtataatcgtcttccttctctctctctctctctctctctctctcttccttctgtgtgtgtgcgtgtgcgcgcgcgcatgagcgcatgccagtgtgagggggagggatgctaaaggaggtcaaagtggccaaaaggacacgtccacaccccactaaattatagctgcaatctggagcagaagaggggggaagaatgtgaagaaaagggagaggagaagatagatgccagagtagggtgctcagagctcaaagtggctgacaaggtattggtttctactgtatgccacacctgcctgtgatgcagagcagaagggaggggatggataggggaggataagtgagaaataagggtaaggtgcaggaggataggctaggcaatagatgtagtgaatgcaatgtacagacagatggctggacgtaaagaaggtaaaggctagatctaggaggtgagcttgtttcagtggagatgggatcagtttctaagggaaaatggtcacacttgacattgctactacaacatgatggaatggtatcactcgacaaaacgtgaacactggatggtaactaattgtatcaatgaacttcactgttataaagctaaagtcactgttacaataccaaatttacaaaagaaatattaactgtcagtataaaattgttatttttagctcatttttccctgttagaggtttatgctcagtcttaatgtgagtccactaaaatcttggctggtttttactttgtttactaataaccaagagaaacagtaaatgagcaacaatttgaccataaaattttcaaatattttttgcagataaacctagatgcctttgtaagaaattaaaataggacatttatgtattttgtgaaaatcttgacatgtgctacttaacttctttctgagaggaaagaaccagtgttgagcaagcctactcatggcaattgtttctttttcttaccaatagacagttgaaggacaaaggaaaagtttggaagaaacgcagcagctccttgatcagaggaagtaagacaaccattcggtgaaccaagctctggatatttatttatttggtactgaccagcgtttaacctgacagggatttgatcacaaagtacagaagctccgttgaagacctgctcaagggggatacaagaagatagtaacatggtgactgtatggtagagttggaatgttaaagaggagctcgttgctacatgtgatcgttttctaatcagcatcggctacttttgtaatcgaggtagccttgaagttggtctggcttaggaacatactttcagtttgtgctatctcatattgttggtgggtaatgggttcatgggtttctgagacgagcatgctgcccagcttatattgaaggtttactgaggaccagtcattttgtttaatgggtaaatttgatccatgccattgcaaactcattgtattggaaaattgccattagtatttatctatttggaatttcacgcttattcgatatatgccgctacttaccccttcaagatacattctaaaaattttggactgaattgtccgttttcttcattcatcccctcctctcctgttcggagatattagaatcttatgaatatgagagatcctatcaggtatcttagtaacttgcaatcttatgatcttgctaggctgaaacgatatcgatcttattaaggtatagtttcatagtattctaatattatgcgagagatctatatgattccatgagattggtaggatatatgtttcgattggtggtattatttaaattaaggcggatttgaaagtaatgtgtataggctttaatttttataatgtattacatctcttttgataggatcctgatcctaagatacagtaagtcaaaaaatgatcttatctgaatcttcctacgtgaaattcatttctttgaaacaaaatgattcgtcttcattaaacctcacatagaaaagtttccagatcacagccaaagagcccacaagcaatacaacatttgaaaattaatgacgcaagagtatgactttttttcttgttatcacggagtaatttgggtttgataatgcgtcaccaagttcaagagaaaatgacctatgactatgagagcaagtacaaaaggttgagtcagccaaatgcaatattgtcaacgtcaaaatcctacacgaagaaaagggaagggagagagagagcaaagcagatgctcatgcagaatagctctgagaaaagatgcagtatcgtttgcatgggaatcctctgacatccgatagctctagtaacttcattcggcatcggacggagtcaagctagaacagcggatagcctcagcacatctataaaattatattctaagctcaacatgcaaacatgccaccttatcatccacatgcatgcaacatcatctgtaattcgttgaattctataaatcaacatccaatcatcttccttcacaatattttcacaatatttttaacacacacatacacaaacacatcatttttataataattaacatatattcgtccatataatcaaagtacgggaatatcatatttcatctacaatctcatacagagtctactaaatatatttcttctctttgaacatggtttgacaaaccatttttatttgttgggcctgttaggtaagctggttgcagtggctgcggctgcgctgcagcacatgcagccgaacaggcccgttgttaataactaatattatttttacttttagctcgattattaaaaaatattaaaagttagttaggaatttccacagcaaagcgtggggaatcaccacagcaaagcgcgggaatcacccagtatgacacaaaatcatccacaaccatcgatgccacctctgagccacagccactggcgcggtggcgccgctaggaagaaactgggggagaggggaaggcctctgcgccgtcgcagactccatcaccaccgccacagcttgcgcctccccggcgaggcccccttcattgctgcgctcttcctggccagcaaaatcgagatggctcctgattacccatggtcttcggccgctcgccgtctcctacggcgcatgtgcgggtggagctgatccccgaagatgcaatttatccaaagcaacgatgcattgttatgacttgtgagattttgcattgttgtgacttgtgagatttattgttaagagcatcctgagtgctgcaatttcgtcacagatttgatccaagtctgtattcatgtcagttgtctcaaattgcagcactacatgatgtatatgtgtacaccttttatttttatttttttgccattttgcaagcaaacattagagtatgtgaccaaatctataaagaaatgctaggtgggtggtctacttgattcttaactgttatcagataatcaggtcaggtcaggtggtctacttgattcttaactgttattctcatttgcacagaaagttcataaagaaatgcatagtacagaaaggcagattatatcagataatcagagttggggtgggttggaatattaggcttggtccacacagctagagacttcctaccataagcgcatttcaccttttcctgcaattggagatttggatcaagaacaaagcgaatatatcagaatgcaagctatgaatcgagttagttaattgtttgctgaacagtagaaactatacttggtagatttttataattgctactttaagggggaataaaagaaactctatcctgttttcgattgttttgacatgcggtttgatcttttcttagcagttaccgacttactgtaatcaagcgaactctccgatgagaactttggatgagctgtaatgttgccaaagcaattctttccatgtttttccctcaagcctggagagatgacagatgttgtcatcagatgggcctctctcaggttggcccattgatatttcctattggttggcccattacgcggcttcttttctagtataatctatacatatccagtagaagatgctatattttaaccagcaaagttgctatattttagggacagaggtaatagctagcagggtggcactattcaacctttagcatttgacggcgatgctatgcactacagcagatgccaatggcagaaatccaagaaccggtgtatgtatatgcactggtgtctggtgccaataaacaaatctctttcaaccgccaacaacttattgaattagtagctccattttccatataatgttttctagggaagacaccatttactttcaaagcagtacagtacatagagagtgggaaggaaaactttcaaaaccagggtctagattaatatattaggctgcagccataaaaacaccatcatttgtatccctgacaacaatcccacacccaccagaatctgcatcttgtagaaaaataagtcatcacagtttacctttaaaatgggaggcaaatttgcattttcagctcatttcacctttagcctactctttcctcagtttctccacagcaaaacactaatcaagacaacaaaagttagtaatctgaagttgataaaaaacaaataaaattagtagcacctttagcataccttatagttgtattttgtgttacaaacctagcagatatctcaggtccaacaagagtggtcatttgtgccctgtccacgctggcaggcacatgtgacgctctaaggtgccaaaagtggcaaaaaaaaattagaaaagcttctctccaattaataatcgatccaaaaaggattcaatgattagcacacaatatattctatcaataaaagttatggcaggatgtctaaatgcttagcacatagagaagcctaacaagtacatacagtttcagatgtccttttgagaccaattgcaagagctccgtcataacatcattgaacaaacttgagagaaataaatctgctggttacctgcaacgttgaaatgacataacaaaatattatgatatgaagtcagaaaattattataaatataattgatgagctgaagcgctagaagagactatcatttgctatccattctgtaagacatcgagggaagtagtttgcaaacaaacatataagtaacacaatgaagggcaaaggttgtgtctcaaataaattaagtatgcataaaagaatatcactaatccatgaaataacaaaatgcaaaaaaaatttgtagacagtgaccagcagaagccatattccaagggtgagcaacagatacagcaccagccacaggagtaccctcaccttattctctgtgacacataacctaaaaggataacagataagaaatacaaaatgaaaattgcagttcaattattcaataccaactgcagtaaatagcaaattgcatgcacgtgaggagattatggaaaataaaacaagaatattggcacctatgcttaccctaacagcaaacaagggagcctgtggatacttctaatgaaggtaattggaaaaccacatggatatcttctgtccatccagcacagtagaaacaatcatactgcaaggataaatagtttgaggaacaagcaccagttgaacatgtttcagcaattgctaccaaacatgcaattctgtgacatcttttttcctggtgcaagattctgtatttgagggtttgctaatttccacatgctccatcattgatttaggcttaactccacttctcccatttccactctcgtgaagggatccaagtttcaaccaggggatctggacccatggttagaaatcataataaaaaatagggttaatttgatccatgccattacaaatatgcagtgacttgccattcgctatcagtcctaacatttaccatgtaagacatgattcagtttcaaaagaacaaacatgaattactcagccacacagtgcaagggatcacaaaaaaataacaaataaatttaaatgatgttacaaagatactctccaccatattcagtttgctctcctagaaaccaccatattaattctaggggacaaaaagctgaattcctacattaattaaaaaattagaaattctcactgtaatcagtaaaaagaatagatcatatatgtcgaattttctcacatgtgaatcctacagcctctattaagcaatgcaaaggaagagattgttttccgcatagaagttaaaattgaaataaatagttgtccgtgcaaattaacattacacaaaatttgcttgctcgtgcaatgaataggttgattatataactaactgcctagtcaatcacttaattaatactccagtttttaatagatgatgctattgacttttagacatacgtctgaccattcgttttttggcaaatgcctttttgaaacttctatctgtagttcattttttggcaaatgttatcatcttttgcatctctagacattggtttacacaattacgtttaataaaagcaatgtcagttaaagcagatgaatcttcaactttctaatgccatatatcattaaaagatttgcctatgaagaaacttgcagttgtggaagagactgctacatcatgtttggaacaagttcagaaggtaggcaaacatttaaaatggattttatggcaaatttctagatcttatttattaaaccaaatttggtagcgcaatcatagggacttacagaagcagtaaaatcactagttaatccagtcatcacaacaagaggtgttgaatcatccccagaaaggactacatctcaaaagccaatatctgcttctgcaacatagaactaaatcatcaggcatctcttgctagcctatcaatctgaagcaatcaaaaatcatcagcaccttcacaatcagaagctagtaactaatgtaaagcaatggttccaccatcacaaaccatgtacggttgcccatgttacagaaaattcaacaaatatgataaactaacaaaaactatagctgcagcatcgttctagctttatctcatggtgtccaaactaaacagaacatgaatctctgccatatagtaaatttaagtcagttaggtttctgaagtaaactcacacaaaggcagtataggagtttccttttcaaatattggctgctcaacagaagactaacagtatcatcagtttaatcattccagtaaagtggcattaaaattaatgccgatgttcatcaaaattaatcttaaattcttaatacaagacttcgtctcattcctttgctcctcaatgataaaaaaatttaaatgcaacgaacaaattaaaacaatcaagatatcctcacaaccatcttgttcttctttccagcagatagcaacagcactttcccatcaactacatcaccttcctcaaccaacttatcctcgctatcaattcttatgttatttaagtatagccccccttgcttaataagccgcctaaccgctgatttgctagcaagcaaacctgtggagactgctagatcaaccaggggagacttcaaaacttggccatatggcaaaaagcatgatggtacgtcatctgctatcccctcaattgtttgtgaatccaactgagtctgtgccccaggccgtaaggcttccgtggctttcaacgcttcctccaatccctcctcaccatgcacaaaacgtgtgacctcttctgcaagcctcctctgaattgtgttcggcacatagccaggcttcttcatcgactcttccagctcctgaatctcatccaggctcatgaatgtcagtatcttcataaaccttatgacatcaatatctggcactgagaagaagtactgatagaatttgtatggtgacaacatcttgggcgaaagccagattgctccatcctccgtcttgccaaacttcgtcccatcactcttcagcagtagtgggaatgtcaggccgtgtgccccctcaacctgtaaaatcttccgaattaactcagtccccgctggatgtttccccactgatcacttcctccaatctgcacattaacacccatattgcggaacatgtacaggaagtcatagccctgcaannnnnnnnnnnnnnactcagtgtagctcattccgtcctcggacataagccgcttcttgacactctccttggctatcatcgtcccaacacgagcgaatctccccacctccttgaggaaatccagcagcgtgatgtccttccaccagtcatagttatcaaggatctgaaaagaacccatcttttctcccgaattgaccaaagcctgctcattttgctccaagttcaagtttttaccggattgcgaatgttgggagggctcgggtgcacggtcaaggatctggccgatgagcgatttgatagcgttggagttggtctcgacggcggcgaggtcgagctcgggccgctcggcgctctttccagaggggtcaccgacacggccggtggcgccgccgacgagcgcgacggcgttgtgaccgcagcggcggaaccaggagagcacgacgagcccgaggaggttcccgaggtggaggctctccgccgtggggtcgaagccgcagtacgccttgagctccctagggctcgctgaagccgaccccagagactcagaagtggtggcctccacgagcccccgctcccggagcacctccactacgctgcgccggataaccgtggatgcggcggcggcaccggccggggcggcgctggcggagaggctgcggctctggcggaggaggagacggcaacggtgagggcggaggaaggttcgcaacgaggcagccatagcgatggaagccatcgcccaagggagaaacggattaggaggaaatttgctgtgcgcccccgcccccctcttccctggtgatagggtttccgtaccaccccaccccctagtcaatacaaagggattgtttagagcatcgggagctcatccaaatatcatccttcatatgtccatatggatagctatttaaaaaagattcctcattcatatctctttctactctaacaaatcatccatatcacatcctcctatattttattaatatcttccaactaatcttatacttttaagagatatattttgaacgactaaatgctaacggtattatttatcgcgataaaatttcgaaataaataatttttaagagatataattttaacgggtaattttttaattgatatatttgatctgagtgaatcatagcaagaaaaatcataccaatacaaataaaatgaacatactagtactatctctactcagattcttttctctgcttgaacatactagtactatctctgctcagtattctctactcttctctactactactactactattttctcatagctagtgagggcaacggcgggcgagcgggggcggtggggcggtggcaggcgggcgggcaagaggagcagatgggcggggaggaggcagactgcgacgggcggacgggcgaggcgtgggcaaggcgccgtcgggcggggaagcagcagcagtggccggtgggcgcggaaccgcgcaggcgaggcggtggatgcttacacgggcgggtggcgtaggcggccggcgggcggggaagcggcggcggtggtcggtgggagcgaagccacgcaagcgagtggcgtaggcggccggtggttgcggtgccgcgcaggcgacggcggcggttgctaaggtgggcaggtggcgcaggtgggggcgggatcaggagcggcagcagctgctgcaggcgggcgcagaagcggcgtcggcggccggcgagcaacgacgacgacggagggtacgttgatccggaaatcccgatgagggcgggagcaagaacgttgaggtatggcgtgaggagagtgaattgctatatttggccgaactctctccgatttggtgcaacgtctattttttggaggcctcgatgccgtatctgttggagggacaatttcttatcccatgcgctatatttcgaatggagtaccggatagaggatctgctagggatttttttttccacatcgaatctttcgacacatgcatagagcattaaatataaatataaaaaaactaattgcatagtttgcatggaaatcgcgagacaaatcttttaagcctaattagtccatgattagccataaagtgttacagtaaccccacgtgtgctaatgatggattaattaggcttaataaattcatctcgcggtttccagcctagttatgaaattagttttttcattcgtgtccgtaaacctcttccgacatccggtcaaacgtccgatgtgacatccaaaaattttcttttcacgaactaaacacacccaaaggagaaacacaacaaatcacacgatatctattatctatatgtctatttttatctctactattataaaaattgaagatgtttttgccgatacttttggtacgtcatccgtgtttgaatcggtttttaagttcaatcgcttttggaaatacagatccgtgtttgagtcggtttttaactttgtttgtttttagaaatacagaagaagtcatataagaaatctctttaaaaacttgcatgttaacttgagacgaccggacctctaattgcagctcatgattttgtaaaaagaatatccaagcgaattcccacggtgaatttcaccttagctaaaccgtacaacaataataatattaaaacgttgcaacgcacgggtattttttctagtctatactagtataaaaaggagtagttcagtttaccccttccaattcaataggttaaatcagggcctgtttagttcgcgaaatgaaaattttcgggtgtcacatcggacgtttgaccggatgtcggaaagggtttttggacatgaatgagaaaactaatttcataactcgcctgtaaaccgtgagacgaatcttttgaacctaattaatccgccattagcacatgtggattactgtagcacttatggctaatcatggactaattaggctcaaaagattcgtctcatgatttcctccctaactgtgcaattagtttttcttttaatctatatttaatacttcatacatgtgtccaaagattcgatgtgatgtttttgggaaaaaaattttggaaactaaacatggcctcaatggtgaaatccctacccttcgcctgcccatcacggcgatcgtggttccctgtcggctagcgtcgatggcactcttccttctccccttgatattgccctcgatgtcgtgccacctacactcagatttcgccatccgcaattaaaaccactcggccttctccctcgctcaatctcgctggccgtctctagcaccgtagcccgccagccgcttccatccatgcattcgctactaccgtaacggtctctgccttcccttcgttgctgcggcgccacgccaatcttcgttttccctttcgccgccacaccacgggctcaatcagtcgcccatcccgtgcatacgctgccatccgttgagcctcctctgctacatcgcgccccaagggtcatcaagtcacctccactagccgtcgtgcggggcaagccttgctgccgcacggcatggagtaagtggttttccgtcggagtccttgctgctccgtgattctgccaccagagcattctcgagtccgcatatgacaaaaaatgacggaccaattcgatcgcagttcctcttgacagcgggttagtaatatcaatccattgagtgctaattccattatttcagcttacatgttatgttaatgattattgaaacacgtcctaatttgattactacttcctgacaacatgattggcctcgactggatttgaataatcacccaaggtcagaaagcgactggcctctgcttatttcaatgaacatacagagcactgtatcacaatcgcctgcactaacaggtaaaatacacactgaatagggacattgtgttgttatggatgtattgatgtcttctttttttgccaaaacatttgatttattttatacatatgatttccttcatctgaattgcttcctgtattgtacatagattttcactaatgttatgtatatttttttaatttgctgaactcccaggattaaacttggttactaaatgttatggttcctttaatcacagccaaccaacggatatgcacatatgaggtaaaatttgtcatcggaaagttaataaaattttctttacttttggagaaagtgtaacttgtgggttttgatataccatttgaattgagaaatttttcaaccttcagatgtacctcttccttatatctgatcccattgaatgatagagtgcagtggctaccgatgatgtggctgaacattcatataataggaaaaatcagaacatcattttcttttaggacataaagctcaccactaattgcacatcggcctagaatgtgttggatatggttctgactggatgtagtcccttgataacttcttctacatatggaacatatggaagtaaagaaatggtttaatttttgataatattgctctttttgtttcctcttagagagttctctttaagaatgatctctcccttttagtccataggcttaatttatttgagagagatacacttactaattggattaatatgttgtaattattttccttttattttttttcaatatattaactgtgggggctttccctacagtgttttcccttaaaaaaaaataacttcttctacaatcacatattcttttgaggatgggataattattaggaaaacatagatggtaaaattattgtaataattgccacttagaccggtgctatgcctatgagcatgtgacattatcaaagtttatgcttttgtaggtgtgacagaaacatctgagggccagtttcagggggacatattgccatttcgcattagtttctcattgttgtgtgcatgcataggcaaaggagaagagtgtagggaaacactaatcattccttaaagggatatctccttatttttacatgtcccttaaaaggttatcaaaaaaattgaaaaaaaaatagtaagatagatcaatatgtgatatatcattccgtaaacatgcatattcaaattcaacttatacaattaaaaacaaaaacaacaaatttgacaatgaatagaatgtgtaaatcatggttaaatttgttatttttgttttgaattgtataaatcgaattttaacttacatgttcgtttcaaattatataagtcaaatttttaaaaaagataacttcttctacaattacatcaagatgtgctttgcatttagacaaaaaaatatagatcctaaattagaaacatgcatattcaatttcaacttatacaattagaaacaaaaacaacaaatttgacaatgaacagaatgcgtaaatcgtggttaaatttgttatttttgtttcaaattgtaaaagtcgaattttaacttacatgtttgtggaaaggtatatcatatattgatctatcttaacatttctttttaaaatttgttgatgattttttaaatgaaatgcacaaaatgagagggtgccctctcgagggataaaaatccatctccacgagtggtctttatagtggccaaggacttgctatcgacatgccaaaattcacctttttaacattatcaactcttgttcctgggtgattgggagagaaaacacctcgttttctgtacgcacacttccgaaactactaaacggtgcgttttttaaaaaattttctatagaaaagttgttttaaaaaatcatattaatccattcttaaaatttaaaatagttaatactcaattaatcatgcgttaatggctcaccttattttgcgtatcttctcaatcttctcttttcctctcctctcaaacaatccctccgtggtgtgaaggtaatctcacttgaattagtataggctaccatttacacctgaacattagaaaccggaaatctattgggcaaatacttattttgcgggtgaacatttttttattaaatttcagacttcggtgtgtcctatggtcagaatgcagtaccttttagacttattcattctggattacaaactctggaaaacggttggagatacacagatattacccaacaagaaaaaccaggacattccatttatttctctactcctcctttcatatatatctatgttcgttattcttcaatttctttcatgtagatatttattctaaagcgatgttaatccattaaattatgcatgctacatattaagtcctataccaaactgtggagattatggataccccatatctacatgacagttataatttagtcggatatatggtaccaaatatagatagaatatctctatgaggactcgggttagattctaaacttgtatgtcaagaaaatacccgggatcctagtcggttacgattgtattttatctataatcccatattccgttaggatatggacggtactttgtaaagcgaactccttcccctatataaggagggtccatgtgcctctcggggcgcgattcttttttccaatttatacaatcaataacacactcggcggaatcatccccggacaggagtagggtattacttcttgaataagaagacctgaacatgtataaaatcccttgtctccaaacccatccactttcctagcttgatagccacccccttttattattgtcgaaatcttgcttcgacagttggcgcgccaggtaggggcagcgtcaagtttttgccgactaagtgcgatgggttccgtttctggcatcgacgacttcgccttccctcctgagcagacgttccggttcggcagcctcaacttcatcaccaacgacttcggcaagatctctctccttgactcggattccaaccagtcgggaagagaccaggtccctgtgccgttcggtattccgaactcggccgaggcctactccaagatcatctctcccgagtcggcttcaaaccactcggacgagatccaatctacttttccgccaccagatcaagacgacgggtcctatccctcaatcctgatgaaacttcctgatgatttggccgctgtcttcacagtcaagacatctcccactcgaagatctaggcgagctccggcttcggccccgatccgatctagatccagggaggttggcgttatactccaacctcttgggacagtctcgacgtatgagatttttactcggattcctatcaaacatgtctatttttggacctttgagtatttatcactcaacccttcttgtattttttgtccttgatatgttcaagttgagaagcagtcggctgggtatcttactaagtaccatgcgtgcttcgctataaaaccactcggttcttgactatatgtttagttttttaactaatcacatagtcgggggctacacctaattaggtgcatctactcgatgcaccatgttttattttcgcccttcgcagtctttgattttagcactcggcaagctggagcaagttgaattgaagcactcggattactgttttttgttttgagaaggctattactgtcaattgcgaaggtctcggggactactgtggagatgatggataccccatatctacatgacagttataatttagtcggatatatggtaccaaatatagacagaatatctctataaggactcgggttagattctaaacttgtatgtcaagaaaatacccgggatcctagtcggttacgattgtattttatctataatcccatattccgttaggatatggacggtactttgtaaagtggactccttcccctatataaggagggtccatgtgcctctcaggacgcgattcttttttccaatttatacaatcaataatacactcggcggaatcatccccggacaggagtagggtattacttcttgaataagaaggcctgaacctgtataaaatcccttgtctctaaacccatccactttcctagcttgatagccacccccttttattattgtcgaaatcttgcttcgacacaaatgtccctgtgttttttgtggtgtttctttttgctatagtctggtgtggaaaatatggtgaaggaaaagaaaatgctagatttctttaaattaaaaaggtaggttttcttttgctatccagattcaacatttctcatggctcattattttacaagatgatcatcttttggtgtaataatatttgagttttttgcaattaaccggtttacactaaatttctattaactatggaaagaatggtaaaacttcacttagagcacgtggttgtgaacttgtcaggttcaaatccaaatcttattatccatttcagaaatcaatcacttgacatgtgaagtcacatttgttcaagctaccttttggcttatttagtcatttcactgtcgaagggaagccacatttgttcctttcttttgtaacatagccattcagtggatataaaaagctatataccattctagcttcattcttccctgttattttcggtttgacatattttagtccatgggttgttgacagagaattaagaaataatttctttagtttttttttgtttgttgaaggtgaaacaaaaagtcggcagaccttgctgtgtggcaaacgaatgaggttgtggggtcaagagagatgagcaatccatattgcttgatcctaattcgggcatgatggtggaggcggtgagaagttaagtagcgtgaaaagcatagtttctcaaacctttggtttgagacttttacttttattttgtatattgattctgatggcggatattttgctggctacctagcgaaattcaattgccacacataaacaatgtgtggggtttaattccttttttatgtaatagttttaatttatgtttttcaatacgtgcattgcacgtgcactactactagtcttacaaaaaggtaaattgatacaacgatttggaattaggtaggtacgacttattgtagcaattagcaagtgggtgcatcttaatacaataacttaagaatgttcctccgtctcacaaaaaaaccacacctaggatactattgtgtcaaatccaatcctagattggtttttttagacgaagggagtactattttagtgcagcaatttagctaagtatgtgttattttggttaacgaatgctagatgagttttttcatgatatcatgttatattataatgttgaatttaatctataaaaaactaattgctcatccaatttataccgccatcttggatttttttcttcaccttctaaaatctcaaccaaaatacataattcttttgatattaaaatataattgagagttaataaattgaagtatgcttatacaaatttcacaagtatattgaaaaaaggagtacttaattaagtttagttttttgcatccatatactcacctattaaatttttgcactaaataacacccacttgtcaagttattacactatagcacgcacttctcaagttatttcactaaattacacccacctgccaagttatcataccatggatgcaatttactcttttacaaattgtcgaacaatattgcaccacgttattgcaaagtgttttaacatgtatcaacaccatgaaaaaattttcaataaaaatgtttcggatctttcattgattgaagaaaagtgtttcattgctcaaagaaaatatattgaattttcaacacagagaaaaggggaccaaccatttaaccggtaaaacataatcgaagcacacttggagcatttaatttatagcgattgaaacatcgagttttctctattgagggcctgtttggcacaactctagctctacccccacctctcctggagctggagcccagccaaacagtttcagttccacctaaagtgggagcggagctgggtggagtgctctcataaaatgaactagagaggtggagctggatttagacagctccacaactccactccagactcaactcctagagctaaatttaggagttagagctctaccaaacaagccctgagacatccacggacctcgcttatcaaagatatatatatatatatatatatatatatatatatatatatatatatatatatatatatatatatatatatatatatatatatatatattataccatcaaaattaacgttgaaacattttgatccaacacaaaaaatcgaaaaaattgcaaaaaaaaaaatgtaccactcaagatcctccttcctcctctccggtggccagccatcaccgggcttgccactagagcactcttccatgctgccaacggattgtggctgccattgtgtcacaccaccgtcgaggaagctgaggcctagctcgcaccaccaacatcgaggatgagagatcatcgttgtcatgtcgcactaccatcgaggaagacgtggccaaccacgtgccaccctcaaggaagttgaggtagagctctctccatgttgcccatgccatgctgatgacgagaggcgaagctattctatgccgtgtcgagcgttgggaacgagaggcggagctcgttactttacctccatcgcatcaacaacgagagagcacatctgttggggatgagatatggagagagaagatacggataggggagcaagaggaaacgatttttgtggtgagaaatgtctccaagagatgttgggcgttcgatatttggcttgctatggacactcgatatgaagcgtttctgcaatacaagtagtaagattagataaaactttttaaactttctatcgacttttgaggtcacgactacgatatttggatggtatggagatcttcgatatttggtgtctattctgatttgtgcatcttgtgtcttggcttgtcttggtttttgttggtttgtccatttcctcctagggtgcttgtatttatacccataggtgtccccttgtccaagtagactagggagaccaatatggatacgatccaaatagactagagttgccctcagcaatcggagttcggtacccttcctagcccctagctgtttttatggaaaagccattttccacaaagacagcttaaatcttataaccaagcaagctgaagctgacaaaatcctagcccctagccatgaagttgggaaaaccaattcccgattgcacggcttagttaatacgcattcagaatagagcaaaggaacgatatgatcgacttcgagacagggcgatataagaaaagaggatcaacggacaaatattgcatatacaaacacttacagaggttgtcggagaatccatctcttgaacccatctcgtggagaccttgaagcatcaaaatccccctagcgcgccactgtcgactttttaggttacgactatggtagttgcatggtatggacatcgttggtaccagggtatatgcaagattcaggtaaaagagatagagacaagggtttttatataggttcgggccccttatctgataggtaatagccctactcctgttggccgaagccggtgttgctcttattcatctgaatcacacaagtacaatatttgggataacctatctagctgtcgtcgacttggcggcatagataaccaacacgtagtcaacgacagggtagtcttccttctcgagtacgaactcaccgagatcagagatggcgcaaatccctcttgtcggcttccgcaggcaccatattgggtatgtctaggctcatctctgatgtcaatgtctagcggcgtgtgttggtttgttctggcttgtcttggcttagtccctcctcctcttaggggttttgtatttatacccatagatgtccacttgtccaagtagaactagggacaccaatatagatacaatttgagtagtccttatcatttccacatagaattctacttgtccttccttatccggaactccttttatatacgaggtatgattccatataagacttagtatatggtgggtgatgaaccctaagttccactcgagactcaaggctgttgttggcccgatctttcggtgagttgagataactacgatttgggagacacgttgacggcccaactacaaccgtacaagacattgcgttgcgccttagcaatcgatacacctctccatgggttgttgatcttgccggtacaaatcaaccttattcctgcaagcaaatcgaagaaacaagcaagaacaagataaaagcaatctgaatttccaatagttgttgaatacgaatgataagttggggtttcgaatacaagcagatggatggtctagccgacgcgcgcgctgcaaggaagtagcaatggctaaactttcatctaaacaaaacccgagaaacccttaaggggtacctagctatttaaggaggtgggaggacgaccaagagggtcctagggtcgtgctccaccagcttggggcgcaccccacatgggccccacctggtccggggtcccaaatgaagttacaagcccacaggcccattataggtgacgcagcaccttgttcctgtgattccggccacacgagatggaattcggagaagaagctagatccgttggaaagagggctccgagagctttccatcaaatactcacgggccgaaaacggaggtcgtatgcagattcggcggctgtttgaagtcaacagtgtagtaggtggccgaatcggattccagcactgggaggacttgatctcgatgtcttcttgttagtccatgatgtgagcaatggttgcatccgtggtagccatggtcacatcagtgggccccactgagcttagtcaattactattgggtatgtggtatacataaccatgatagcggccaaaatggctctcgcgcggaaacagcctccatgcggctccgccccacaagctatatgacaaccatcactgcttccaagttcacttgcgaaggcgatcaacgaggccgcactaccagggcagtctccatgtcactgcatgctccacacaatcagagctgcatcagctcaccgtgtccgctacgaccggcggacggctccacagctggcaacgtcggctgaagcaagccatcgaggccaactcgtcactccacgcggcagaagctgccttgaccttgctagctttgcggacggacaaccccgctactgttgatatttcttaacgacattactagaaatataattcctagcaatgatgtagaaatattcatggtatacttatggttacagatatgatccgcaagcgcacggatataccatttttttaatccaaagtgaagatatgataagagagtactatgctaataatttatatattacttgcgtacatcaaggtcgatgtaggggttaagtaattcaaaggttaggtgacacacagaagaaagaactatgatactctcactaaatataatccaagctaagtggaggaagaataagaaaataattcattcctatacttctaatatgcaaacatctttagtctacacttgttagtatacagtcatgcaaccaataccccctaacagtgccctcctggtgtttcgagagaccaccccgggttgccgagttccttacgacaatctgtaatggctgtccaaccggggctaaatacggaaaagtaccctccccaggaatttgtcttaggaatatatactatcatggaggaatacctgtactgagctgtcaccattagcgacccacctcgactgacccgtagcatatatgctcagatagggatacttaataatctagataccacgtctacattattaaatactactctatatcccccgagatgacatagagcaaccgagcaatcggacactaaacccacaccattgcacctctctgatagactagctacacaactatattgatacaagtataaaatgaagtcggtactcagataatataaatggaataaaataccgaagatgtataaagaaaaatattctattaattcaataagtcttacaaaagaagagaggaaagctactagagccatacccgaattctcctgaagacccgaggactaagaatactattctaattcctactccactagcactagtatactactaaacttgagagagggagagagctcttcttcttgagtgtgtggagagagtgaggatgtgaggtccttatatacggcagttatgacggttataagtatgcgaaatgtccattctgccccgcaactgccatcaggacatcatctagagcgtccaagccaaaacctggaatcaacggcagagatgggggtgccgaaccatgggcttggccattctggcccccttaactcctcataagtctggatctcaacagcgtccgattgattgatcgtttattttgctgtcgattctcgtccatttatatgtgcttcttctgcatacatgttagtagcatagtatatagtggaagtagatattttatttggaaattatgcatcgcaaccatagctagtcttcattaatggggtaatattgacggtcgaaattggtcgataacgaccgtcaacagctaccatgtcaagcgttgccccacacctcagtgcctgcctggctccacgggtgctgccagcactccgtcgctgctgtcacgtcccaaaacgaccctaaaatgcattccttaaattattcctaaaataagaaaaattcttgttaaagtcttcaacaataaaatgtgtaaacctaaaagtcaaatgaggcttggagaatttttgtttattttctcaaagcctaaaatgcgtaatcaaatttagtggaattttcagagcacaaataataattatcaagaaataaacaaagtttaatagtttttctaaaaagaaaaccctaaatcccttcccctctctctgggctgaattcggcccattcccctccccct

SEQ ID NO: 11987 - DNA, 10457 bp, Oryza sativa
gcagccccccaaccctatttaaaccctccccgagctccccacccccgtttttgccactcaccgccccctctccccgtcggaaacgagcccgcgccgtcatctcctctctccgccgtcgccgtcgacctccggccgggcctagccgcccgccgggaccttctcccgcctcgacgtcgcctcctccagcttcgccgcaccgtcaccgacctcgtccacccctccgtcccgctcgacgcccgccggaaccccgccgccctcgtcgacccaagccgcgccgccacctttttccgctccggctgcctccttcgtcgccgctgatgccccggggtgagccgtggaccgccgcctccttttccccctccccttcctctcggccgacgctccaccgcgccgatggtcgccgccggcaaccatcggggtgcgagggccgcctcccgccggctgtgccgacgtggctgccttcgggcgcaccgcgtggccgccgtgtggggctcgcccgccagttgcccgtgcccttgggtgcggctgacgcgtgggcccacggcgtcggtggatggcgaacccgtgcgcccggtccaccgtggaccgtgtggctgccgcgtgggtcccactcccgtggacccggctcacgtgtgtgcgcctcggtgctgacacaataatgtttttcaattcaaaaagaaatgaagaaaatcgcaaatattcacattaagaacatataaccttcaaatggttgtatcttggtcgtttgaactcggaattgcaccattcaagtctctaatttttccttaagaggtcaagaacccatttttgtgatttgtttcttttggttaaatggattttagtagagtaaaagccttttctttatccgttggttgtgtagacgctgtagcttcggaagatccgctctacattgaggttgaagccgacatttgggaaagcgagtaaggcaagtcatatctcctttgaacatatttttgtcccatgctttaaaattattttgttttaaattaatgcattatcgctttatttaaattcccgcattatcactgttttatttagccatgcatatttacctttgttatgatcttattattattgttattgttattattaccttgttcaccctagagtaaacaaaaccccactagtgtttaccgtactatggtctcactagtaccatttttaggtagaagcttcgctatttaaattagacaaactttaggtggatttataactttagactttgggaattctcatatcatttggacattatggaatggttggcttatgtggaattggacacacacctccccctctattcaaaacccccaaaatggttttacgctggctcgaggtgcatggttttaatagtagcacctcggccatcataaggaccggtcttcgggcctctgttgcaaagcactaccgtacttccacatgtctagtgggtaaggcatactttgtggctcagtctggtcgtgggcaaaagtacacggatagagatggacaaagttggggtccgatggacatctctagggcaaatgaaggctacacgagctgcggcccggtagtcgagatgtcatggcacagggccggtgtcctgcagctaggggctcaaccttggcctaccagtcccgggattccggccgtagacagggttgggtcggtactcttgtttatggctgggatgggttgggaactatgttatgtcctccgtccgtatgccgtggtggtatgtggcacgtggttacacgtgaggaagacgtgtcttgtgggtaaagatgtacacctctgatcagagtataatctattcgaatagccgcgccctcggttatgggcaagcctagcaatgtacccaagttagtggtttaattcttaaaacttgctgaaccacatgtgcctgccgtcatgtgcatgtggtcgttaccttagtcttccgctgtttttcgtttatcttcatgtgtgctaggccttcgttgcccatgtaataaattaactatttacgcttccgcttgttaaactctgaattgtatcaacttttggtgtaccttgcctcctgggacaaggaatattacacgcacgtatggaatgcctgttgggttaattccggtcatgaaagctaccaacgctcccttgtgcacaacaatagtcaccgttgttccctccgttgctgatccctccaccgtggttggtcgcagctccctccaccgttggcaacgaaacccttgaatcaaccgctactccctccgcttgggacggattggggatgggattgagatatggttgattagtaatcaggtgtattttggtcactttgggttagtattttttttttattttcctgaatgaagtcctgacggtagagtggaaacagggcagaccaaaactttggttttgaaaagcagggtcaaatgaaaaaacataaaaaagtagggtcaaattgatagttaggtttcataatacggtcaaataactaattgtcgaaaacatttatgttgtgtcttagagattgatacacctctcctataaagaaaggaagagaaggactaggattggaggaaaaaagccattctttgtttcggcccttcgaggaagagcaaactgaagtattgccgcttcatcccatcgacgaggtcactggtttgactgatctggcatgggttacatgtcgttgttgtttcttgggttacatgtcaggtgtaaccgtcccggaaaccaccataactgccacaaccgtcgtagggacccacttgtcagtgccccagagaagtttggagtcctgctgggccggcccagattcggccgaaccgccaaacccttgtgacgccggctccggctggccttacacgtggatgctcttgatcgctccccaatgacggttgcagggcatattggacatttcgcataggctacaaccgtcatacctgcctatttaaggaggagctcatctacacttcaaaacacactctagcaagctcaacatttctctctatagtttagtgtagtattctagtgctaagtggagtagaatagaatagctctcggaatcctcggagtcttcgaaggaattcatgtatggctctagtagcttttctttattcttttgtaagactttcggaattaatggaatattattctttatatactctcggtactttagtttatctaagtatcggctttactttatatatgtatcgctatagttgtgtaactaggctaccagagaggtgtgtgggtttaatgttcgattattcggttgccctatgtcatctcgggggatatagagtactatttaataatgtagatgtggtgtctagattattaaatatcattatctgggcatattatgctgcgggacagtagaggtggatggctgatggtggcagctcagtacgggtattcctccacgttattatatattcctaagaaactctcctggggacggtactcctccgtatttagtcccggttggacggccatgacaggttgtcgtaagaaactcgacaacccgtggtggtctctcgaaacaccagaagggcattgttagggggtattggtcgcacaactgtgtactagcagatgtaaactaagattgagtgtatactataagtatttgaattgattgcttttctatttcttcccccacatagcataggattgtttaacgagagataagagtttttttgattcctgtcactctacccttgtgaatattttaacccctgcttagactctgatctacaagtgacatatatacattattagcatagttctctcttacaatcttcccttgggattaaataaatacgataccttggaatactcccgggtgaaatgctacaatggtatatccgtgcgcttgcgaatttcttctgtaaccatatatataccaggaccatttctggcgccattgctggaaattcatattttagtaatgtcattatgaaataccaacacacgcatgcgaagtgatctatgcaaaggcgatggatgaaaagtgtcatgaacaaaaaaaaacaagcttgttaagtaggtaaaagataagatgtgattggttgtattcataattcaagatagtgttgacgtaaaacacgaggcctgagagatctgcttaactccagtgcatgtccaaaactcgccttcgggtatgcaagcaacaagaaacaaagacaaagaaaccgcggttaaacctataaacgatagccgatcggctaagggccgatgacatatcatttatctttgacccgatatcatatatgtatcgatcggcagccttgaataaataagaaggaactaaatctactcgattggttgtagatattaacaatatatactttttatatcaatatatacttaaatcaagtgattgggatagatcggtcgccatgccgaaacagtataaatcacttagatcgaaatatatattaataatgggactatatatgttcatagcatagccgatcagatagatctagcatgtatcggctaatacttcgataccactctatactaagatattaaatcaagcagaatatatcaaacaaaggcctaatatacttaaatgcaataagatcttaaaataaagggcagatttaacatatcaatgaaacatatatagagtaaatatagttaaatcaggtaagatcggttgaaaccccgatactaccctaatcggcaaccaagaagcaggctagagattaagattctaatcacgacttataagatcaaactcaactgatgcagctataagtatgaaaagaaggacaatatctaaacaatcaagccattggaagtttcatagagtggtggatacctcatataatctaagtcaacatcgatatctaacctaatcggctgccctctaccgacagatgttagccgattgtagattagattgtagattagatagcgatattactagagattatgttagatatatgataactcgacaaattacataaacaagactagagtatcataaagatggaagcactaatcccgagaacgtaagccgccataacaagttttacctcttgttgaagatcgaaaccgatgcagctcaacccgaaagtaagaactcgtcgaaacaaaataaaagtaaaaagggtggcgatgcgctgagattgcattgaacgtctattcattgattacatggggttcggggtctatttatacccgagaattacaaactatatccatatcggacacgtctcttatctctaacaaactctaatatatcataagtctttatgacagacttttgcccaaacatatctctaaggaaattacacaaaatatcctaattaatagatacaattgccttctcaggactatccatgcgtggcaatcatcttgaagcatatcaattcaacccgatgacgtataccaagtcgtattgtcggaatcggctgtatcatctaacccagtctgactcggatttagccgatcccgattgtagccgatttggactccagccgattcttactctgtttccgcaacgatcttcatcttcgattccgcttcgatctaatcttctttttcgatactgatattaccaaatttggtcattaacagatagtcttggttacaacaggactaattatttttaggtctgcttatctaacatttgacataattttttttttaaaaaaaggcatatgtacctaagacaatcatatttaattacaataaaactaaggtgtaagtagtatgtaactacatgaaaactgctatagcttgatgggatagacaagcgcacctaatcacccacgtcatgcgatttactattcgcaagggaaaagtaggacggatgtattattattattattattattattattattattattattattattattattattattattattattggaatgtggcgttccaatggcttaattgcgaagactagtactcctagatgggacttttttttgacaaattggccatttacaaaaacttattttgaaactagtccctaccaaaaaacttcaaccaaaaaataggccgtcggctcagcaccaagagcgctggcactgaggttatacccagaagcgctaacaggcctggcgctgacatcgtgtcaccgtgacggccgagcgcctcccgctgccaacgtggcagggatgtcagcgccaatttccatggcgcattggtgctgagatacccaacctcagcgccaaacacattggtgctgactgttggaacttaaccattggctacctcaacgccaagtgatatttgggaaaacgttcaatctgaaaacgttctatttcaaataatgcgtttttgtcaaagtttcatggatgagctgtatagatattttgggcccgatcaggtattcctatcagatataatatctttttttttagattatgtcatttttctatatcagaaggtattccgattagaaaaatggaatcaaattgttttgatctaaatcagaaggtctggttctagtttccgaacagaagctactggatacggactggtaaagtgttgccttaacatttcctgtgagcagaaactattgtattccctccgtcactaaatatttgacacagttaactctttttaacatgtttgaccgttcatcttattaaaaaagtaattattaattcttttcctatcatttgattcattgttaaatatacttttatatatacatatagttttacatattttataatttttttaataagacgaacggtcaaacatgttttaaaaaatcaacggcgttaaatatttagggaatatttggggacagagggagtatatcatgttgcttgctactatcattctttcacaactttccctttttgttcctgttgaaaagagtaattttataacctgttgcaggtattctttgcacgtgtagttcttgctgatatgaacaaggaactcaaaggattaagattttaacatagatctatttagtttatttgtatatagttttgtaaccatttgggacttcctaatgtgcatggcttctgcagatgtgtgataagtggttctggaaggatagcaatgcatgtattggaaaagcttctgatcaactaacgtgccccattacttctgttacatggtactgacaattgcctacataatacaccaacatctctataaggtcctcaatgcatggatgcatgcctgatgaatcaacatatagaagtcttatatgagatttgcttaaaaacatcctttttgtgcttgcttaaaagtcaatggaacaattctaatgcatattgaatttacaaccaccggtcacaacgttcctaatatctatgcctatcaacatcaaaattaatcaatatgaatccccaaaatatttacaatacacatccctctcaagtctcaacttcactctaagcaaaatagtgcataacttacaaaaaaaactatatgaatcctctatacttacaactataacatcgcatacttacccacattccctaatccacaccacaacccgagccacatttaacaacccatgatttcaacaaaaaaaactctacaaaaatgaggaaaacattgagaaaattagggtttttagagaggatttaccttgcaaattaatatccaacgcaatgcccaccaaatctaaagtcttcaaacctccccccggctgctcgtcgctcagcgctttgcgctggcgtggacgtggccggggtgcgacacgtcgcgcggcgctggaggacggagggatttcgtgagcgctcctgcatccgcgtcgtctctagaattttgcataaaaaccctcgcatttatagatattttgttatatgtcctcgctgcaatttttttggtttacaaatattgcgtttaggcccttcgtgtcatatgaaatccaatacgaaggagataaaagggaaaaaaggaccgcgccctgaatcgtgtaaactgatgggtctttgcgcaaaaggctctccccgagaacctccccagcccccaggcatgtcaaaacaaaaaaaaaaagaaaaaaaaccccagccgccgcacccctctcatctctctcgttctctcctacgcgccgcctggatgtggcagggcgtggccgccgcccggtgtcctcccagcgccccttcctcccccgctacgccgtgcggccccctctccacgtcacgtcgtcgctgccaccgccgcggcgcactcttgtcggggtagttaaagatgagggctatctgctcgcaccacagaattttggacggcgtggacgcacgcacgtgtatccacgtccccgcgcatgtatccacgtcccccgcgcgcgctggaaggctggtgattttcgtacgctctggttgctcgcccgcagcgtcgtccgatcaaacatctagcgaccaaagagtggagaaggctacggatcggacatccgataaaacttaaaagattggatgtcctacctactgcaattctgacgattcatgcaaaccatgcattatgaaccacctcttccctattgtatacatgtacactctttatcaatttttgaaatgatttttctcctaacctatctatctgatctatgatctaattatatcgttatattcgttgtaattaaatttttataacaagatctcacatgagtatattacgttgagaaaaacatatgaaacatttttatactataaatgaaacaattgagttataagtactgaaacatcaaaagaacactattgcaatatttgcaaataaactagtgaaacatttgaaaaaacttattgaaacacctagataataggatttgcaacattcaataatccgtagcaacacaaaactttaaatgtgcaacaaagtcgaattaaaaattaagacatttatttctcacgcgtgaaacattcgattttaacggttgaaacatgtaaaaagataatgtacaacattgtacatgcactagtgaaacatcaataaatacttgttggaacattacattatcaatgcccaacatttaaaaagtaaaaaaaaagtcgtcgacatattgtcgtgtgatatcttgttacaaatatttaattgtaacgaatccaacaatataattagtttgaaattcggataaatagtttaatagaaaaaatcatttaaattttgaaacatactcgcatgtactctctcttagctaactggctatacacatgcgctaattgctcccttagattttttacgtacgattttttctttccggccgaattgaacggcgatgagaagaattttccccaaagagagctggtaattttgtaaaaaagttctcgcttatcttgataatcattattaagtccctcattgtaagttcactgtcctatgtattcttacgtaaagaccctctataggaccgcgctctgaaaaagtgcaagtaaggatgttttctgagaaatagaacaccctatccccccattcccccgaaaccctaccactaccctaccactactgttcccccatccctcctcttcctttgccctgccctgccctagcgccgccgccgcttttccttccctccccggcttctcttcgccggcgacgacgatgcggtgcggtgtctccggctcagattctaaagattctcgagctctccatgtcaagtaaagggaatggacggtgcggtctgttccccgaaaccctagccaccactattcccccacccttttctcgctctctcccctgacctttgcgacggggcaacctcgacctcgacttgccctcctcttttcaacgccgccgccgccagccttcctcgcatgccctcctctgacctaccccatatcctggagctctccctaccaatgctcccttctctctctctctctctctctctctctctctctctttctcccctcagttgagctagctccggggaatgtggtgatggagatcaatggtgagggggatcaatccgctagcccggtgcttgatttggtggataggcgcactcaatcttgaatccggtggtgttgtgctcagctcgggcatgagggggttgatccagaactgtggattgaactcaagatggtgatggtgaggcaagagctccacggtggggtggcatctcttgctcaagcttaaggatccgccgttgtgcgcgccatcatcactattcatcggttctacatctaggcggtaggtcagattgaaaccacatgccgtcgcatagaaaaacttcatttgcagttgggatgccgtcctcacttccggtgagtcaaagcatcaatctctttctctgtagacttgcctcatgtatagctggcatgcatcttctttttcctgcttccctgggttccctgctcacactgtgattctaacatcccaatctgaacaggcaaactgtcaaacttcgttttttttttcatgtatcattcttctattcacaatgataaacattgatagcctatcaaatttctttatcataagtgctagaatatttctgatttgtactgcatctcaaattgtacatgcgtgtgagctat

SEQ ID NO: 11988 - DNA, 791 bp, Oryza sativa
atctattcctgcagccccgatcgcaggttttctcgaagattcgagaagctccgtgaagaccttgagctaggaaagtcacctttgatcatcttgcacctataatttaaatctaagtatttcttttgcgcaaatattgcatgaataggtttaacacaagtatttcggccgcggcttgcgagatagcctgccggccccaatcctaattgctgcaattaccctccttgaattattgaacacttagacctcctttgtcgactgttgtgcttcgatgcatgggccttcgggctcgagcatcggaacacttcccttcaaatttaaaatatccaacgatgggtaaaacttggggttttacaaaagaattggaaaacccgacacctgggtcggtgcttgcaaactaaatgaatttccaaaaccgcggaccggaggacgttccaggagtacggtttcccgctcttgcacttaaggaccgtttccttggaatttcatccaaacataagataagtacaaccacatgggtggaataggacacccctagctgagtaattagctaatcgggggagccatgatgccaagagacatgtggattcaacggggtggtgccggggagaacccccgggcttcctggcacagtatggtctgggacctaacctattgtcggtctgggacccctctcgttggcatatggagaacctgtgtcggcttttgaaatgccttgtcgtgaaagccccaagtcaccaaacgtgtctgatcacaccggctaggtgaccaaggctagtaatatatgtgggtaa

SEQ ID NO: 11989 - DNA, 693 bp, Oryza sativa
cttaatagcagcggcaaggtaaaggtaacacgattggtaagagtacattttgccattggttcttatcatgattcaatcaactgtgatgttgtgcctatgcaagcatgttctatgttattaggtaggccatggcagtttgataaagattctttacactttggcaaatccaatcaatactcctttgtgcataatggaaaaaaacttgtgttacatcctatgtctcctgaagttattttaaaggatgaacttgctagagctagcaaacaaaaaaatcaggaacgtactaggagtgagcatcttattgcggctaatgaacttgagaagcataagaagaaacccaccaactctgttcaaaataataaaaatgagattaagctgaagggatcttgtttcattgcaacaaaatcagatttggatgaagttgacactgacactgttgtttgctatgctttggtttgcaaagaaaccttatttccaattgaggatactcctatttctttgcctcctccggtcactaaccttttgcaggagtatgctgatattttcccaaaggaggttctaccggggctgcccccaattcgagggattgagcaccaaattgacctcattcctggggcctctctaccaaaccgtgcgccatacaggaccaacccggaggaaacaaaggagattcagcgtcaagtgcaagagtta

SEQ ID NO: 11990 - DNA, 602 bp, Oryza sativa
  unsure (1)..(602): unsure at all n locations
cccaaaagaaaaggggaaaaaaagaagaagggacacatcagtgatagcgaagggcggcatccttttgagagcaaataattgcactccactggagtacccgtagtacgatccatcatcgacgagtccatgtcgtgtgccaccaacttgggtttaatataacggtgctcaatttacacagaaaataccttgcaaaatcccttgaaatatgcctctctgcctttgcagacgaccataaacatcaaggaaggcagcaaactgcaaacccccatcctgtccctctccccctcccttaccttccactcttgatggacacagccgacaagctccactctcccaccactccccttctcgcccacgcccaccatgacgaccgcctcttactctgctccccgccggcggccgtggagttccctgtgctcaagagcagggcggcgcggggcgcgctgctgctggcggcgaactacgcggcgttgtttgtcgggtcgctctcgtccagcctgctctctcggttctacttcgcgcacggcggcgccgaccggtggctggccacgctcgtccagtcggcgggattcccggcgctcctgctgncgctgatgtgcgcg

SEQ ID NO: 11991 - DNA, 20011 bp, Oryza sativa
tctcccgaggagagaaatagaaacatccttggtcgaatggcgtctggactgacgccctttatagtgtacgtgcaacagatctccggaaactgctgcagatgagcgttggcatcctcgttaggcttgccgcagaacgggctagcctgtgccatagtgatgaggctggacttcaagtcgaaatccacgtctcccatgttgatctgcggcccaatggccacattttcagcagatggagcggcaaactcgcgaagggtcttgtcagccatagtcttgaaagtcggtggcactggtacggctggtttctctatcggtagagttttctgcggaggaatgactcgcggcctgacgctccggaagaaagcttctggattttctttgaagttttccggcaagttgaaaccaataatgcactaccctgttttcacaacaaaagtgaaaacaaccaaggttagcctgcaaagagcagtgattatacagaggtaaatattaagtattagttcaggtaatctctattatgaatcttccccggtaacaacgctagaaatgctagttggtatttcttaacgacattactagaaatataatttcttgcaaaggcgcagaaatacttctgttatattatggttacagagttcatccgcaagcgcacggatataccattgtagcatctcacccaagagtattccaagggtatcgtatttattttatcccgagggaagatcatgtagagagaacttgactaataatttatatattacttgtgataatcatattctaagcaggggttaagataatccaacggtagagtgacacacaagcaagagctactcattcacataataaaatatctaagctaagtggaaagaaaagagagaaaatctattcctatacttctaatatacatagtatacatacattccagttatccgatatactagctaataccctctatccgatgccctcatggtatttcgagaagccacccctgactaccgagttccttacgacagcccgtcatgaccatacaaccggggctaaatacagaggagtactctccctagggaattaaattaggactatatacatgcgcggaggaatacctgtactgagctgtgaccatcagcggcccacctctcatccgcagcatataacctcaaataataatatcccgtaatttagacaccacgtctaaactaccagatactactctaatatcatcgtcatgacatagagtaattgcatatacaaatattatacccgcactaaagcatctcctagataacctagcagtattttcagtataacatgaccataatataaagtaggcattcatatactcggaaagtatttcaataccataaatgtataaagaataatattctaataatagtacaaagcatacaaaagaggaatggaaagctactagagccatacccgaactcttccgaaggcttccggactcctgatttctactctattcctaatccactagcttaagaacactaaactaacttgaaagaatatgagagagctcttgcttgaggtgtgtgtgtgaagtgaagtgagtgagctccttttataggcaggtatgacggttgtaactattgcgaaatgtctgaagcaccccgcaaccgccatcaggagaagatctagagcgtccctaccaaaccccacatccaaaggtggagagggaggttcagccaaaccaggggccggcccaaccagcccacaatttggctggtggcctcccggacttctcttctccgcagtcttttgaattttggcccaattggttgtgtcatttctaagttcttggcccattcatacataagtctgttcctcgacatcgtttgattgatttatcgtctgagttgatgttgattctccttcactttaaacctaatactagtggaatattattattctaacatatatatgcattgcaagaatcagtagttctcctctattttggtaatatattgacggtcgaaactgatcgataacgaccatcgacaaaacccctcaagcttgaacctttgctcgtcccaagtaaaggacgaaaggaaacaaaaacttggttattgatcaggagttgctactatgctgtatatctcaaaggtacaggtgcaaggtatatttactctctctcagattaaataatctttggcacggtggcttatccttacccatgattcccacgagacactgcttctccttgccttgagcggttgaaagacagaacaacaattagagtgccaatcacccaatctttattcgagtcttattccggaagttttcaaatgattttgcaaaaagaaagccaagttcctcaaatgattcactcagtctctctaagtgtatcaatttgaattcctcaccatttttgcctttttgattcctactctaaaatttgatatgtggagctcgatagggatcgaacatggcatacttgcatttacatttattactaagtcaaagacttagactaaaatagataactaaacatactcaagatcaagatcgtgcaaagtgtgtgtgcaaagtgtgtgatatatggtggaaatggtatatgaaaataaaagaaaaatgcttctcttttgtgcttatatatatatatatatttatatatatttatatatatctttactacttaaaaaattcatagtggtggtggtgagtcctaaacaatctaatggctgagagctctcccaggatcctctcgcaagatcaacgcaccagcccactccccatccatccgcgctcgcatcgcgcatccacccacccccacgcggctgcgcctccatccacgctcgcgcaaccgctcgtgtccgcgatgcacgcttccatccgcgcatgtcgcagcgctcctccccctttgacgccgatacatggctaggaaacgttgattccctatcaccgggcacacggagtgcaccatcagcggcgctgcggcggcacaccaggcacgcggagtgcgtcatcagccacacgtcgatgcagcctgggtggaacgcatgctggcactgggacaggacgcggagcagctcggcggtgtcgaacgcgccgcggcacacggcgcattcggtcgtctggtccctcaccacgtcgcgcagcgtcgcccatgtcgccgaaccggaacaccggagcgctcccacggcacagttgctcaggctggagcggcaccgcttgcacgaagacgacgacggctggaacccgaggcccagcacggcgacaccgcgcgccacgcccaggcagcggtgcttgcagtgcttggtgtagatgaggaagaggaagagctagcgcgaggaggatggccgtgagcaggcccactacgacggacacgtccacggcgagcgtcggcggcagcgggggtggtgccgacggggaggattccttcgtcagaatcatctctttcagtgaccatggataattaaatcttacgcgaaattaaaaatgaaaaaaaaagtttgtgaggcaaggcgtagctggaatgatatagatctgctcgattcgtaaagtgaatgggtgaaatgggcttgaggaaaaccgtgctttgctccaaatcctcaattcttctaaaaatagcggaagctatctttgatcaaagcaatttttagttgttgattttcggttctggattgcttgatattgatcatactacttcagaacatgtacatttgacgaaatagtgcggccaagtagcagtatcattcaccacaagaaagaatgaagcatccagtaataggattacgaattacaatacaagcatcacaatcgcagactcacatttcaccgctgatagctttctctgcaatgtgctgttgagagaattaatgagttaataatggtacaagacaaagcgaaatcagtagctgaaattaatacttacgaatccctgtttcgatagtacgtctaaacaggaaagtcaatacaacatcagctctctgcgacttgcattttcgaaacgctctgctcttggatcttatttctgtaatcttcttggattgcgatggagatattgagcagaacagttgagttgacctcccgccgatggatggaccatagctgcatcgcagaagatgctccgtgaaccgtgaacgaaaactctgcggtgcagtggcatcccttcaccggcgacggccttcttgggggcaaaagctcgttgtatgtccccgctgccgatagttgatccatagcacaacgcggggcgggcaggtcgccccgtccaataaaaacaccaggctccactccgttgcggatgcagctaacgagtttggggttggcggaagaccaaatgggactccaaggggagaggatggggatatgctgagtacatggtggggtgcgggtggggggggtccagactcactgaggtcttgtttgattaatccccttaaggctttgttcggtttggagaggattgaagaggattttggattgagagggaataaaatcctcttcaatcccctctaaactgaacaaggccttaggaatataccgcgcgcgtattgcttccagctccactaaatgcatcccggatccccaacacatccctgcgtgaggataaaaactacatccccaccagtcgccatcatgttgctcgagtcgaccatcgtgcctttttgcagtgctgtacacccatcacgctgctcggctcggcagtggtccatggcggtggcgccgctatgccggcggcccacgggggtggtgtggcaggggaggcccagggcggcgtcgcagagaggaggcccagggcggcggcgcggcgaggaggcccgcggcagcagcgcaacaggacgcgtcgatgtggttcacagcggtcgcaggctgcagcgcgggggctgtaggcgccggcgagtagagtcccacatgcgccggcgaggagggtaatttctgtgtgcttttctatgtgcttgctgtttcttgctgtccttgctgtttctgtgtgttttacttagaaattttaggtacccatgattcacaatcgagctcaggggtgaatttagatgtctatgaatttagatgtgggtagaaatatgcatgaatgcaaaataatattgtgtgagcaaacattatagaatgatgttgtgtgagcaaatggatgcctaggggtaagattgtcttttcatacaacttaacggagaggagttaacagcagttacggtatgatggtatttttgggagaaagaggcttgtgcaatggcatttatgggaagttgtctttgtcgatggcatttctggaattagggtgcttgttgattgcatttcatggattttctcatagaataatgtgcaaccacgacgcctccttggctcacaatgcttggtagagattactagattagaggttaggcagaggcctcatgaaaacaatcttgtccacgaggtagtaggtgacatgatttgatttatatttatgattgtttaagtgatgatttttcaaacggatatatacccgttgcaaagcacgggcatccaactagtgtgtgtgtgtgtatatatatatatatatatatttcataaccatgcctttccctccttctatcttcttttttttgaaaggattttctttttaggagaagaaagcatatgaaagcatgaataatttattttggtggtagtatggaaatggaatggaatattgcttagctcccagtgtaggagtttagcatgtgcatatatgtgagtatatgatcttgatcatagagcatgagaagtatctacacaagtcacaagagtttgacaaagttcaatggaatgacaagtaaccaaaatgtctatatggttcaatcatgatagcacatttttggctctggtaggaatttatatcaaatgaggaacttcaaatttatcattttgaaaaataaaacatccggaatttaagtcaaactaggatcaggatcatagcaactcttatttactatctcatatcttgcaacaaccaagacttagatcagcaagtgcagctcatttacctcagcttcccaaataattgttagatacttatatttaacctttgagagagtacttacctacgaacccatatataagagatataaaacagagcaactattcatcaattcaacaaagagaactagcctatcttacctagcatgactcaaacctatcctatctttttggtattttctattttgcaaatttttatgttgttttcaagtttataggatgcaattggaaagcaaatatgtaattggaaagggaaatatgcaatgtgatacaagttacctgagtagggggagagatgtcccccccctcccccaagcttggctttcgctcagggtccttggtaaggattgaacccctgaaagcggaagtacgcttaaagatcgtcgccctgttgatgcatcatgttgttgatgttggcgaactgagcatcagtagcctgttgccattcttgcatctgggctatgtgttccgtgaggttgtactggatctcccccgtctgcatatcaagggtgttcattctcctggtgatttcacccaactcccaacgagaggaactcgagcgccattcacttggagatggaggcacaccacttgatctgggaggttagttgtccccccattgtatgtcatgaggcgcacgccatcggtcctcactagcacttgcctggcttgagaccccgatgctgtggcgcggagcttgggtccatccgggtgcatccgcagttggctcccaaccagcctcatacatctgcacgggtgttgaggatgatgaactttttcgttcgttccttgccatgttgcgcgtctccctgtatgctccacctgcacgagattcttctatggtctgcaggggaatggttagttcacgatagttgtacaaatgataccctacatttggcagcgggatttcatttgtacaaccggggaaaaagtaaatcaaagatccatctactccatgcttgagaatatgcccttgcactagataagtctcatcaatacacggacgagtggctgagataaaaataatttggttgctaacgacccctagcccttttgctatccgagtaatcagagaagtgcactcaataggagcagagaactttatactttctaaccattgccttatcatacatttcacaggagcaattttgatctttctaaccatggcaaacatgataatcaattcatcccccctaatgggtctaagatcacctctagaaaacaaaatcatagcaatccatttgtacatgagcctaaggtaggattatggatatcattcgtactaggtttcttgcaaattggagcaccataaatgtcttccaaaaacctatttttctcgaacccagaaattcctttctgaagatcgattttacaagaatcgtgaaaaccaagaagtgtacttaagcctttccatgtaagtgagtactccttatggaaaaagcgaaaggaaattccatattctatttctttcaaagtgcatagaaattgcaaagtaagcaaatgagaacgaggctcatctaccatagcaaatctctgccaaccaaccgctttccaaatagaacgaaattcaacatccatacctatctttttcagcagctctggagagtattctcgcgtgtgagcatactcccagtcgctcagcatgtagtaggcttgtctctcccgatcattgacatggtcgatgtcggtgccgttcaggagtcgtcgcggagctttggcgtcttccatcgagacaacagctgatgaacgagtactagactcgtcatgatgacttgatgaagagccggaccccttgaacagacgagacaatcgcctcctcattctgcacaatggagcaagaatggactaactcggcgcgggttaggaatgacaagaatttcacccgccggttagttcaccaaagcaacttgtatatatgcaactaaatatttgaatttgagggaaactatcaaagcttgaatgaacttaagagcaaactttggagagggaatgaaaatgtgttgaaatggggtggagttccctctcccggccggttggcttaagtagtgcacccacaacagtcaaaaccgacctgtggggcccactagccgttgcctcaaagagggaggcagccgaccgttgcctagctggttcggccaaaccagggtattcggccgaacacctggtgggcccaaccggccccactttcgaccgttggattccaacagtcagtgtggtcgtggcacagcgaattttcgttaaaaattttattttggtttgctttgaaaaattcaattgaagaatttcctcaaaattcaaaaatcctaaatgcaactttgaaattcaaacatgcgatgatacaaaaaattcaaattattgaaagcaaaaatgcaagtacataccaatttacctgtgtggtgaaggtcgagtcatttaaattccgacgtgcaagaccgtacctcctttcagtttagtttgcggattttctacccgtctctggaggtgatggagcgggcatctttggcttctccctccacaccttcgttggctttggtgcggagggcagcttcctctgagttggctgctctagcttcttggccggtatgggtggttttaccggcgtcctccaataatggttcttgagcatcgttgtttccttctctaggaaattctgcatgaacttcaacaggctgtccgtcttgggtggctccacttcgaccacttgaatattctacggattcaacccgtactttatcctaaccatggaacattgttccgtcctcggttgaaactcaaacttcacttccttcccgtcgatgtggaaacggatactccccgttcccacgtcaaagttggctcctgcggtgctaaggaacggacgccccaggatgagcggcgtctcttttcccgtgtccatgtccagcaccacgaagtcaaccaggatgaagaagtctcgtatcttgactggcacatcctcctctatccctgctgtgtaacagactgacgaatcagccagttgaaggcgcattggtgttggtgccaacaccgtgaagttgagcttgtcgaagacgtcttttagcatgatgctgacactggctccaaggtcgcacaaggcctggtcgaactagtgtgccccgatcgagctggtgatcgtaggacaccccggatctttcttcttctccgggagcttgtggagtgcacggatataccgatgtagcacttcccctgcggagtattccaagggtatcgaatccaaaggaacgtgtgtggtcagatcttcctccggttcatccaaggataccaagcaaatgataggccaggatagagaggattactagtgagaaacagtgtctagggaaagcttaattttaatcctaatgcaatacttcaggcactggcaacccgttgttcccagatgtcgctctactaattacccggatagggaggacttaagtgatcttgagggctgtcaccacctctacacccacctcaaacgtactgtgggatacgcagcaattactggataacaattacctaaacaccacgtctaagcaattactatctactttagtgtttataactcaccaaaacaatcactatatttaagttgattatagtgaacaataattctgtatgctatttaggaactaaccaagaggtaattctcacaaaataaatctaaattactcaagaagaatattgtattgaattcagagtaataaacagaataaaagaaataggagaagattaccgacaactccggaattcttccaactccatctactctactctcttcctattctagtacacaatatagtacaatagagcctcttataattcagcttaagcttggaagtgtgtgttaaagtgagtgagatgatgtccttatataggggtaggtatgacagttggcgaaggggaaatgtccgaagtgccccgcaaccgccatcaggagtgatctgggacgtccatgccaaaaacctgggatcaacggtgatcaccagggtttggctgaacctgggggttcagccgaacttgggctgggcccccctagcctggactttggtctggctcctcatctgatcctcctctatccattcttcggtgtttgggctgattctctgatgtttctacgaagttcacaacccatccttgtatggatacatatttctcctcactttagtctagatttcctcccaacatcggggtttatcacctgcatacaaatatacaccaacactgtggaatatgtgagattaagcacctatcactatgttggatgttttattatctgaacttgatgcaggtgttggcggtatagaatcggcatttaacagccgccaacaaaaccccgccacacttagtcctttgctcgtccctgagtaaaggttagtgcagaatgaatttcttcaagatatgaatcaagcttataaatcattcacaaccatatctgcacctgtgaactttatcagtggctatcttaccatcttaagtaattgacaaatggaatgatctcgattccagtccttcttgcttctctctcagattcatgggatttttatgaattttcgcaaaccagctcttttcctcatattgactttctctcgtctctcaaagatgtatactttctttttggatcctcaccaaggcaaaatgtgccataattcatccctattctaaagctgatatgtggagcttggtagggataaatcgggacatacctgcatcatatatattgcaaagccaaaaatatggactcaagaagatcatcagtcatactcctagatcaagggtctttatttgtggatggaaaatgaaaacgtaaaatattttgtggaatgatggaataaagaaatgaatctcctttttttctatactctatcctcctttttgttttcttggcatgcatatggaagaggcatggctatattatttttttttcaactttgctcaatgttttgggagcaagctttatttccttctttctttctcccttttttcatacatagccatgccttgccttcccttttctcattttcttttttttaaccaagaacttttctaggagaagaaagcatagtctgaagtaggagtttatttgaatggaatttttgtggaaagtcatcttccagtgtacaagcttagcccaattatatatgtggaaatgggaagtggaaatgacaatgaccccttgatcatgagagtatgaaagatatctaacacgagtcacataaattcgacaaagctcaatataatgtcaagcagtcatatgtataacaaggttcatcaatgatatacttgcatatggccttggtaggtataagatgaagtcaattggaggattgagcttttaaaacaattttattttgaaaacaaattcccaagagtcataacaagagttgcaaggattcccttcatcttgaatcatctcacataaagcaattacttagatgcacaaggttccctaaacatggatggttgttcacaagcacaagttcagctgagaataatgaatatacaagatcaatcacatgaagaatttcattagttggaaattttatctttcacttatgcttgaaccaattgttttctgaattttcagctctagtactataccgtggtggagatatacagatacaagacgtgctcacctgcttacctatgaaaattgggagggattggggccagctttggttcggccgaaccactctgatgcccaattcctctgcaatttttttgcaaagttcagtgccttccacgtgttcagatattcagcaattttcagagcatatgcacgtcagaggctgggatatctcccccacacttattcaaaacctgaattttattaaacatgaaacaaaacaaactttggcaaacattggggttaacactaatgagccacattattcatagcaagtgcttacatgattggaaaaataaaaccaagcacctactactattttattcatgggaaaggaagcatctaattagcataatacttattttcctttcccatttctacgaatgcacgcttgatcttagcctggcacaaaccgcgactaagggtatcgaaattatttctaattcagcaagctctacccctagctccgcgttgtgatccctaaactctatgttctccttgcggagtttcttcacttgcgcagcgagcttatggattgagggctccggcgacttcacctcatcttcttgatattggcctggagtccttactattggagggggtgtcaaatgacgcttcaccttcataggtggagggctacgggattccgctgccccctccttctccgatgctatcaacggccggagtaaacccttgccatacccaccgccgggagtttgcactccctggatgcggaatcgctcctcctttggagtggatggagtagcggtgggtgtaacttacttatgtagcacctcatcccctgccttggtgaacagggtgcccacatagtgctcggcgggaggcggcgcggccttcccgtcatcttggaaaaggcgtcgcgccttcaacaagccgagttctcccgttgtcggccgtcgcgcaggcgaatccccccgaattttcgttcttgtgacatggcgaggggagacggatcgcactaccgaacggagggccgaacagggccgagaggggttcggccgaaccagggagctcgccgacgggctctagatttgcagtggagcccggcacagctgcgaggggttgagcccatatagcatttaccccttccatcgtgtattcttccaccggaatcaattgatttgccagcgtcggctctccggtgagattgtaagtggaattggaagaagagccaataaatgggatcagtgatttgcttgccattggtgaattggaggtgatggagcaaggtaattgggttgagatagagaggaggtttgcaaagtgggaaggaggaggaagaataggtgctttggttggatgcgactgatccacctccgagagcgcatcacaatggactatagacgagcgggagagattgctattcgaaaatggggccgaacgagcgccgctctggttcggccgaaccctggtgggtccggcaggcctccacttttcttcctaggcccactaattcctaagctaagcgcagaaatgacaactatacaaggttttaagcatgcactagatgagatcatcatggttcataatcgattaattcaataacatccacttcttcatctaaagtttcatttggttcaaggaaagtctttaagcgttgaccgtttaccttaaatatgttgcctgagtcgtcgcggagtgtgattgccccgtgcaaagaggtgtcgatgacgtcgaacggtccttcccatttactacgtagttttctgtggccaaaaagcttaaccctggagttgaacattagcactttgtctcctggcttaaatttcttgatttttatccttttgtcatgccagcgcttcgtcctttctttgtatatctttgcgttgtgataagccttctctctccattcttcaagttcagcgatttgcatttttctccattctcctgctccctcaaagtccatgttccagtttctgatggcccagtatgctctgtgctcaagttccacgggtagtcgacatgacttcccgtagactatctgatatggggacattccaatgggtgtcttgtaggctgtccggtatgcccacagtgcgtccggcaatctatccttccatcctgttcccattttgttgaccgtcttttgcagaatattcttgatttgtttgtttgatgtttctgcttgaccactggtctgtcgacggtaaggagtggccacattgtgtttggctcccatctctcgtaggaggtctcggaaggttttttcaatgaagtgagaacctccgtcacttatgaccattttgggtaccaaaccttgggaagatgatttctgtgaacatcttcttggcatgcctcgcatccgcggcgctgcacggcatagcctcaacccatttggagacatagttgactgccaccagaatgtactcgcagttgcgtgacttagggaaaggtcccataaagtctataccccaaacatcgaatatctcgacttgcaaattatatgtgaggggcattgcatctcaagcaagtgattcctccttgcctttggcagcttgtgcatcttctgacgaattcttttgagtcttcgtacattgttggccagaagaaaccactttgccaattcttggcctgggtgcggaatgcaccgtaatggccaccatagggtgaggcgtggcatcgttctatgatcttaagtacttcatcaattggcacacatcttcgtagtaagccgtcagagcagacccgatataggtatggctcatcccatatatgacggtgactttcatacttcagttttcgttgattttcccctggtggtatgtacttggataccatgtagtttactatgttggcatatcacgggttggagtcacgaaccgttatcaacatatcgtctctcaagaaatcattaattggttgttcctgcatgtcagtgatctgcagcctggacaaatgatctgctacagaattttctactccctttttatcctttatttctaagtcaaattcttggagcagcaaaatccatcttaagagacgcggtttagcatctttcttagtgagcaggtattttaaagcagcatgatcagtataaattatcaccttggctcccgctaagtaagacctaaacttatcgatagcaaaaacgaccgcgagcagctatttttcggtagttgcataattcaactgagctccggttagagttttgctagcgtaacagattgcatgatgctttttatccttggtttggcccaagactgcaccaacagcgaaatcgcttgcatcacacatgatctcgaaggacagagtccaatcaggaggttgaatgattagagtggagacgagtgcctttttgagaatttcaaaagattttaggcacgcgtcattgaactcaaagggcgcatccttagctagcaaattggtcaaaggcctggcgattgtagaaaagtccttgatgaaccttctataaaagccggcatgtcccaagaagctgtggattcctttgatgttcacaggaggaggaagctgatctataacatcaattttagcccgatcaacttcgattcctcgttcgaacactcgatgcccaagaactatcccttcacagaccatgaaatggcacttttcccaattaagcaccaggtccttttcttggtatcgttctaagactttgtctaaattctgtagacaatgaccgaaagtctttcgatagaccgagaagtcattcatgaagacttccatgatgtcttcgatcatgtccgagaaaatagacatcatacatctttggaaagatgcaggagcattacacagtccaaaagacatcctacagtatgcataggtgccatatggacatgtgaacgtagtcttactttagttctccggatggataggaatttgatgatacccggaatacccatcaaggaaacagaaaaaggaatgatttgccaaccgttccaacatttcatcaacgaagggtagcgggaaatgattcttttttgtagccttgttaagtttcctgtaatcgatgcacattctccatccggttacggttcgttgcgggattagttcattttgagcatttgcaacggccgtcattcctcccttctttggcacgacctgaactgggctaacccactcgctgtatggtacgagataaataatcctggcatgcaggagtttcaagacttccttctttacaacttctcgcattgcattaatgagccatcgttaaggttccctagagggagtactctcggggtcaataggaatacgatgggtgcaaagcgcgggattaatccccctgtggtcttgaagcgagtagccaagaacagaacgatgcttttccaacacggtgagaagatgttgagtctcgtcttcagagagcttgtcactgattatgacaggggccactctgtcattgtgtaggaaagcatatcataggcctggaggtagaggtttaagctcaagcggaggtcgaggtggcgggtccatgattggcaggtcgagagtctcaccaggatccacttactctttgatgaaataggggacctcatcttccagaagggcctcgggagactcgtgagggggaactgcaataacctcttccgctgactcaatttctgggagagggtcggtcaaggcgatccttgcccgtgagaatggaattgaaaattcagtctctcccagtgttattttgaggctatctaatcggggtgtgttgatgagaagttgctcaattggcagcccgattaggatgtcaaaatcttggatttcaaaggcatggaaatccaagatcgcctccctatcttcaaagcagacaagcacatcttgcacaatcccaaatccttcgatgatatttccgcttggatgtttgaagaatttgtttgtcggggtcactgtcttatcgcttaaataagcgaatgcaaaagactctgaaacgagattggccccgacagttagactgtagagaataccgacgtcattcccttccagatggcaaggaatgattcggggagcggtatttattcgaattacttcggatgaaagctctgcctcccttaaccattcatcactcattatgaatgttaactcccggacagtttctcgtaggaacccgagttccataggacctggaggtgacaaagaaacgggtggtttcctcttgctaaaatagttcaagttattgccgtagtcttcatcaaagccgtccctgaacaggattgcggcacgatccagagtctgaatttcatcattctcgacggacagctgctcaggaaccttctcatcaaccgagctaacagaagtggatggttcagcaagtagctcgatcgttagaggttcctctatcttggacacggatacctccggctggggttcattggagtgcgtcatgaaggaagtattttctagaatgcgatccaaaattgttcttccttctgacggcgttttgtgcaggaacgatcctctagcggttatgtccagatagaatgcagactccttatccaaacctgatgaggacatcccttccaacgatacaaccacgcctattgcacagcaaggaccaatgactagagctcgagctcgtgaacttaattatcaggaatatgggagaggaaccaaatcgcaagcagcactagcagcgctgatttgatgaagtcaatgctcttcactccggagggcaaacggggcaaatgagtacttgttggaaagatctcgtcgtctactttcagctatgtgtggcctcaccatcaactttgacccaggctgctcagaatgacgaaaatagttctttacatcagaaacttgggcttgggccttgtatcattacagccatcattacagcccattaggggtccacaaaacctagggtttgctcccacctcctctcctggtcattcctccacctatataaactcctagcagccaccattttgcactttgggttttgttttgatgtaagtttagctgcagctacttccttgtactcgcgtgtgtcggctagaccacccggatacttgtattccgaaccccattttggtttgtttaagtttcatcatttgacaagtgccgtgagctgtttccttgtcaacttgttcttgcttgttcttcgattgcttgcaggttcaaggttgttcttggcacggcaagaacagcaacaacgtggagtcggtgtaccggttgctaaggcgcagcacccctgtggtagttgtagtcggaccgccaacgtcgtatccttccccaaatcgaagtttatcctcctctcatcgaaagatcgggaacccccgttgctgcatcaagtggtatcagagctcaagttgctcggtgagagattttatcacttctttgtttttacctacagcccaaaagaaaaaccactaaaataggtcagacccgaaatcaccaaaacatgttgagcctttgctgttctacttagtctttgcttgctgagttttcgattgcatcgattggttgagttgctggttctagtagtttagtcctttagagtttcgagttctgctcacgaattcatcaccgcaaacacttccaccatcacttcatttatcttcatcccgctgccactatcaccaccatattcaccacgaaatccacctccaaccccaccaaatttcgtccaccacaaccagcagcaccctcatcaccacatcagccacccccaaatgcatttattgctgcctccaccaacagccaacccttttgcaactttttgaagtgaatcagcccttcccaagaaagcatttaagtgctctcacttttgacttgttggctgaatcatgtaactagccaaccaacccatcattacttcttgttttgacttgttagctgaagctttgagcttgctgtacaaaaaaaaagaaagaaaacaaaaaaaaagaaagaaaaaaaaatcagaagtgaagagaaggaaaaaaaaaggaagggaagagaggaagttgttgttgttgttgttttgtttgtgttattttcgtgctattttgagtggctacgcttgtgactaggctcgcgtctctaaagggttttgcctaggaccagtacaataccatcgttgaatgattattcaacttgctttgattaatgtggttctagctgtaccttgatattacttgcagccacctatagctccacaaatttttatctactatatcacaggatcgtgcttgttgtcagctccggtactactaaccattgttgctgttcttactatttgccaacgccttttacataacaaagtaagaacatgtaagaactcgtttgcacaagtttggtagaagtgtagatggacaacacctagctccaatagttgataggacatatttcttgtgaattgtttcttcccattaaccatgacaggaggatcgggggagcaccctcaacattcaccacgtacgaggggcatcatacaacattttgagcgccaagtgagggagcatgctgaaggccttgatgaggatgttagggtcgccaatgatcgccttggtcaattggaggctgctcaaattgacaccaactccaagctttcctcattggagaggtcccttgtggctgtgaacacttctcttgcaggtatcttgaatacgttggagagaatgggccaagatggtcatgatggatcggctaggcgcaaccacaatggccatgatgctaatagcagcatcgcagcaagggaagaactggagtatgctgctgacactgagcatgatgaggaggtacttggtcgtccacaaagacaacagcgccggcagcgccatggcatgggcgctccaccacggcgggaggtacgtgataatgatgattctttaggcaagatcaagtttaccattccttgctttgatggaaaatatgaccctgatgcatatcttacttgggagttagccattgatcagaaatttgcttgccatgattttcctgagaataaacgtgttagggctgctactagtgagttcactgattttgcatccatttggtggagtgaatttgttcgttccaatccaaataacactccccaaacctaggatgcaatgaaaagagtcatgcgagctagatttgttccttcatatcatgcacgtgatttgctgcacaaattgcaacaacttagacagggaaacaaatctgtagaggagtattatcaagctttgcaaacaggaatgcttcgttgtgattggtagaaaatgatgatgctggtatggctagattcatgggtgggctgaaccgagaaattcaggacattctagcctacaaagaatataattcaattaatcgtttgtttcatcttgcttgtaaagctgaaagggaagtacagggacgaagagctagcttcaggactaacatttctgcaggtcgtgctagctcttggacatcttctaacgctgctgcaccgtcaactcgagcagcagcaccatcgtcctcaagcaacaagctgcgtccctctacaagggctgcagg

SEQ ID NO: 11992 - DNA, 2332 bp, Oryza sativa
tttgggagttaccctattggaaattcttggacgtcccccacgcaatcgacgtgatgcacctcactaagaacctttgcataaaccttcttggcttcctaggtgtatacggaaagtcgaaagatacactggaagcacgtaatgatctgaagcatatggaacaacgcggcgaccttcacccagaaccaaaggagaaaggaatccattacttgagtccagccagctacactcttagcaaggcagagaaggaaagtatgtttgaatgcttggagagcataaaggtaccgtctggatactccacgaatatcaagcgaataataagcacgaaggagaagaagttcacaaacctaaagtctcatgactgtcacatgttgatgacacaactgctaccagttgtaataaggggtatctttccagacaatgtccgggcaacaataacaaagctatgtgcattcatgaacgcaatttcgcagaaggtcatcgatccggatagattagaagcccttcagaatgatgtggtgcaatgtctcgtcagttttgagttgatatttccaccttcatttttcaatataatgacgcatctgctttgtcatcttgtcaaagagatcagtattctcgggcctgtgtacctacaccaacatgttttctttcgagaggtacatgggcgttctgaagaagtatgttcgtaaccgtgctcgtctagaggcaagcatcgccaagggttatggaacagaggaggtcatcgaattttgcgtagaatttattgaagaacttcgcccaatcgaggtacctgaatcacgccataaagggagactatggggaaagggaactctcggaaggaaaggaataatgacggtagacaacaatttattccgtaaagcccatttcacggttctgcaacaatcttcattagtagctccttacatcaaggaacacttggctctagttcgcgccaggaacatcggtaagtccgatgcatggattacatggcatcacattgatactttccccgcgtggctacgacaacatctcatgggtaacgagtcgatcaaccaacaacttgccttcctggcgaggggaccgtctgggtcgatcgtgacattccaaggatatgagatcaatgggtacacattctacccgagagcccaagacatgaagagcacgaaccaaaacagcgttgttcgtgtcgatgccatgggacacgatggaacaactggcacgtattacggtgccatcgaggacatatgggaacttgactatggtcctctcaaggtccctctgttccggtgccaatgggttaggttgactggtggaggcgtaatgattgatgacagtgggatgacaacggttgaccttaacaaggttggatactcggatgaaccttttgtccttgccaatgatgtaacgcaagtcttttacgtgaaggacatatctagcaaaggaaagaagggcagagggcctgacgagcctaagcgtcacgtggttctcccaggcaaaagaaaaatcgtcggagttgaggacaagactgacgaggattacgatcagttggatgggcaaccccctttcacggtgacgattgaccctagcatcctcctatcaaatgaagacaccccttactcacgtagcgatcacaaggagggaacaatagtgaggagaaagtacgtgcggtcaaccgtcaccgccaatgtattgccgtaattattgtgtacacgatgtaaactattttggatgtattgattatccatataaatcaattgttgtatggcatatgttaattacgcacgattattagaggttttaacaattttaaatcatgtatatgctagttatatgcgataattacaatttttaaaagttttaaatcacgcaggtggcatttacatatgttaattagagtttttaacaattaatttactatcattcatatgctaattatatatgactattcgaatttttaaaagttttaaatcatgcatgtggcatttacatatgttaattagtgtttttaataattaatttactatcattcatatgctaattatatatgattattacaatttttattaattttacatcatgccgtatgtatatacatatgttaattagagtttttaacaatttaatatcattcatatgctaagtatatatgattattagaatttttattaattttaaatcatatgtttgcttattacgttttatccacttaatttattacagacaacaataaattttcgaagtaattgtcattaatttttgtactttaaataattttaatgcattattttctattttagaaacacatatgtaatggaaattaatattcagtgcgctt

SEQ ID NO: 11993 - DNA, 20311 bp, Oryza sativa
ctaaagatctaggggtatatatattcccgatgcgcgccctcgtcttctccaccaacacttagaagtttttgcccgatcgatctctctcggcttctccttcgccgccactgcctagggcatccccgcgccggcgccgccgtcgtatctcgccgtcgtctcgcgctcgtcgtcgtcgccgcctccgcctcctccgccgccgccgcatctctagggtgagagccaccgccgcctccctctcagctctctctctccgatctcgatctctctctctccctctcgattgccgctggccgcctcgttgccgacgccgacgtcgtcacgacacgacgccgcggcggcatggcaccgccgcgccgccacgccgccgccgcgcaacgccaccgcgtaatgcctccacgccgccgccacgtcgccgccgcgccgccccgccgccgctccgttgccgccacaccgccgctccgctgccgccacgacatcgaacgaattaacgtgaacgtgaacgaacgtgaacgagcgaacgaatgtgaacgagcgaacgaacatgaacgagaacgagcgaacgaacgtgaacaagaacgtgaacgagcggacgaacgtgaacgagaattgaatgtgaaagaacgaacgaacgtgaatgaacgagtgtgaacgaacgtcaacaaacgtgaacgtgaacgaacgtgaactaacgaacgtgaacgtgaacgaacgtgaacgtgaaatgcaatatatgcaggtgaatgaacgtgaacgaacgaatgtaggtgaatgaaacgtgaccttaacgagaacgctaacgtgaacgatcgtgaacgaaacgtgaacgtcaaatgcaatatatgttacttcgcgtttatcctaatacatctttttgtatgttgcagaaaagacgttgtcggagtcgtccctcaagccggagtggtagctagccctcgaaggaattcgcgcaggcaagtgacgtaattatatatatgattgttatatttgtaatgcaattaagactattagatttaatatacgacacttagacttagttttaatataagattattatagttttaatataagattattagatttgtaactagacttagcatataagattgtgtagggttctaatatacgacagttagactacgcatatatgactatttgagttttagtataagattatttgagttttaatataagattattagatttgtaattagacttagtatataattattgactagctagggtcctataatatacgtcacctagacttagcatatatcactatttgagttttagtataagattattagatttgtaattagacttagcatataagattgtgtagggttctaatatacgatagttacacttagcatatatgactatttgagttttagtataagattatttgagttttaatataagattattatacttgtaattaaacttagtatataattattgactagctagggtcctataatatacgtcacctagacttagcatatatcactatttgagttttagtataagattattagatttgtaattagacttagcatataagattgtgtagggttctaatatacgacagttacacttagcatatatgactatttgagttttagtataagattatttaagttttaatatacgattattagatttgtaattagacttagcatatacgatagttagacttagcatatacgacagttagactaagcatatatgacttcgcatacacgacagttagacgtagtatatatgacttagcatatatgattgttagcctataagattgttaaaacataaatgtctcatgacttagcagttgtttcctatatgaacagatggctaatcgcgatgaggaacagatattgtacgatataatcgtagagggaagcagccagtactggaacgaagaagagggtaacgaggatccaaaccagtatttgaacgaggaagggaacgtggagagggatgcgtaggggaaccaggaggggcacgtggaaagggatgtggaggggaaccaggaagaggaggctagtggaagtcaaccctccgctggacagaagagggcacgcgggcaacgaggtgccgcgaagaagcttgagggtcggcacatcataacggaagtggacgaagacggccgacctagtgccccggcagaagccgccaagaactatgtacatcacagcggttgggttgtgcgggataatgtgcctgtcagtacggtgtactggcgcagaacaagggcacgcggagatcatgagagctttgacacagattcggagaaagagatgctgtgggccacaatgctcgagacattcacccttcccgcgggtatataagacaaagtaaaaggtggactctgaaggaaatggcagaacagtttcaaagctttaagggagatctgtaccagaaatatatcctgaaggggcagacaccgaacttcgatacattcccaaagctaagagatcactgggacaagttcgttgcatataagacaggtgaacaagggcaagcgatgatgggaagaaacaaagaaaataccgccaagaagaagtaccatcaccacttggggtcaggcggctatagcgtcgcgatgccgaagtaggaggagatggaggctagcttgcttgagaggggtatcgaaccggccaccgctaattggccggaacgatcgaagttctggtactatgctcacggtggaacgctcaacccagctgatggctccctagtcttcggcgatcagatacgcgaggctgcgcgtcaactaacagacgcagtggaagcctcttctcagggcacgttccgaccggacagagagaaggacgacctgtcactcgccctgcagactccagagcatccaggatgaacacgagggaaaagggtgattccttggaagattgggttcaaggaggacatccacacatacaggagtcggatgaggagcaagagagataccgaggcgaagattgtagatcttgagttcagggtatcgagctacgagctcagcatgcaagaggaggtggcaaggaaggttgatgaatgcatggccgcacatcggtcccatgatccccagccgaccatgcctcctgctatggtgagcccgtcaggaaatcgtagcagctgcgcctcaacggggtaggtaggatcacacagcatggacgccatgcaaacccaggacgaaaccacctgccccgttgatgacatcactcagcggacaccatgtgagctgcatattcccttcaagaacttatcaataaaggtaagctcgtagtttatagattttagatttggccattccgctagttgctgcttatatatgttgattactaataaataacctctcaccacatgaaggtggcgtcgagcatggccatcccaacggacccttcaggtacttaccactgcaggccgattccagcaggatactccaaggtcgaaggcgcgtacgaggacctcgagctggattaccctggaggagacggtgagacgcatctacgagacacaagccatgctattattctatggcgcaagcggtacatcatcctccctaggcgacaagcggcgtctcgtgcaccatctcctccggctccgccatctcctcctcaggctcctgcaccgtctcctcctcatgctccagcaccgtctccacctcaggctcctgcaccaactcctcctcaggctcctacaccgactccgcaagctcctcttccggcaccttccaagtcaagggccccccaagctccaccgcctgcccccacaagggcaacgaagaaggcgaaagttgacgccgccaagaacaaggacccggggtatgattgcacgcaagaggagcttgatgcttacgtggcatcagaagtcaggagacaattcaagcctcgaagtctagaaaagaagattcctatagacccgagtgtcaggaacttcttcaggggtatgtctgcacctgccaaggaggccataaagctatcggactatgagcgaacactcaaaaaagcatcttctggaaagtccaaaccagtccctcagcttggagagcaaccaaaccaggagatcgagccgttggtgaccggtgaagattttggaatacaagactttattaatgacaccgggctaactacggatcaattgctacgagacgcaccaatcgaaaaggcagaagtgaaatacatgtacgaactcggtaaactgcttgtcaagcctgagctgctgcagtccctacccacacaaatgtacaagttccatcagctgtacatggagatgagcgccaccggtagagagatgatcggagcgaggatcagggacacagacttcttgcaaggagatgacattctctggatcaatttcaagggaatctacgaactataccagctggacgccctcgacgtctctattatgagttgctggattttgtaagtatattgttcagttagatttcttactacgtctcctttaattaattaggtccttgtatataagtagactatatataatatatactcccttttatcgttgtagaatggagattcaaagggcccgacggcggggggtttttgatactggattcatcgaccctcggaaagtaaacgttgcaatgctcgaccaatatccgcaagccacaaaggacaatctcgtccatctcctgaaggcgcagcattacaagacgttcatattgttgccgtacaacacagagttagtttaattttactgtcttcctataccaaattttattcccatacgaacatgctaagtgtttcatatgtaatgcatcccacgtacattgcagattccactgggtgcttttactcttcgacctggaggcctacaccgtcaacgtatatgactcaatggataaaaaagagtctacgtttgacaaggttttcgaacttatagacaggtactgtcataagttcctatgttaattaagaatcttgttatagttaattgctactacaaatcatagctttaaactccatgtagggcttggtatcggttccgtcatttggtccgcggcaaatggagagaaagacttaggcggaagttcaaatttcctgtgagtacacatgctctacatttatatttctccgattcaaatacatacaagtgtacattaattagatctctcgtcgtttgtcatttatttatagtgcgcaaagcaaaagcagggaactaacttgtgcggctactacgtgtgcgagtattgccactgccttgcagaccaaatcatcaccacaagagagctcgatgtacgtacaaataaattcaaaatttcattacgtatcgatttgttgtttaattactaatcaatttcatacattcatataatttattcgcatgagggataacctgatcacacacaaggaatttatcacggcggttcaagaacaactcatgggattcatcaacggacaaatccttgatcccaagggtgaattctactacgacagaaatacaattcataggtccttagcttctgagatagcgactactactacgttgaaatcgtagctagctaggacatataatgaattgtaattaatacatgactatgtttctatatgcatgtgtacacattttctataatgtaaatatatattttggtcatatatatatatatatatatatatatatatatatatatatataaaccatgcagcaacagggccatgcaaaaaaaaggtcagctacaccaaccgggactaaagatggcttagccggccacgtggctgagccatctttagtcccggttattttatccgggactaaagatagcaatctttagtcccggattggtagtcccggtttggaaaccgagactaaaggggggttacgaatcgggactacaaacgctttctccaccagtgcttggagtccgtgctgcagctggctacagatctgtagcccgctgctcttctctctcatcttttatcttattaaaatatatttatagctggctaatagtctgctattgtacctgctcttagggagaaacaacagtcagtattgtggctcagtggctgcaacacagtagcagtgctcatcgatcattacatgacaatatgacgatccacagcacgtacattacacatttacacggcagcaaagtacagtagctactcctaattagtttcatacagaatgttggatgaatatatatactgttcctatataattatccccattagctctgattataggtagccatatcatcttatttatttcagtcactagatcaatatcaaactccaaataataaccatgcatcaaaccatgtgtaatgcaacctttgtatatcacttcttcatgttctatgtcaccatgcatgtatccgtttaaaatagctaataatcttcacaaatgactcttaatttttttagacaaaatgttattgcaacgcgcgaggcatcattttgtttcatgaagggatagttgcctatcgagatgctcctaattaattaattgtggggtagctactttgttatcaaaaaccatttaagtatctgttgattcattaatttagtatcgactttgcagtagcttatcaattgtttttacaatgaaaatatccttatgaacatacaatgttgtaagttgtgttatctcgttagaaggttcaaaaacactttttcctcaattttgcctacatgatacgatatgttagcgtgtacctcacatgaatcccatacattaggtcatttcccttcttcgtctccccgttatctccccagtagctcacaacattgtttacacttttggaaaacctctgaaaattgggtgatttcggtggtgaccaaaaaatcatgatttttggacctttttcaccaaattattgaaaattttaacaaattttgaacactattttgactacatttcccaaaaattgaaaaaatctaacaatttcggtcgagatagttacattgccgaggggtctgaaatttcaatcctaacaacatgacatcccctgtgaatgtcatcgatctgtcaaagtgcaccaacttcccacccaccgcaccactaaactcacctctatcacatcgaacccttgcctcacccacccaccatcacaccaccagcctagattaagccaaacaagagaagaaagagtcgcgttgcccgtctgccaacgacgtagggagagggtatccttgatgtacttgatgccaagccattttctggagcgggtgaagggtttggtgtcatctcagtagcgaaggaagccgtatgagttgaagaggctatacttgatgacctacaggccttgtagtctacctgactaatagagacgccgccatcagttgcgtggacatggtggtgggtagtgatggtggcaaacgatgcgaggaggaacacatagtgcttgttgctatggtgaggagcatgtgtagagggagttgtcgttttctgaggagcaagagaacatgagtgtgaggcggcagagcattgtgggaccggtgagcaatagggagaggaagagaagatgccacttgagtaagtgggctccataatagagtgccacactagcatgttacgatataggcgaaagcgtaaaagattaggaagtctgatctccagagaaaaaacataagacgaaactaatagtgccatttaaaataaataatagtgccccttgaaaaggtgacagtttggttagtgacaaatagttacattctcgttgggccaccgcggtttgcttcccacaagcctacaggggtgagggggcctggccttccacaacaagtccggctcaatacagccgcaccgcacaaaacctgggcccccaacgtcgacgctgcggcgctgcctgctacgctcgctttctcctcgtctccgctccgcttcgccggttgacggtgcgacgcacgaagcgacatactctgatactcgcgcacgctgcagctgcacgcaccgccgaggcgccaacacgacgctgtgccgtggcgcgccgacaatcatcgcgcatcaccgtggcccgtgagaactgaggtaagtacgtacgtctccttccagcttgccctggcacagcgtggtctccctatactcaattgctggcttcgccccctgcctgcagtggcccacgcctcggattcgaggatgcgctgcctccgccgcccggcaacccacctgctctgctccgctcggagcgcccacgccgggaacgcccccagggtgctcgacgaaatgccccttccgcctctcgctccatcacgccgcacgacgactctggtccgcgcgcaccacctgctcggcgcaatgcgcgggccggggttctgcaccaccgtgggctcagaatcagatgtggagccgcgattcacggtggtgccgggcgccgcccaggagggccttgcaccgggcgtgtccgaggcggcagaaagggtctgccgcgtcgtgtctgcccagccggagcatagaattgcgccggtgctcgatgctcttggggtaaccgtctcgccgcagttggtggccgaggttctcaagaacctaagcaacgctggcattcttgcgcttgctttcttccgatgggcagagaggcagcaaggcttcagatactcggccgagggattccataatttgattgaggctctcggcaagatcaagcagttcaggctggtgtggagcttagtggaggccatgcggtgccggagctgtctgtccaaggacacgttcaagatcattgtcaggaggtatgcccgggccagaaaggtcaaggaagctgtcgagacatttgagaagatgtccagttttgggctgaaaacagacttgtcagattacaactggctgattgatatattgagcaagtccaagcaagtgaagaaggcgcacgccatcttcaaggagatgaagagaaaaggtaggttcatacctgatctcaagacatacactgtcctcatggaaggctggggccatgagaaggacttgctgatgctcaaggcagtgtaccaagaaatgctcgatgcaggcatcaagcctgatgtcgtcgcgtacgggatgctaatcagtgcattttgcaagtctggcaaatgtgatgaggctatcaaggtgtttcatgagatggaagagagtggttgcatgccaagccctcatgtatattgtatgcttatcaacggcctcggttcaatggagagactcgatgaagctttgaaatactttcagctttctaaagaaagtgggttccccatggaggtgcctacgtgcaatgcagttattggggcttactgcagagccttggagtttcatcatgctttcaaaatggttgatgagatgagaaagagtggcattggcccaaatacccgtacctatgatattattcttaaccatcttataaaatctgagaagatagaagaggcttataatctattccagagaatggagagagatggctgtgagcctgagctcaatacatatacaatgatggtcggtatgttctgtagcaatgaaagagttgatatggccttgaaggtatggaagcaaatgaaagagaagggtgtcctaccctgtatgcatatgttttcagcgttgatcaatgggttatgctttgagaaccggctggaagaagcttgtgtatatttccaggagatgttagacaaaggaattaggccaccaggtcaactttttagtaatctgaaagaagcgcttgttgaaggaggcagaattaccttggcacaggaggtgactcaaaggttggaaatgttacggagaacaccaatgcgtggttgagtaatcaagcacataacgtaagacggcatcttagctcttttgactctttagtttgtcagaaaacggatgtctcatttacaacctacatgatactactagtaaggtgcccatgtgtctgcaagaggtcatcaacctcatgttcggccgtatctttatgcttctcaggcatcacattcgactgcattcatgaagaatgcgcatctccggtcaaaaaaaaaaaaaaggaatgtgcatgaatgcagcagattttttccttcctttgagtatgtctaaatacgaccgaagacatccatatatctatctacatcgatatccattggagctgacatggcatgattgtgtggcaggatgggaactgggtggtaggcgcgttggcctgactgtatgcaagcagcaagctcttataccgtcctcacttggcttggccgggccctaaaaatgaatttgtatttcttgtttaaaatttactcctgaaatagtttacatcatctgtattgtatagagggattgaactaaataaaaggcgctggctgctcaaacgtttcaaattcataaagaaggtaagcaagttaccaaaccaaattacacgtttcaaatttataatgtggatggctgaaattttgtttatgacaaccacaaatgatttaactattacaaagctcaaaagttatttaaaaaaagcaaagagatgctgataaagaaagttctttagaaatcgtaccatttggtaaattgggatatgtaacatggcctaacatagtgataggttcattggaaatcttgaagaaaaagggccaccaagccccaaatatcacaatgctgcggaactaagcttcacggttctgtttttccaagttgcaatcatgtgttctatatatttctacctagattgaatttagagatttgagcagctcaacaaaatggagacacatcgcaatttactgtatataaactttatagtcatacaggtacaaacttataaatgcatcgacatcatgagtgaattactaaccacaaacattttttctttagtatactgtacacggtaacacgggtacggtacattacaaaacagacagcttgaattcgatatctcacatgccattaagtacggagtactacccaggatctttcttatttcagggacagtgatataagatgttcttccatgggtgtccgttttaatttcaataggacattgcttattaactgggacctgcgttctggtatgatacaaacaccttcagttcttatgctgcattctaccgctctctgcaccagcataaggatcaatgataacatttatcaccgctggcttcctggcacgaaacgactctgaaagggcggattttagctcatctggtgtctcaacaagataaccttttcctccaaaagcttccatcattttatggtaaccagcagctggaacgaaagaggttggggcaggatcatctttgtacggtccggttatctcatcagggcttctccgatcaccgccataaactccattattgttgaagacaattacaacaacaggcagctggtaccttaccaatgtctgcaaagtgaacaacaaagtataaacgttaaggtacctttagtacaatattgtgaaaatagaacatagtaccgccgataatatatgacaccattgttttctttaattcgtttgactgtcttttcaagaaatatgcaaatagacaaacatacacggcacgtttaaagtactattgatgacaggtctagtggtactcttttcacttaactaagtaactgaataactagtgtaactattgatgacaggtctagtggtactcttttcacttaactaagtaactgaataactagtgtactattgttggtcgaagtttaaggaaaatgtcaatggtgccatatatttaaaaccagagggaatagctatgtactactctctttttattaaaagtgcaactagttagcaggcacagaagcagtgaggttttctcccatctttcggaggagtatacctccctaccacttaagaggcaaaaaaattaaaatggctgatctaatcataacaagaggaacaattgacaatatttggcacataaatattaatcacactatatcacataatttaatttgcacagttccattgttgcttgacccacacatcggccaattgatatccaactatcaagtagtagtagcaaaccacaaattctcaaacagttattaatactcgaagcgaattattgagcatgagtcctacaccctacaatttaggagtgctccactaataattcattgaatgggttaaacacaactatatactaaatcatgtcatcttataaatttattattaaacaagctatacaactcccacatcagatatagcattgagaagaacataaagcttggaatggccttaccttacagctggattttaattaataaattgaagcatatcattttgttataatgacaaaaaatgagcattattagtttcaagaaaattatgtgcattaatgtaagaaacaacaaggttaacataaatacagaattgcatggttgccaattggcaatatttccagataggcctctcgtaaaatgctgtaattttaggttccctgtaaaatgtataatttaggactaagggtatcctgaatttctgattctttttacttcgatattacgaaggtacaactacgatcaacatataaaaaatacgagtaaatttcactttgggccacattttttaccgatgtttcactttggatcaccctttaaccaatgttttcactttggaccaggtaaccttgccattgtttcaccttggaccatcctcaactcttttatccatgtacatctaatttgtcatatgtcaaagaaacggtctacaatagtgatcaatttgagttgacatatgacaaattagggaccaatggtacaatagtgatcaatttgagttgataaaggatcttctacctttttatttaaatatatacaaacaaccagtgcgttggctgtgtgccttatggcagaagccggtgatgtaaaaacattttcattatctaaaagaaataatacaaccagcacagctataaatgatacatgattcttgggaacgctatttaaatgccatgtcatctttatctatttgttagaggattttatttgcatgatatcccaatttcataacttaaggggatttgttagctcattgtagttggcagtctcatagttatactaatattatgacaggtagttattactatatagaattgtctgaatagttttgatatcatgacatgcttaatcaactactttttgcatgagcaaaaatgaatatcacttgcaccgcacaacagcatggcaggagcaaaagtaaagaatatgagccaacaaaggtgctaataatagcattgtgcaaattaaatcaaataaattgtgaattgtggtagatgttttatttgtcaaagtggaacaggaatgccattattcatacctcaacctccattgcactgaatccaaatccagaatcaccctccacagcaaccacaagtcgatcaggctcagcaactgcagctgcaacacagaatcccaatccaactcccattgtcccccatgtacctgcatccagtctagtcctcggctcgttctgcacaagcactgccctgccgacatccatggtgtttgccccttctgagaccactacaggagcagggtttccctcagcaagtatagcatcccggataatccgcaaaggtgtcaggaaattgaatggcacaacatccttggcaagctgagcctccatcttaagaacattgtccctggccttcttggtgattgcttcaacccatgggtgtgatggtgccaagcagaatggctggtccttgatctccctattgataagctccacaactctcttggcatccccaacaattccaacatgcggcttccggagctcaatctcctcctcgcagacatccacaagtatgaatttcacatctttggaccatttgggtggctcaccgaagtgaagcaaccaattaagccgagcaccaacgactaatgccacatcacattgcccaatggcgagagagcgcgccgcggtggccgacagtgggtgcgtgtcgggcacaacaccctttcccatcggcgtcgggaggaaggggatgcccgtggtatccaccagcttccagatggcgtcctcagcgcgagaatacgccgcgcccttcccaaacacaaccagaggccgctccgcgcggcggagcagctccgccgccttctcgattccctcgtccagggacttgtgcttgggtggagaagaatcggatttggccgaatcggcggcggcagcgtcgatgagggcggcggcctccgattccgtgagggtttggtggaggacgtcggatgggatgtcgaggtagcagccgccggggcggccggagacggtggcggcgagggcctggaagacgaggcgagggatgtcggcgatggtggttgccttgacggcgatcttgatgaaaggcttggtggcggcgatctggtcgagctcctggaagtcgcccctgccggcgtctggctgggagcaggagccggagaccatgaggagcggccaggcgttggcggtggcgtgggagaggcccgcgaggccgtggacgcagccggggccggagacggtgaggagcaggccgggggagccggtgaggaagccgtaggcggcggcggcgtagcccgcggactgctcgttgcggaaggcgaggaagcggacaccggcggccgcggcgcgggacgcgagggaggtgaccgggatgcccaccaccccgaacatgtgccgcgccccggccgcggccagcgcgcgcccggcgagggcgctgccgtcgaccttcatggcagctggagcggcggtgtcggtcgccattccctctccctaggctggctgcctggctggggttgcgtgccgtcgcctgagcagctcaggcttatagcgggggcggtcgggggagagccggagagtcgccgcgacggcgactgcgacggcgacgcggcgacgccgcagttgaagctggaggcaggcagatgaacctgctgctaggaagttggaagacgcggtgtatctggacgagacaactccaaagaaatactcctatcctactcgatcatagtacacgtcactcgggcacttgcagacttgtttgaccagagttgtcaaactgccgacacatcgtatctgtttttcggaggcgcatgaagcgtccgattttagcaggcagttgatcgaaattgtttcaccgggtacattgtaaatgtcaaccaaatcagcttatggaacattttgctatagcgtatgaaacaaacagttttcaaaaaaatcagacgatgtttcaccctatataaaaacattgttttagcaaatagcgaaagaatgtttcaattcgctgcaacatatgatccgtatataatgaaacattacgagtacacttgctgaaacattgttggtggaaaaaaaaacgaaacggattcccttaataaagcgtttccgtaactgtgcatgaattggggtgtgtggtgacgggtgaggacggcgcggaggcgcaggagcgcgggaggacggggcgtctgatgcatgtgtgcccgcatcaggcgcccgatttaaagaattttcgctgtttttctggcaaaaatttcatgttatgggactgtttagatcccaccctaaaattttacaccttgtcacatcgaatatttgaacacatgcattaagtattaaatataggctaaaaataagtaattgcacatattgcgactactttgcaagacgaatcttttaagcctaattgctccatgatttgacaatgtggttttacagtaaacatgtgctaatgaggcttaataaatttgtctcgcggtttactgacggatactgtaattagttttttattagtgcccgaacacctcgtgcgataccctatataatatctaatgtgacacgccaaaactttacacccctagatttaaacacccagtgtcactgaaaaatgtgccatttgagatgccacctatttttaatttttcatactgatcattagaaatgtttatatctttactacttaaaaaatttgtagtggtggtggtgagtcctaaacgatcaaatggttaacattcatcggaggatcctctcacaggcatcagcggatgagattttctcccacgatccacccatcgcaccacttctcatctccctgatccgcatcacgctccctctctctccgatccgtaatttcgcatcgcactccccagccccccatccttcctcctcagcgcgccgcctcctcaccccaccgacgcgccgccttcccatcccgcccaacccgcgccttcttctccggttgtcctccctccgtattgtgccgtccctcgctccgccccctccctctccatcgcgccaccgccccctccataaaccataacctccctcaaatcccgatcatctgcgtagccatcgttatcgtcggaccgagctcttcgatcatcactctctgttgccgccgctgcatcggacccatcggaatggtggataggaatgtggacctcagtatggttgaggggtaggacgagatgatggcggtggttgcaggcgcgtccaccagcacgctcgctggagtgtggagaggcgcgcgcccgctgctgcgagtcaccggcggtgtcgtcggcatcatcgtcagctagctctgcatattaaaaacataatatgagttgtcaagtaaagttagtgcaatgtaataagatgtttttaatttacctatgagattcactattagtatttcctcttgcatcaatttagtggaagatatcaaaaaacaacagaagatattcaaaaaggaactatttggatggaaatatgcatatattgatggattatcaacacccggaagctaatggtaaatacaatttatttttctcgatagcctagcaacataatttcattaggataaaacctttattcgtacctaatatatttccctcttgctaagatttagctcagggtactcttcattcaatggcctagccagatccatgctgcgtgttaattatgacatgggttgtgctgtttcttgttggagaaaatcgttaagtatctcctggcattcatgccgctgccatcaacattctttcttgatggctgtgagcatgtcatattttatctggtgttatcccagctgatgagcatcccattcgattttttttctttgtttacattggttaagcttgatgcatttttcagatttgcttccatggatcggtttggtcaggtagtcttgttgcaatgcagagttttagaaatgaacggttcatatacttcatatcatagttgtacatagtggtttgttctaatcattcccatctgattcttgggagtagccaaattagtacatggtcagatattaggaaggaagagcagtataatatctatgtgcagtttagttctaattgaccggctattctcacacgttggcttttttattgactaagatatcatttttcttctgttttcactgcagtccaaatgtgctggtcaattcataatcgatcatcaggcctggaatttgtctcaaggtatatacatggaatagtgttccaatatgagtagtgactaaagcagattaatttgaattgtgaactcttttaccaagtgaacagagactctgtcaaataatcaggtaagtactaaaatcctattaatcactataaaattacaatctcatttgatgttgccttttccctggtgatcataggagtgacccttttttttcatgcttcaaaggtatatggtttttgtataaaattccatttctcagtatagaagttaaaactctcatttttgtctgaactaataaactattgttcttctccaagatttgttcactaagttgcaattgatagcacatttttacattttcttggcgcgtccatttgtgcctccacagttgcctcgtatgctaccactgacatttcttattattcattcctatttcttagagaattgtatttatctatgcaaaatcgtaactggatgtactgaggattctataagtttttaaagattaccgtgaacgcatagtgtactgtccagagaattactcagattcatttatatctttaatggattggattccatgtaaattcagttgtaatcctttaagatgattttcagttttgtatatatatatatatatatatatatatatatatatatatatatatatatatatatatatatatatatatatatatatatatatatatatcgtctgttcaaggcatataacttaaaatttagcatgtaccagaagattattatcagtagaccccaaaaaggtcacactccaattttgatttatcaagtgcatgacccttgataaatttactcatgtgtgtgatgtccgtgactgcttcccgaagcccaaccaattttgttttgaggaaaacatcaactaactatgtatcacttaagagggtaatattcagaacttgtgatcttagaaaatgaaaccgtattcttctatgccaatgcctaatggttagagaaaattcttttcaagtatacttgatagtctgatacattaaccatattcctttgtttagagaggaacattagccacattctatcctcctcatttgccagtcataacaggcgagatgctttaatgcatacattttttgccgttgcaacgcatgggcacccaactagtattgagaaaatccaaaaaatatcattgacaaacactgaaatccaaaaaatgcatcgacgaatgcaagttccatgaaataccattcgtacaagcgattttgtcccagaaataccatcaccgttagggttccatccattccacgcacgttaaaaacactgttcatcctatagaacttaacggagggttgctaacgaaaccctaacagtaatggcattttatgaaacttacattcgtcgcatttcttggattttctcttatatattttgaggatggaaccaggtgcgccgatcatatgattattctaaacattattttctttgtcatttatcttattgctatacttgtttgctttcttgtgatagatgaggtgtagacccaaattacaatagagccctgggataatggaagtagtatggaattgctagatttatgtcatcataatttttggctaattacagtcagatcggtcaccgttcaaacggtgctgagatttggtgctgtcgcacgcccgcgagaccgtttccaatgctgcatgttcgatcgatctctgatcaaatcgtgtggctgagacctgctaagggtgtgacatagctgctgctctgtctttcttcgagtattcttttctttgatcaatgcgcagagtagtgataaatcataatgttagggctatagtgtggttacatcacgtttaaactagaatcacatgttagctacacgtgacttacagtataattataagtttagttatatgtgtatgtcaccggttccaaagtgtaatattttacaataatatctaattcaaacttcaaagtgaaaagaatacgtagcctaatttacttttaatgataaactaactcctagcaatatatctgatataggtactttaggagcggagggagtacacaataaatactgctagaattacctagaaaattacatggcataggccaaagtctgtaagactgcaaagagtcagtgatgtggtaattagtaagccacgttacccaggtctttgttattcgattagttttgctatccaagtatatgcatcgtatctcctaaactcgttatcaatcggcatcaactagtaaatcccgcaccggttacctatatagagtactagagaattgttgctccgtgatttttgatgtttagtggctcccccatccgaatggagatcctctatcttcaaacatcgtgttttattattgacatatggaactaaagtttttgttagatcctcggtgacaaggtcacgtaaggatcctgatcctatctccctatcctaacgaccagccaggagaggacgagtcaaatgcagagaacatctttgtctgaacaagggcgacgctggctagatagacctcttcccgcgcgcgcgcttgcacgtctcgtcagtcatgttagcatcaagccagcgatgatgaatgatggcccagtgcatgtattttcaattaaggaaaaggaaaaaaaatagtactccctccgtttaaaaatgtttgacaccgttgactttttagcacatgtttgaccattcgtcttattttaaaaaaattgtgaaatatgtaaaactatatgtgtacatgaaagtatatttaacaatgaatcaaatgatatgaaaagaataaataattacttaaattttttgaataagacgaatgattaaacacgtactaaaaagtcaacggtgtaacatttcgaaacggagggagtatgagtaacagaaaatgatgaatggtctagttgaatcgctaggtcgttttcttctttttccctctttcgtcaggcggagcttaagagatgatggagtttgcagggagcaaggaccgggctagttgggattgctaatg

SEQ ID NO: 11994 - DNA, 2490 bp, Oryza sativa
ttgtttggttagtgactaaggttgccacgcctaaggttaggcgtttgccgctagtgtggcgaatgatttgctcgccgcgtctttgaccagaaaaccaatggcaaatcaactacgttgtggcaatttttttgtggcagccaaaaatctggacaccaaacaaacggtaggctaagcaagtgtggcatgcctaatatgaggattagctggttgaggcaaccatccaaacagcccttaagtcctctaagtgctagaattcgattcggccacatgctacattgctaacttcaaatggccgccagatttgcatacgagctccgttttcagcccatgagtacttgatggaaagatctcggagtactctttcaaacggatccagcctcatcactaaattccatctaagtcatctgcaattgatgaaacaaggtgttgcatcacctatagtgggtctatggggtaacttcgtttgggaccccggcccaagtggggcccatgtgtggtgcgccccaaccaggtggagcacgaccctagggaccatttggtcgtcctcccacctccttaaatagctatgtactccttcagggtttctcggattttgtttagattaaagtttagcttcactactttgccgtgtaatcctgtgataggttatatcgccagtttcctcattatggaaccccaacttatcatttgtatgtaattcctatttgcaatttagattgcttttatgttgttcttgcttgtttcttcgatttgtttgtaggaataagattgatctacaccagcaagatcaacaacccacagagaggtgtatcgatctctaaggcgcaacacaacaacgtctcgtacagttgtagttgggtcgcaacgtttctcccaaatgcattaaagatcgtcccactgaccagcactaaccccgataaattcgtcaagatcggggcgacgttgggcagcaaataggaactcgagctcatcaccttcctccgcgacaatgcagacgtgttttcttggcagtcgtcagacatgccgaaagttcccagggaggtgattgagtacaaactcatggtgcgacctgatgccaagccagttaaacaaaaactgcggagatttaaacctaatcgaaaacaagccatacgagaagagctccacaagctcctcaaagctggcttcatcagagaggttctccatctagagtggctggtgttggtattacttaacgtcatagatagaatgcgcaagtggcatggaagataccgatgtagcacttcacccgggagtattccaaggtatcgatttccacagtgaacgtgtttgctcagttcttctccatgttcatcgaaggacacaaagcaaagataggcaaagggcagagaagatttcctagtgagaaaaggtgtctacagaaagctcagtttaatcctaacgcgatacttcgggcactggcagcctgctgctcccagatatggctctactgcatacccggatagagaggacttcagtgtgattgaggactgtcaccgcctctacacccacctgaaacctactgtgggttacaaagcaatcatcggaaaattaactacctagacaccgcgtctacacaattaataactactctattgccggccaaacactaaagtaatcactataaattaatggacgatagtgaacaatgattcagcatgctaattatgaactaaccaagaataattctcactaagcaaatcttaattacttagaataatatttctattgaagcagagtaattaacaaagtataagaataaggagaggattaccgacaactccggaattcctccgacttcttctagtttactctctccctaattataagtatactatagaacatataaagaacctaaagtatacttagagcctcttgtaattcagctctacatcttggtgtgtgttgaaatgaaggaggtgagggggtatttataggtcgaggtgccttgggagtgtggagatcctccatggactcctaagggcgtattcatcctctccttgccatgtgtccatttgaatgatggttggagcgccggaaacagccacaaccgtcatcaggaaagaagttgctatcgaactcaacttgggcctaggccaacggcctctgtcaaggttcggtcgaacttagggttctgccaaacactgaccagctccgttggccccggttttcggtctagacactaattttgggccctttattctattggtatggatgtttggctcatttggaagtgtttaatttggtttttgggtccaaaactttataagttagggtacggtttgattctcctcctccttcatgtatatttcttctcagcttaggtagtttgtcacctacatacgaatatactccaacactcgtgaaaattgttagaaataaactctaccactatgttggatgttttatatttatggtcttacgcaggtattaacggcgttaatttggcacttaacagccgtcaatagctgg

SEQ ID NO: 11995 - DNA, 2603 bp, Oryza sativa
tgttttcttctacactagaatgcctttcgggttgattagcgtaggcaacacgtatcagcgcgagatccaaggagctctcggtgaccaaatcggatggaacgtcgagacatacatcgacgatgttgtcgtcaagacaaagacgggcgacacactgattaatgacctcagggaaacattcaacaatctccgacgacatcggctcaagctgaatcccgagaagtgcgtgtttggagtaccatcggggaagctacttggttttctcgtctccggacaaggcatcgaagcgaaccccgagaagatcaaggccaccgagaatatgaagtcatccacaagactcaaggaaatccagagactaaccggatgcatggcagcactaagccgcttcgtagccaggatgggagaataaggacaacctttctttgatttactcaaaaagcaagacaaattcgagtagactcaggaggtcgagaacatgttcgtcgcgctcaaatgctacttgtcaaatccctatactcattgccccacaacatgatgaagagcttttcatatatataactgccactccttattctatgagtacggttatcgtcgtcgagagggaaacaatacaacacctggtgtatgttcacggtcgttatcgatcagtttcgaccgtcaatattaccaaaatagaggagaactagtgatgcttgcaatgcatatatctgttagaataataatattccactagtattaggtttactaaccttttgcagagaatgaccataaagtggaggagaatcgacatcaacacggacgataaatcaatcggacgatgtcgagaatcagacttatgtatgaatgggccaagaacacagaattgacatgacaaaccgggccaaaattcacaagtctacataaaggagcaatagaggagactgccagccgaaaggtgggctggttgggccagcccctggttcagccgaaccaggaggttcggccgaacctccctcgcctccgttggatccaggttttggctggatggttgagatgaagccctaacgacggttggagggtattaccgaccaatccaaccgtcacaaccgtcatagtttagctataaaaggagctcctcttctcacttcacacacacacctcaagcaagagctctctcatttctctcaagtttagtttagtagtatctagctggtggaataggaatagagtagaaatcaggagtccggaatccttcggaagagttcgggtatggctctagtagtttttctcttctcttttgtaagctttgtacttttattagaatactcttctatatacatttatggattgaaatactttccgagtatatgagtacctgctttacattatgttcatgttatactgaatatgttgctagcttatctagtagatgctttggtgcgagtataatgtttgcttatgcaattactctatgtcatgacgatgatattagagtagtatctggtagtttaggtgtggtgtctagattacgggatatcattatttggggttatatgctgcggatgagaggtgggccgctgatggtgacagcttagtacgggtattcctccgcgcctgtatataatcctaagttaattccctagggagggtattcctccgtatttagcccggttgtatggtcatgacggactgtcgtaaggagctcggcagtctggggtgtcttctcgaagtaccaggagggcatcggatagagggtattagctagtatatcagttaactagaatgtatgtatactatgtatattagaagtataggaatagattatctttctcttttctttccatttagcttagataatatattatgagaatgagtagctcatgcttgtgtgtcactctacccttggattatcttacccctgcttaaaatataattatcacaagtaatatataaactattagtcaagttctctctacatgatcttcccacgggataaaataaatacgatactcttggaatactctcgggtgaaatgctacaatggtacatccgtgcgcttgcggattaactctgtaaccataatatactagaagtatttctgcgctattgctaggaattatatttctagtaatggcgcttccttggctatcccattggtccctgcagggttaggatatggcggatcacgagtggacttacctcccctcgtcgtgatcaccttaacatttttaacggaggagtcgggttgccctggaatcctccccgattcatttgcaaggactaatgaagccaattgagctagccgggtttctatcattttgttgaagctcagctagttttggaaagcagaagcaaagccatctaacttaacatttatgttctgtaggatcttgtcattggtagttagctttttgcttaatgcatcagtagttttagcttgcacaaaaacgagatccttcaagtagggttggttagaaaagttaccattattattacctccttgatagtacgggcgtggctggttccacccctaacctccttgtggacggtacccgttattgttgttgcccatatacatcgcctcctcacgggtttccgggcagtcattccaagaatgacccgtgttg

SEQ ID NO: 11996 - DNA, 640 bp, Oryza sativa
agaaacatgtggcttttgaacctggtgatttggtttggttgcatttgagaaaggataggttccctaatttgagaaaatctaagttgctacctagagctgatggtcctttcaaagtgctacaaaagattatgacaatgcatacaagcttgagctacctgccgattttggggttagccccacgtttaacattgcagatttaaagccatatttgggagaagaagatgagttagagtcgaggatgactcaaatgcaagaaggggaggatgatgaggacatcccttccaacgatacaaccacgcctattgcacagcaaggaccaatgactagagctcgagctcgtgaacttaattatcaggaatatgggagaggaaccaaatcgcaagcagcactagcagcgctgatttgatgaagtcaatgctcttcactccggagggcaaacggggcaaatgagtacttgttggaaagatctcgtcgtctactttcagctatgtgtggcctcaccatcaactttgacccaggctgctcagaatgacgaaaatagttctttacatcagaaacttgggcttgggccttgtatcattacagccatcattacagcccattaggggtccacaaaacctagggtttgctcccacctcct

SEQ ID NO: 11997 - DNA, 529 bp, Oryza sativa
gcattaatttcagctagttcagcttccagttctccaagctttatctgttattcaaaagtgttaaaataatactagatttatattctgcatgcaatcaggaaaaatccattcgattgacacacctccaaatcatcaaagtccaacgaaatttcagttaattgtgcagaagttgatatgccagctttggacatttgttctttgaaaaatcttaatttgcgagccatttcaccacacctttttatctgcacaacgagtagatcccagcatgaaaacagggaaaattaacataaggcagtaaggtaatgaaaactatgaacatgagatatactatatagatagaaatccatatagcaccctaaactttaaaaagtccaaataccatcctaaactttagatagaaatatgaacagttttacaaagttcagggggttagatgtccggttttaaagtttagtgtactagatggactttcattcaaagtttagggggggatatttggactttttcctcatttataccaatgtcacat

SEQ ID NO: 11998 - DNA, 693 bp, Oryza sativa
accccaggatcactttccacttcctcgaatagaccaattggtggattcaacagccggttgcgagttattgagcttcctcgacgcttactctagctatcaccaaatcagcatggcaaaagaggacgaagagaagacagcattcatcatgccgttcggggtattttgctatgttaagatgccgttcggactgataacagctggggatactttccagcgcacggtccagggtgcacttagcaaccagcttggcaacaatgtcgaggcttatgtcgacgacatcgttgtcaaaaccaagacaggcgactcattgattgacgatctgcgggaaacgttcgacaacctccgacgatatcgcctcatgctcaatcctgagaagtgcacgttcggagtaccatcgggcaagctgctcggattccttgtctctggcagaggaatagaagcaaaccccgagaagatcaaggcaatcgagaatatgaagtcgcctacaagactcaaggaggtacaaaagctaaccagatgcatggcagcactaagcagattcatcgctaggatggcttaccacagtacatcttttaaattgctaactgtatgtttcgtgaaaaacttcttatatgctccttccgttttatattatttgtcggtctagcaaatctcactcaaaccaaggagaaatggcagattacatgggtaccc

SEQ ID NO: 11999 - DNA, 6965 bp, Oryza sativa
cggtggttgcattggtggaggtgacggcatcggcgccagaggtggtggcatcggcggcatgggtcctggggacggtggctgtgttggcggcggtggcgacggcatcggcgctggtggtggtggcatcggcggcatgggtcctggggacggtggttgcattggtggaggtgacggcatcggcggcatgggtcctggggacggcggttgtgttggcggcggtggcgacggcatcggcgccgggggtggtggcatcggcggcataggtcctggggacggtggttgcattggtggaggtgacggcatcggcgccggtggtggtggcatcggcggcatcggtcccggggatggtggttgagttgggggaggtggtgacggcatcggcgccatcggtccgggagacggtggttgtgtgggcggtggtgttggtggcattgttggcgccacaatgggtggctgtgttgtccgctgagcatgggcgaacggcgagatcgggaggacgatggcaacgaggacgaacgcggcggacgccatggaggccaccatcgttagctactacgcaccagcgctgatcagctagcttgtgtgctttccaaacatatcacctgcatgaacaatttataggcagcatctgcctagctatagtacggagcacgcgatgcacctgccgtgtttaattcattaattgtctcgtctgcatgcagcgtatgcacagagtcaaaaggcagctcttttgatctctcgtgtactaggcgtactcgctttgtacctcgtatccagctacgtatatattcaaccgacggagtgtgggctcgtggacattcggaattccggggatgattggatttactcattccatttgatattatagaagtcgctttaactttttataaaaaaaacatttttaactttaattaagtttatagtaaactataacgatacttataacatcaaattaattttattaattaacatttattatattttgatagtagtatatttgttttgtgttaaatgattgctatatttttctataaagttaatcaaacttatcgaaatttaagttttaaaaatatcataacgtcttatgagtcagagggagtactccgttagcttcaagagcactgcagctaagtacaaatgtacaatcatgtattgctcatttgctgcttttgctagtctgctcgtgagccaaaagtctggcgttatactgcatagcttggtgaatggtgggtctgggggcctgggttttggcgttattctgcatagcatgacaaagaacatgcacagatcagatgtaacttcgtctaactcagcaagtacgtacgtctatataagctgcaaaatctctcgagtcctagcttataggagcaagaaaaatacaagagcatggcacgtgcctgcgtggtactgttgccgcccttattatccaagtcaacgacgatgagtcgttgatgacagctgaacacatgctcattttatcccaaaatagacaaatctaatttagactatgatacattttaatattacaaatctgaataaatcctatctaaattctgtaatgctcgttctttgtggctttagcgggaaaatttaatttttaaaaaccctatcgtgaaagttgttctttgattgaagagtagctgtgttgccaagatctccctccaaatctctgatcaaaccaaaattccagcgaaaaattcaaattcaaataaaaaaaatcccaaaactctctcaacaaattcatggaaaatttcaaatcatttctcatttcattgaggaagaagctcaaaatcttgatcaaggaaagtcacattcgatcatattgagcccataatttgaaattaagcactttaattttccaaattgtgcatctctaggttacacatggaaggctcggccgcggtttgcaatatagccgccaagccctcctaacttgctgcacaaacttcctttgctaattgagttatccaaaacaccccttgtcgtctaccttgttgggtttcagtatttgtactcttgagtatcaaaaccaaaggcctttctcaaattcaaaatgatcaacattgggtaaaaattgggttttgttgaatccttagaaaaacccaacacaagggttggtgcattaaaaagacgtactggtggtgtagtcttaccattctcgtatctaaggactgattttgttcaaaatttcaccaagcataacatagtgtgaccgcatgggtgaagtgggacaccccctaactgagtaactagctagggcagggaagccttgatgccgatggacaagtagattcaccgggatggtgtcgggaaggacccctaagcttcctggtgcaacatggtctgagacctaacatgttcttggtccatgagacccctccagttggcataaggtgaccccatgtctgctttggaaataccttgtcacgaaagcttcaaagtccttttgtctctttggccaggagccattgttgttgatccaacaatgatacactacactcctccgactgagtgagactcactctcactctggtcgtcgagaagcactcactagacgaattcaaaacttgaaaataaacaacctttcctctaaagctagcattaaacacttaatacccctaccttggtctgtataatatatagtacccacccttgctctctatataaatatctactcccaactctcgaagaggaggagatggaacccgaagatgagttcttctaggagcaaacgacttcagtcaatcctagagtttcggccaagtttccaagtcacacctgtggtgttggtcttgtttcacttccgttatctttggcactgactcattgtgaactcagggtatgtttgtagttgcaacatagatgtaaaaatattgatattagtgaaactctattgctgtgatactcatcttcctgttgtaccagcgctgcttcctatgactggtacaggttcataggttaatgaatcgtcctaagatgaccttctatatggctagtccggggcgtgacagattcgtagtgtttattttaggacggtacgtggctgatagtctgaagcagaggaaagaatattccttatgtgtgtgttgtgcctccttgtaactacaaggtaaagaaaaaaaattgagatgggaaattaaataggaaggaattaatatatatgcaccagatttaggagcgtgtgatggattttctagcaaatgatggagcaagaacgttcattgaaagaaaaccagaaagggaaaatatgaaaaatactattttaaagatatgttgcaagatatcataagaatgacgcatgggaccaagacccatatgtcaatcacataaacaatgttatttttcaactctataatactttttatgagaaaacccatgccataatgttatgggcaaagaaagagatacaagtggccctgtttggatcaggagattctaacaaccgtagctttttctaaaatctttaccttagcttcccccaaacagttcatatcgtcactttgattctcgtaatctgtagcaatagaatcctgaaaaatgaacttgaagttagaagttgagaaacacatctttttaatatatttttagaagctagctaccaaccaactatttctcacagttccctaaaatggagcctgttatattgtgcagagatcaggacgtgcaaattgattggccacaactgcgcggtgaagatatgtaaaatgcaaatacaatccacagaataaactttcttgtaatgcaaaataactcatatgcacaatcacattgtgtattcactggtcttctcaagattttgttatgttgaagtttctcgtgctaattagagagaaggccacggagaaagaaattctctctctgggcatgagagagagagagagtataagtggattcaaattaggaaatttaagaggtccaatttcgagatcaaatgcctgagatatgatcaattttcaagtttgaatgttgctaaagcataaaactgccaaattatccaactattcttctgtaaaaaaattatttgtggtgcctgtcactcgagttgcgtatatatcacttcaattttgcaaggtatctagcaggtgaagcccatggactctttgacacatggtctcatagattggtcgacgcccactccacaaggattgaatggttagattacgccggttactgagtgcgagcctcacataccatccaccatggaggccaacatgtggaacacagtggtcagcccagccaaagcaagtccaatgcaacaccctcgtcaaatggttttcgatgaccatccactcggccgcgtgccaagctgagggaagaaagcgaggagagtgtaggatcaaaacacaagaactaagccaaccagaggggagtgaatggttggtatacccaaaaatccaaactttttgcggaattaaaagttaccttcaaatttgacggatcgcggtctgaccgaaggtgttgcgccggtctgaccgcttggaagccgtcggtctaactagagtagatcgtccggtctaaccgcccgaagaagctgcagtcgcttgaacctgccgccggtctgactgccgtgtacccaccggtctgaccgctgcgatgccgccgatctgaccgttggtgtctcgctgattagaccgctgaacccgagaaaacacaaattgaagaactctagatgtagatgataactttattacttctctctgtgtttacaaagtgcaacaacagcactcctcacgaaaatcttgacaaaactcgaaaccctagctaaacttacaactcaatcgctttaaaaaacgatacaggcttcacgctccctctctattatatatgaggtaggtagcctaaagccacgaacccaactcatactagaagtcctaatccaactagtaaatcttcccgtacaagaaacaaactttacaaactccaatcataccaaatttggactcctaccaaattcgactccgcatccaatacgcacacaatacctccatcgtatgccatatggatcatcaccaaccacgtacattgaactctagcctaagtatctcgcatgatatctgaccgtcacggacgtcgccttatccccaagtcgactcccgatccatcaccggcaatactctaccgaggcatcaagtcacctacacatgaatcaaacaaagaaaccatattccgagaccaagctatcttcaacttgactcattgttagcaaacaacagtattacatacgcatagtatccatctagaagccaacataaaacaatcacgaatatccaaacaaacaacccgaaaccaaaaccgacacagagttggccagcccgacgcgagctggccggtctgaccgcgcgatacacgccggtctgaccggcaaccacttcccggtctgaccggacccaaatcacagcagtacctgtaaatcacctgtaaaatccaatcatctccaaaaccacttcgccgataatctctaaatatcaaaaccaataatctcatatgccaattgttcatcacagaataagaataaaaaacactttgattttacagggagctcacccgtgggcacggtgagaataatggaaagtcgatggcagcggaacagagcttgaagtggtgacgcacttcgggtaggtgtggatgatgtctttccttagatcttcgggtggcgttgatgtcctacgtatcgaagacgagggcacgaaaaagatgccgacggaggtggctcctacaagtaatcagaattctattggcaaccaaccgattttgttggtgctatgagatccttcgatgcctcgaacgatggcaaacgacggccggagccccttggatatggagagagacagaaaggagagctttgaaggcaccaataaaattttactcaatctgacaaatcaaggccaaattgaatgtgaatttagagagggaatgaagcacatggttggggtcatgactatgctttcgagttgtggattggagtggaatcacgagtagtggcgacgtggggagaaagacgactactatgctgtgggatgcaccacttattagcatcgcgggtgagcgacctggtcggaccgactgttgtatgtacttatagatgtggaggaagaaggtcggactcgttggccgatgtggggaggaaggccaaggtgacacgggagtgggctgacgcgcggaggcatcccatgtcgggagtaaggagaaagagaggggggggggggggtttcttggttttcttgggtttttcctttcggtttttgtctggttcttcttatgttttttgggtttttaatatatgaaaactttgtatacatgttgtttttgttttttatttttaaatatgtatgtatataaagtttgtatacgtgaatatatatttttatacattaaaagtgtatacatatatatatatatatacatacatatatatatatacatacatatatatatatatacacacatatatacatatatatatattatattatattatatgcatatgtatacactatatacatacatagcaactatatatatatatatatgtacaaagtttatccgtatattcatacgtatatacgcgtacagaggagagatgaaatgggccgcagcccacctcgggcctgcagctttgcaggcaaggaaggcagagtgggagagagagaagaagaagggggaggggcgagggtaagcccggccggctacgcgtgaagagatggaaagggaagccttttttgaaaacctggaaagggaagctttcggccggatttggcttaaaggttgttctctgtttaagaatttcatcagaccaagtgtttttccgtacacaaacacggaaaattgtccatgtggactggagagatgacacgatcacaaaatcaaagtcacgagatttaacatcaacttttattcaacgatatattgtaagacggacaactagctagtcgatcaatcaccaagctagcacacagaagcatgca

SEQ ID NO: 12000 - DNA, 7827 bp, Oryza sativa
atatgctcacacctcatgccgatgctcagtacaaaggcctatgaccttggtggttgtgtaaaatggacttataaattattcctgtttctatagtttatagagaaagtagctgcagacaccaagtctacatgtgatggcagtactgcagtaatagtaaaggcgtcttgcataaaaaaaaaacatatagctaacaaactagcaagacaacatggatagaattgctttagaagagcaccggaaaacttgagcattagcgactgcacagaaatggtgaattcggtaattccagtggttaaaagcaaatgagtttgttcagtgaacagctttgaagaagagaagcatgttagtacctgagaaggttgttgacttgacctctgagatggtgattgcgaagcaacatacttcaaaacgtcaaagaatgtattctgtcctacagtagcagccttttgaaaataaaggacaactacatcggtggctcgagctctcaactcaagcaaattacggtcaatttcattctcatgctgtgaaatatatggcctaaagaaagtcccataaatgtaggtagttccctacaatgaaggcaaatgtcaatccaatgtacagaaaaaacatctaaaaatagaagctataggtgacaaatcgagtacctttgtcttagggtaccacaagtatataaagaacatcagctttgcttccgagtaaaatggtagccttcaacacgatcatatgcatggtgcaactaatgttagagactgttaaaaagagatgaaaaatgcaaacgttggcagtcttaccatgatattgtaaaatctccaaatctctccataaccgtcatcagagctactagaatcctagacacaggcacagcaaataaaagctaaatgtctcgcaaatactaatgaaggataatgtcatgatcaaagatgaaagaatcatcttaccaatactgacaccaaaatatgagctgctcaatctctggtttattcagttcgacagtcttgtagcactcatatgctggataggcgtagccaaaggccaacctacatgcaataggcataagccagatcataaatgacatatccatgctctatttgttatccagaccataaacaaaatgtatgtacattctttccgagtaaaatgatttagaggaaaacgattgctctttttttttcttgttttttttttgttgcgctccaaactaatccatagaagagcagttgaccatttcgagggtgcgttgaattgagcatctgagcatcattgaagaggctaaattttcaacgcacttgcattaaagaggagaactcacaatacgcatcttgatctacgagacatgatcaggcttacattatagaacaactgcagatgaagcatgccaaaagaacaaagcttctgaatttcgggtttatttgttcaaatcggagcctaaaaactgagcttcagctaatagtacagaacgtcagaatcattatccattcttagattccgatagacaagatcatgcgacaggaatcttgaaaaaaagaatcaatctgttaagaataaacgaaagcctttgaccgttgtgcaatgcattgaaaatttggtcccatcctcctcgtgaacaataaacatcatatatttttcgaatgcgtagcgggctctcacctcccgatttcaagccgaagaatcaggtgaacaaatcgacacgaagaaacgcatctcgcgatttgttgttttcaaacaaaatagcatatactattaggggggggggggggtgaaagaacagagagacaaaatagtaaaggagactctgccctccgaatggacacacatgcatcctcatctcaagaaactgaaaccaaaaccggagacccaatgcctttgacaacttccatacccaaaatatcaacttcgcaagagcacatttcaagattcagggggaaggggagggaaatgcttacaggaggacccgggagaggaatccgcccatcatcttctccgacgtcctgcgcacatccagatccaacagaaccgacacgaatcagaacacaccatcagcagcaacgaatttccaagagaggacgcaaaagaatctgcaaaagaaacctcttttggagatggatccggcgaggagcggcgaaacggagagggcggagagagatggtcaggagctcgccaccctcccctgttccctctccctctacgctatccctccctcctctatcgcggcttaactaaatataccggcaatgcggtggtggttttgccgagatgaggaggaggagaagagagagagagccggagaagaggcgagcacgtccgccgtcagctcgagctccaaccaaccggaccccttcctgtttctttttgtatcaccgggttataaggccagtcacaatggctagtgtcattgcacggctacccaaaatattataccatcttctctcaaatgaaatcttttatgaaacaatccccacagtggaggggtttcactttgacgtttccaagactaagcaaagcatttaattgatacaagttgctgggatcatttgtacccaaaatccggcgcggcgcgggagaatgcggaggtcgcacggcggaggcggacgcaagagatccggtgaatgaaacgaatcggcctcaacgggggtttcactctgttaccgaggacttggaaacgacgctgacgagtttcaccaggatgaaactctttccttctctctcatccccatttcatgcaaataatcattttttattcagtcttacccctattaaatgtgcatgacacaccagtgaaacccccattgtgactggcctaataagtggatgtacctggaacatatctttaaccaattataaatgcgccatgtctacctctctctctctctatctctttctctcgtgttgggaaaaataatgtttcaacgcccactaattttttttaactcgaatgcgatgcgacacattctttcatcgcacgaacctttcctcctgatgcaaccgttgaatcatcatctggtttaggtttttcttccccttcagtgtggttatgttgcaatgattgccggtgaatcatcatctttaattaggttcaccgtgatgagggaggcttcactccgccgtacaatcatggcgttgatctcgtcagtagctttttcccttcatgaccaactgcatcctgaccccgcgtgatgaaaggccaaagtggcaaagtggttaagccggtagagagcagagcaaaccagaggcagctttgaacacacggctcgcctcagcctcccgcacacagcactgctattcttgtgcggatcgatcggcagcagcatgggttggatcatggtgatggatggtagccgtgggatgggagcggtagccggtggtaggtcatgagtgacaaagctagtaggacacgcaccgcgaatctggccggatctgagcaaaaacctcgctctcgcgccgtgcgcgagaaacgtcacgaactcacgcgtgcctccaagccgtgcgtggcccgggcggctccccctgcgcggcgcggccgcacatgcgcgccgcctgctcgctctcgagctgatgagcgaatgctcgcgtagagacgggacgagaggacgagagaggaggggtttgttttgtcggttgggaggcgcacgcacgtgagcctgcacgtttcgggcttttggatggcatcccatgattgccgtgcatgggcgggcgacgagacgaggaggggggctaaatctgggtttatactgagattatatacctacctgcctagctacctgcctttttgcctcggtgtagtatgtggtattcccgacaaatacattacctttgctggcttgatgcctctaaaattaggacatgtggatccgatcgatcagcgtcgcatctaggtgcgtgtttgttgcagtggggagctccttttctatactttgggaaatcaacatgtatgtgctttagttaactttataaatctcgaaatcgcataaacaattcgcgttttacagataagcacgggagaatctgcgaatgatcggatcaactcgtttatttgagtggaaaggatcttgcaacttgcaaccgccaacatcatcaactccttttgttagcgaccaagggggtgattatgcccatggattgctgaaatacgtgcgtcatgtcagatgcatgtctctgttgcccggagcgtagctgtcagcttatctggttatacttatacggcagtatggcgcccatgttctctccctagtacagttttgtcctacgttatgtcctgtgtgtctggctgtatcgcttgtaacaattgatgccatgaagttacatgaactctgtacagtacactctaatgtaccgtaatttatcttgccattagctgatgagttgaggacggctgatgtagatctgttctttcccgttgttcctctgccttggcactcatcgttcatttttctctattgatagatgggcctttggaatcataattggtaggtgaggggataggcagtttagtgatcggtcactaatgtcatggatgcattgacactgatacgtttcagcagtgttcagttggttggtttgttcttatgtcacggcaacctaaccctacttattgtctttattattttattatcataattgcctccattcccggtccccaccatgcagataggtagtggccactggccacatcatgtacgtataaggccctgtttagtccataaaataaaaatttttacactatcacatcgaatgtttgaacacatgtatagagtattaaatataggaaaaaaaaccaattacacaaatggcgtgtaaattgcgagacgaatcttttgagcctaattgtgccatgatttgataatgtattgctatagtaaacatttgttaatgacatattaattaggcttaataaattcgtcttgtagttttctggcggaatctgtaatctgttttgttattagactacgtttaatactttaaatatgtgaccgtatatccgatgtgacaatcaaatccaaaaattttccccacctaaataagacctaagcttcacgaacaaaactgcgcaagtaatttctctaacaggtgtggacaccaacatactctgcactagtagtggttattaaaatttgaccaattacagatcaaagtgcaaatatataatttcaggcagttggcaaccataggtcttgtgtatactgtctagtccaatctttgctcactttatcagtgtgagatcatctgtgatgtagtctgtatcatcaattaaccagcggaagtttgttatttaggctcatctaactgccccttgacggtattgttatactagtattattttggcatatgaatccaggatcatcaattttatccactaaattaaagatagcctaacacacctataacagtgtggaatagtttcctgagtggtgggcataatcattttcctgatctcactccaaaccaactcaaatggtccacatttgcagaacttaggccacctgattttgaaacaactgaaatataagatgaatttgaaagtttggagcagctgcagccttcagcacactctgtattcgtgtgcagtaaaaaaaaaatccatttgctcacaatcataaaaataatattaaatccgatcgtcgcaaaggaaccaacaccaaacagaccaaaagaagacagattgtgcccgaaggaaatcacaaacttcctttcgtgaaacaaagctgctgcattagatccccttttgatttttctagattagatccatctcacactcatacaccgctttactacctctatatcatggacgcaatcacctttgctagataggccctcacccacctgcctttgctgctagcttcagaaacggataacgatacgtactttagccataaaaagatgatttcatctaagcatcgagctgaagtactagttatacaactctaacggatagtgagttcgttcagtcggagacagagtgcagtccagcagagttcagagtttcagatggcttgtgcgacacaagttgtgtctgcttcagatggaattggaatagtgactgcacgttaacgactgcacacaatttcgaccgtccatttttacgatcaacggtccaaatgtaaagctacagtaaccgatgtgaacagcattttgtgctgtagtattactgtattactactacagtactgtgaacagtacgctgctcgctcaggccgtccgatttgtatccgatgatgcataccgctactgcttaagttgcagtcgctccaaatcccttgagatgggcctctaggaggtgaggcccaagttggaagacgcccacatccaaaattagagcggggataaacgcagaaatgctattaggcgcagttttgttgatttcgtcgcagaataagcatgctaatgtacggttagaaaacaaggcagattaacgacgcatgcacatatatataatctatataaactttatttatttcgttttatttgcacaatacatctgtgtttcactagtagagaaaccatctttggtcggtcgacccaaatccacaatagtcccggttccattaaaaaccggaactaaaaatgatttttagtcctttttaataagaggaagatctttaatcccggttgtcgttaaaaatgattttaactccaacagagactaaagttcatttttagtcccggttgattccatgtcaggccgtgtcagggccctatgatctttagtcccggttagtaacaccaaccgggactaaaaacctatttttagttccggttggtgttactaaccgggaataaaaatcaaaacacactatataatccatagtaccgatcctcttttcccgtccacacaacaaactcctccctctatctctttttttcctctctaacttcttatctctttccttatctctaactcccctcctctctttccttttttccttcaccacagtgcaggcggccggcgcggcggcggcgcggcggtgccgggggctgcgcggaggcggtagctgcggtgggcggccgctcggcggcgaccggcacggcgctggccggccagcgcggaggggaggaggggaggcggcagtggtcgccggccggattttttttctttttttagatgtgaatctatgatgtatttttgtgtgagatgtgaatctgtgatgaattttttagaaccctgtgatataatttttttaagagtttgtgatgtatttggagatgatttgtttgaggattttgagatgttctgtaatatgtgatgatttggatatgggaggggatggtgtgaaatcaatattcaatattaaaagcagaaaaaaaagaaaaaatatctttagtcccggttggtgttatcaacccgccccaaccgggactaaagatgctcccaaccgggactaaagattgatttttagtcccagttaagatagcgatctttagtcccggattcctagtcccggttgaaaaaccgggactacaggagggttaccaacccggactcccccaactttctccgccagtgtttcttcgtagcagtaaaactgaagctccttgtaaagcatgcaggccaagccattcgattttagtagcttccaaacaagatcggccgatctatatacttatactaagctggattggggcacatctgatcagtgacagaataggttgagttcggacggtcttgccgcagaggcccagaatcaccctgatcgaggaggaaggacgccatagggcctttgagagccggcacaggcagtcagtggcgcccctgctggatagatcctccagcggtgggcaacactgttgcctagcctggcttggatttagtaccagatcgaataacgagag

SEQ ID NO: 12001 - DNA, 3532 bp, Oryza sativa
ttgacatgacttggaaatatctccctaggaaacaataggatttgctgcaataaggttttgtgaatagctgcaaatctttcctgttctgttaaataaatagtaataagtaggcaaacctcagccagtccagcattctttgttgatcaatcgggtgattaacgccagccacagccaagcagacagcacatacatttgatcgtctccggcgtgccttgagaagagcttgagccatcactctttccagtgtctcccttgccttatcttctgaacatatcaaagcaaaaaaaaggacaagttctgatttttggcctagttttcaacacatttctactacttatctacagatcatcaccatgtgcataactatgattctatgaaaaccatgtaatactgaaattttgaataattttgtggccacagaaacttgtacaggagtcctggcatgcagatgagatgatacctccaacagagttgtggttggagcagccggcgacggcgcgggagaggacggggagagggtcggcgaagggcatggccgccgggatgcagacgcagacggtgttgccggcgccgccgtcgacgccgaggatgacgctccccatgcgcgggctctggctcttctccatgtcccatatctcaccacccgtcttcgtgtacctctgcatctctgcggacaccaacagcagctagtgctaaacaaacaaactgacacagtgacaatggagaaggatttctcttgctgtcacctacaagtctgcaactaggtgagtgcaaccttatggttatatatatgtacgcgttaggtgcaccaacacattgcatcattgtgtgtgtgcgcttcgtcgaggagaaagggacagggaagaagaagatgatataggaaatattaatgctgcaattgaagggcggctgtccacacgctcgtccaatggcgagacggccgggttaatttacatgtctacgccggacgtcacaggcttctaatctcgatttgtggttgtcgttttgctacaggatgttactgatcggcgtttctccggctgatgttaccgacggcagtgggttagcatactctcaattatggtatcaaatcctgaatcttgagagcacttttgggtatatttgcatttacaactgcattcttgtgcttgggtaaaaactgacatcaatttttacatgttaaactggcaagttcgagtttatatctaagtgttgttaattttcatctgaaacaatacatgatctttgactttctttttctgaaacttgcaacaggtgacaaattcaatgctggttggttttgccttttgtatgtccgaagagttgcatgatttgcatcagtgacatgtcgaaactgtgctgcagtctagcatgcatatgctccagctctactcacaaaaaaactcaaaccatttgtgctccaaatggcatagtattttgctgtcagaaacggcatgcagattagttcagcacttcaacgctagtttacttttcttacgccacattgtccaacacccactgccatcggtgacggacaaaattcctcttcccagaagacctgccttccattattatcaagactcaagaggacttaatccgtattatatgcagctgcaagaatacatataatctctggtcgttgttaccattgtttttggattgatctcaaccccttgatggcctcttctcctgccaaatggctgatttccatggcaccacagctacagcctataagagtacaagacattcaggaggagacaagtgagctgatgacattggataactttctagcttgcgtccaaacaaaagcagagaaaactagcgtatcttgagcaatctgtcaaggagttaaattaacctcaaactgatgttgctagcagcagatatgtactatccagatggggttgcacttttgtactgcatagagtatgatcagataatgtgtagcctcatgatccaaatggctccatcggatcacaaaatgcctatatcggtctgtttggtctcactctcatctttaggactggagcacaatctttcaaccatcttgcaggattggaacacagtcttccaaccatcttgcaagatcatgattcaattgtggaacaaaaaaaaaacatatatattcctttgggtgaagagcttatttttctttcttggcccaagacgctctctctgctttgcctggttgggccacggcctacagataggcatacaaactttgaattgggcccagcatggcccaccccaccaaggcaccaagagtccaagacgatttgtactaaaggattgaactttttcttgttgaggaaaaaagagtgccactgccagctgaattttgatgagtcaaacccaaacgttccaacctgacaaagcaataggcaaaagcaagcttcgctagtagctactccggagtagtagcaaaagaatacgctatatatgcttgcaatttgttctgaacaattaatcgaataagatgcagcattttctctttttttccatcttttttttgaacgacgacagattgttaatagttgcatcgatctgtaagctttaataatcccctatcttttctttctttccttcaaaaagcaccttttaattcctttcgctcgcctatctttcgccctgtcaacccagctcaaggaagggatgcaccagcctgcctttccttgctgcgagtcgcagtcgcacgctggtcaaaatcgcgacaccctggcgcgccgtggcgcgcccgtgcacgcacaaacacgcgcggcgcgtacgccacgcgtcgcgtccgccgcatccgtcgccacatgcaggtgcaaaccagcttgcttgccttctttcctgcagaatgattccttgtcctcctttgtgtcggtgatgctaataaaaaatttcaatttactactagtagaagtactatactactaccgttttatagaatataaaactgcaatttaatactgttctaaaatataaaaagaattagtgttcagtatagttattaataaaataggtagaattaaatgagagaagattctgattggttgataaatagataggtgaaaaactgaatgattgagagtggtgattgatttagaaaagaatgttggtagataaattgttataatttatattttaagataactttagtgtaagaagttgttatatttaaaaactaagggagtactacattttaccttgtctgttggcttggcagtattaacaatgcggtgaaataaacatataggactattatattactagttttcttttttttaatacgcaaggagattatattactagtactattcataaatttgttgataaaaacagcgaccaaaatctgaagcaacaagagacagataatgagataaacaagtgctgcttcagacaaaatccgtaattactactactcctgctgctgctctatacttgatggcttggttggtaactcgagggaaggggattgagagtttacatgaggtaattgataatgagattaagatgggaatttgatttttaatcccaatatcttatttgg

SEQ ID NO: 12002 - DNA, 2506 bp, Oryza sativa
gttaaaacatcaggaagatgtatcgcggtattctttggtcttaggactcttgaccttaagtctcaaacaaacttgtctaatactacctccattttttaatatatgacgccattgactttttaacaaacgtttgaccatttatcttattcaatttttttgtgcaaatataaaaaaatgtcatgcttaaagaacatttgatgataaatcaagacacaataaaataaatgataattacataatttttttgaataagacaaatggtcaaacgtatatcaaaaagtcaattatgtcatatattaaaaaacggagggagtattcagtaatatttatgtttttactacaaaattactgtttatgacaggcattaacaagtgcttactattaatctacccttgatatttttacagataatttagcaatatttagttgacaaaggctttaggatttctagtaggataattgatgccatggtggaggagcaacatgtttcaagcatctgaaatctctccatgagcaaatcgaccaagcgaatatgcagtcattatgaaatcaaggggattcgtcagactcaattttggacctctaggtgaaaggcagttgcaccgcatgtaggtatctgatttatagtaatgtgtgtgtctaaagtctagatatcatgtgggtgatgggtgcagtaacatcgtggaagcacattgcctcactccacagatggttttgtaggttttcaccctgtatggtgtatatagaagttaatactgaatagccttctgatgcagtgattacggtatgtttagttcgtaatcggtgagggttgatagcatttttgcctgcagcctgtatagaaatgatgtttctcttagttgtatactacacatacatcatattgtaagaattcacagcttcgaagtaagttattatttccttattttttggggattaattatgaatacaacgggatactgtcatgtacaatatttgctgattgttttggaggcaaattcaaactaaattttgtaatttctttataatttggaaactgaagttgcgattatttgaaatatcaatttcaattgtgttgttgctagctcgcctgtccagtggcctaaattatcaggtagcctcatgctcatgatgcagttgaaggttttcttgggggataaatttcactctaaagtgtgcagtttttttgtaaactgcaaagtgaaagttggggttcctacactatgttgacactaatgacatgcaaattttggtcatcattttgcagttttggtcgagcaatattcaacatttcaactgcatagtaagtgatgttgcttttcttattgcccttatctgttcatagtcttgtgctgcctgtgcgtgcttcctgttaaagtttagttgataaattgaaattttcatttggagcaaaactctgattctggttacactagtttctttatctttctcatgatggtgcttcttgaaacgattacaaatatccaaagcaacttggtgcaacaaatgcaaaacactaatgtaatatacaagaatatgatggaagatcacattctaggcaacagtccgaggactaccgtctaattcacttgctacagcattccatgccaacagtgctgcaccaacagctggttccacctgcaggtaaagcaaatataagctgatgaagatcaatttaaagatttcgtcatagaatccaaaagatatgtgatgtagctgaatttcttccatttctatttgaatcgatcttaaattttactcaatcattgaagatagaagaatctgaagacgatatcttgtagtagtcattatgatcaaaggcaaactattggtgcaattctgcatttgtgttcaccttggggtgtattggataggctcctggataagttttggtaacacaatctatcacttcttttccaatgtcccatctcttgtttgccatgagaactttaccaaccataacaagaggaaaatggtcttttccatctgcagaagcataagcatcttgtaacatgttttgttgaggtaaagccaataaaggaattttgaggtattatttattttttatgagcactaatttttctcgttttccgtttttatatctgaaattactgatgacttttgtgccaggccagttatgcatttcagttagaaagaaatccctatctcaccttcaccgctcaattcaagtctttgcactacagccttgacactggaagctagttcaccaactgaattgtgcaagatcttgtttgctacttcatcaccagcttcagcagattctaccacaaccggaagaaggtcagctattcgcgcccaagattggtcttcatatgtccagctgttgtgtgaagaagtaatcaggtaagtaaatgctatctatgctcggtgattcatttgctgaaatatatttcctgtgatattatactcttcaattatcatcattatgtgaaagaaatgccatacaaacatttcagcttgataaccaagttctttacaccataac

SEQ ID NO: 12003 - DNA, 1002 bp, Oryza sativa
attcgagcctgtaagaaagaaagttcctgagatcatttcaagagttgatcaaatcattttgaataccataaatgcacctacagctttcagcactaatcaggtacttgaggaaaggggcagattgactggtagaattgattcactatactatgcaaaccagaatcttcgaggtttgcttgcagaaaagatgaaggatattaaggatttatcacgccaggtttctgatgccagcaggaaaatgtcatttcaattgtcactggaggagaaactttcaaggcagctccacaaaattaaaggggactatgaggatctacacattcaaagcactattagagatgaagtgtatcaaactgttacaaaaagaatgtttgatgattataggaacagcctgcaggaccctgcactaacttatcaagaaaaagtgacttcacttgaagctgcactctcagaaaaggagacggcgttacgtttagctaatgaagaaaaccagaggttaaaggagaagttgtcaaaacaagaaaaggagcatggcatccaaaataaccaggactatcctgagttaatcaaacaagacaatgaggaaatgatactccgtgatatcgagatggagcctcatgtatcacctaggagatcatatgccatttctgagcagaatgcagagtatgaggagctcatcaaactgaagcaaactttagagattgcctcaactgccttgaaggaagttgaatcaaacgaattggattataatggtattctaggtaaaaatgagcaagaaaagcaactagaattcattttggtatccattatggatttgtcaaaagaatttgtgcagattgaaaataaaatgtcaggggatatgaagggaagtgaaaaagggtatgtccatctatcttttagtctttctaattactaatctcctgagctgcctaggccctggtgctcatttttcatgcagaacatagtaaaacagctcaattaggctttctttatgataatattatg

SEQ ID NO: 12004 - DNA, 23234 bp, Oryza sativa
actaaatctgtagttttgtgataaatgaagatattaaacatgtagttttgtgaaaaatgaagatattaaacctgtagttctgtgaaacaagttattaaatttgtagttttgtaatatagtgttcaaaatacctgtagttttgtgataaatgaagacattaaatctgtagttttgtgaaactagttctaaaatctgtagttttgtgatagatcatgtaaagtatctgtagttttataaaatttactctttaatttttgaaccatatatacttatttcttggtgcatggaggaccaaaccacctcatagtagaaagaggctgacctatttattgagttgtatattcaacaaaaagaataaagttcgatgaaaatcagcattaccttggtttttatattgtgatgcttagctaaagtttggtataagtactcctgttttcagcgattcattttatttgtaaatggactccgagttttttatgtacaacattttgtattaggcgaacaatgaaaagcattttttcaatgacgtggatgtacaacatttgtattaccaaatgccaccgtagcattagcacgggtatactactagatagattagtttagttttaggttcagagaatagagaggtggaaacaccccatcaaagtttgacccgaaatattggttcaggccaccttgtacatatactacgcaataaggttgtcatttgttatgtgtaagtactacaaattcaagcttgtatattgttgtaggctgggatagacaaagggaacctctctcgtgcaagtttactgactttgtatttgttagccatcttggccttgttttgtacatgttgagaagattgagaaaattctgaattgacgtttcaagaaactgctggttcaagaattgttctcagtgaagatacattgttcattgttgcatgcatgtataacttcacattttggcattttctgttgaaacttaattagtacacactcctatgttgtttatgagacctctgattcactaaatgaggtgcatttctgcaataatattagtgttgatgcggtggactgatgaaagcgaaattattccttacaaagaacagcaaaattacgtctgattttgcatgtttcatcttggtcaattagcttcagcagtgaatcatcatctctttagtttataatggccattttcttaaaacaattgttcccaactcttactactattctgcttatatataattgttgatggtttttaattaattttatcaaataatatgaatttttttattttgctttccatatactccctccgttttatgttataagacattttgagtttggttaaagtcaaactgctttaactttaaccaagtttgtagagaaaaataataacatttttaacccaagataaatttattgtgaaaataaagctcaattggacatagagagtactccatcctgccatcaccgcttacccctgtgctcaattagaagtgttttctcctcgcatcgctcggcggaagatcgctaaacctactattctttgcgcaaatagatgggccccctaggaatgggggcccctcggggctggctctggttattgatcaccaaaaacaagcgcatatgatgacacatgaacacacgatatttgttaacgaaattcaaccgaagcctacatctccagggttgtgataatgggtgctcctccccaaccaatatagcaccaagtctctacgagtacatggccttaattatcactgctacattgtaatcgccatggttatatttgtggtatccttttctatgtttaagagagagcctccattggtgtagaagccgggttttataaatttccattatctaaaaaaatatttaagagagagcctatgacagagtgaaactctaactctatcctacacatattccaacttcaagttaactcctaatagaattagtatattcgacacctattctaacaaaagttcttggtgtctaagtcaaaactaatgattttttcaaaaaaaaaactcaaaatctggaaaaacaaatttttatggttggttgtggaattcgtatgtataaaccatcgatttctacatcaataagggattcaaagtggactttttccttgggttgacgctgcatcgaggccatgcatgggccaagcccagagagcagcggttccgcttcgcgtgcgcctaaaataaaaaggaaggggaggcgtctctcccagtttgtgaggaccgatcaagcgatcaaaccctagccgccgccgcctcctcctccttctcctcctcctccagatcggcaatcggcatggcgcttcgtgctctcgcctccaagctgaggatcccggcggccgctccccgctggactcctccgccgtctcgccccgtctccaccgctcctaaggtccaattcaactctttcccctaatatcgagctgtttgacatctacaatccttgcaacgttttactaactattcttctatttcctcatatatgcaactgcagcgtaagctctctgccacctccaaaacctgttgaaaaaagttctctcgattttcaggaaatgtacgatgcagatgcttatgcttagttaatttcctttgtttttcctttgtttgttgactcatgtcttttcctttattttttttctcttttcaaggctactcttggaacggattcgtgcacatcaagacaggtttgcgcggaacatgatgatttctcaagcaattggtaatttagttgggtatggcatcttttggtatcttgtcaacgatgtttccaagaacttggcaaattgatcgggttcaacaatgaacctgttatgtatggcttgatgaagcacctgttatgtatcttctaaaggtcctgaagatgaacctgttatgtatggcctagtatgtgctgatgaacatgtctaattattttgtatggatgatgaacctgttcaaatcttactatgttctgatcaacatgttgaatttgtctttactttggccacgatgaacctgttgtggcttgtttgtgtactttttggccatgatgaacctgctatggcttgcttgtgtttttttaatcaagtatgaagctgcaaatagcattgcctatctgggccagggcacgcttgtcattccacatcccaccatgatggcaagctgatatgtctcaccacagtagtgaaattggcaaattgttaacagaaattctctccaatggcaaatctgtaagaaatatattaagagtggcatttggtctcgcctccaagctggacgaagtcaggggagctaacaactatcgatgtagcatctacgtatctggctccttttatgttatgtgatagcgtgacagcactctgattatattgtggcagctcttgtggaataagaactttctagcatctatgcgatatatatgccttgtaatagcaccttattgtggcaaatttgagctttagcaaggcacttggggcgaggaactttgaattgagaaggtaacaaattactagacgatggtttcgaactagtggcctttgttgtaatgaatggcttgatgatgcacttgttatgtatggcctaaaggtcctgaagattacgatgaacctgtttaaatcatacgatattctgatcaacatgttgaattgtttggccatgaacatactgtcctttttggccatgatgaacctgctgtatggcttgcttgcatccttttcatccatggcgagaccgtatgcgctgctggagtgctggtctccgtcaccgaaactgctgatagtgccgagaaggtctagatcgccctcgagagctgacctacgtctttgactcgccgttaacccccagccatggccacctaggtactttatgtttttattaagattgactggatcagattcaagcagcgagacagtggtgagcgatttaattcccttgaatcttctgaagatcttaaagagtggtacatatagattgtttgctgaaattaatttgctcatgctaaaggaattggaaaccatgtgctttctggatctatttacgtacagatggtgaacactttatgagcaataaactttttgattgtccaccaccagcgttatactactagctcatttcaaattttgatatgtatgggagtcatgttcttctacaggatttcatttcttttgcattgttagactccatatcagatttctcgcagattttgttacttttgtactgtttgactcgatatcagatctctcgcagactgtaatcaggtagtatttgatagaatgtacacaattttggaacgtagatttgttgggtcacctttggctagagttgtttcacttcctatttcctttaaagagctttcatttgcagatcttttttcatgtaagatcccatcagtcaatgtaagatagtttagacaaattttcagatcagtagtcaggacatggcattgttgaaatggcagcagtcaatgtaagagggtttagataaatgttcagaatcaggagccaggacatagcatcgttgaacagggtaccactatgaaatttaaaaaatgtggtcgatatgacgatgtgccattatgaagccttgcactgtgaccgtttggtaggttgatagaaaagcaaaatgattggattgggggtgaaatggatctggatgattgaataaagtgcttcactgttctgccaattgtcaaattcacttatattttccagtgcaaaatttagattttcaaaccatttgtccttttcttttcatgctatatctaagaaagcatatgaatgtgtattcactactacatccacaccattattctggtgactttattttggatgtaatatattttgctgtccaggggaaaggtgatctcttcttttggcacttatcttcgttcacaaatcacatatattaaagtttctggtcttggtgctatcacaaattaacaaaatgatatcagtgatcgcctccatccaaattgatgtttgctttggataaagatgcatgaattcctgttttgctcgattggtttgatgtgttgttgaggatgaaatggaaatattgtggtctactgttccgtttggatgaaaatatggtggtatactttcactacgtcagatcaaggctttagtaacacagctatgtgctactacaacctcaaaaacctgttgtggttctcggtaacacaaattttaagtgatcttatagcccatgttacttatgtacactacagtagcacaaaactagtgttccgacatacaagaaatatgtgttacaatcatgtcacatacctagtgttaccagatacactagtaacacctttttgagcatagctcgtgcagcttcccatgagtcctgtaagacctatcttagaggcagcaacacatatataggcagcagtaacacacaatcgcttagagccggtaacacatacaaatattttttttttttagagaagggtatttttttacccggcctctacatccaaccggatatatacggccattgaaataaggaactcaggaccttggggtactactcaggtcactataaccactaggctacatgccctttcatcggtaacacatacaaatatagacacgagtaacacaaaatcaacgaatctacctccagcagtaacacgtttataattttcagaaatgtacaaacatacttttatagtctttgataagcatcacatgtccacaataaggaaaaagtacgaatcccccccaactatcgcggtcgaccgaattatccccctaaactcaagtatcagacattttacaccctaaactatatataccggactaacgactcccccccctgaacactgttctgagcggttttgacttgagctagcacacgtggcgccaacgtggctgactagtcagcaaaaaaaaaatccctggcccacctgtcatccctctctttaacccaacctctcccagcccccttgctgtctctctcgtgcgcgtactcggacgaccagcggcggagctcgctcgcgcagctgggggcggaggtggaggcggagaagagccggttcccccaaatccagccgctgccgccctcttctcccctttggccgcccgcggaggaggcagccggagctcgtggtggactgtggtgcggggaaaggaggatggcgacggcgcgggggcgggcggtgtgcggggtcggcgacggcaagcttcttcgtggcttcgtggttgcggagcaggaggaggagaaccccgtcgcggcaggaggagctcccactaggtggaggcccagccgccgccggggaggaacgaggccggaggcagatgtggaggcggcggcttgcggcccgggacgacgaagaggaagccgaggaggcgcggaagcgacgtgtggtggcgagcgtggcacgcaccagcgcggcgggggaagaggcggacgaggtcgtcgcggagcgcctcgatgccgcacgtcaccgaccctcgcgcgccgaccgcccgtgcagctcgacctgtgcccgtgcggccgccacctcgacgccgcccatcgccggccctcgcgcgccgctcgatctgcgtccacgcgcgccgacccctgcgccgttcgagctgagaccgtgcggccgccaactcgacaccgcccgtcgccagccctcgcgcgccgaccgtccgcgcggccgcgcctaaggagtgtcgacgccagagagagagagaggggaagaggggaagaggaaaaggatgacatgatagagtatgaaaggtgggacccaccatgttttaaaaaaagggaaaatgctgattgggttgccacgtgtacgccacataggacaaaaccgctctgaattgggtcgaggggggtaattcgtccggtattaagttcggggtaagtgatgtctggtttttaggttcaggggggaaattcggtcgaccgtgatagttcagggattcgtacctttcccccaaaataacatagaatcaacatgacaagttgtattacataggaaaccagtaaataatatttttacatcaatctataacaagaaatctatagcaagattctataagaaatacaatgtctatatgactctgggacgatcaatatttgtcacttgatccattcatgagatgaacactgaacaatatttttcccaagttaaactaatcatatacttgcatgtacatttggcctggttacttcttacaaaaccttgatgaatgtgtaatggtacctgcacctcaccaagatgaagatattagaccatagaaattgacaaaaaaaagtacatatatacaggacatcaaataaaggagttcactgtagatttagttaaatccaaaataaaagtatctaagatataaatagtatggtcttcattcttttgtttcttttccctagccaggacaaatagtatatggtctagaagaaaaacagcatgggtaaacaaagggggaaaaagaagaaaaactaactattcgagaaataaggcaagcttttttctaggaataaaaagcaacaatgacttcacacagttgagaaataatataaaaggtgttgttttgaaacataatatattttagccatgacaagctactaagctagtcggatgctagatgaactgttgaataaaatattttcatgattaatgttggatgaaacacttcagctttaacatatatttcctatacatagatcagatctgcatttgcattaattattcttttacctgaacccctgaaagagttctgaagaaagcatttttaaatcagaaacatagaacattcatgttgaacagtgtagggagagagaaatacagcgaatattagaccacgttatattgagcctcaggggccggtattgttgacgcgaaaaatacacactggcccgggagatctgcttagatcaagtgcaggtccaaaggttgatgagatgcgggcgtgctagtcagtttgaccctgcaactgataagatatacaaatagcagatcaatgagccgatcggctgacaagccgatagattaattacagccgatgccgataccagccgatagcgatagggttttgagctatcggctataattctgatgtagattctgacgcttgatgtaaataacaatatgaagacaatcgcctggtgataatgcaagaaagcaacaagataatccaatagaaaccaatcggctaacaatgacatgctcgagtaagcactgatccgaaggttaaagcatacatcggctggaggtccgatgtcacaaaatccacacgattagataaacagtaaaatctttgttgcgatcggctaaatccaatatgtatgcaatccttgtaagccgatgcaacgtccagataacttatcggctaacaccccgataaaacattagcatgaacctatcggcttaacaagatttatattatcaacaacaatctagtaggtcgaacctaaccgatagagcacgagaatgcatatgataatctaatactcgatgagccgatagatctgtctaatgtgatggatataacaaatctatctagaacagcattgtgattgtagagatatttcggttaagacagaagatcagacctaaccgagacagttccaactaaactgatacgtctctaaacacaatgcaattagagataggactaagatatcatgtaggcaaatatatcgaccaaaccagagcaatccaagagatcgaagcgatgcatccttgaacaacaccaacggcgctgagagtagtattgatcgagagatattttacaatgacccagggtgtacatatttatacccatggggagatactagtccttgtaggacaagaaagaaactttcctaaagataaaaaggaaaacataaagtctttataggacactaaacacaatttcctaaagataaaaggaaactaacaaactactcctaattaatagataaactgccatgccgcatccttcttgaactcggtcacttctggataagctttctttaatagattaatttccttaaccgaatatagcaggaatcggactattggcgatgtgataattctcttaggggcttaccaaatttcactgttaacaggtatatataggttacatggattggatcttaagtatactgaaagagatagatatggaaactaatcctatccaaccataacaaaccggatacgatacaatcctatccatatactctaacatccccccgcagtccaagagtgagcagcgcgggcacttggactgaagaagaaaccagcaagaatgctcaatacggatgatagccctttgtgccatagtcgatgtagccgaaacgaagggtgtgagagacccgtggtcgatgaagccgtgcgtagagtagctgtcatcgatgtagccgaagtcagggagccgatgatgtcgaggtagcccagctgcaaggtgcgcatgggacaccgtagagtgaggtgcacgaggacatgctaaagacgatgacagtgatgcaatcgcgacagtcattgaggaagatgacgccaatgaatagtatagtatagggagagaggaatactgcgaatattaggccacgctgtattgagcctcagagggccgatgcatataggttacatggattggattttaactaaactcaaaaagatagatatggaaactaatcctatcctaccataacaaaccagatacaatatgatcctatccatatactcaatgccacgtttgttagacttccagtttcatgttatcacagtattattgaaccttatgtgcataagcacttaacaccaggacaattggaaaactaatcgtaaactgttcagcattgccaattctagcgctatcagcctattaatcactataagcttgtaaaaattgcttcactccctcacataaaaaatattatacatttgagcatattcaaatttagccctaaacattaacaaagcatagtggccaaattcagaaatgaattttaatatgcctatgtgccagtttgtagtgttacagcgtaaattttgggttgaatgaacaatatgtgctctgattgctctaaggaaataaattatccagaacagttaaagataaatctttgaagcgtgaaaacgattgctcaagctctgcaaacattcaattcttaaacaactgcacctcatggggatagataggaacttgtgtagttctgtgttccctgcttcccctctgctcgcaacctataggccaaatctcatcacaatcaaaacataatagttcagattagtaatacagagaaagagtctgcacattagagaaaggcgaggaggagttaaggatttagtaggcggccggggggggggggggggggctgtttgtcagtgttttctccaatggatcattacgtaaatcaaatttgggcccaaactcttccaatcgtgctgcatcaagacatcaagtgtgttcgagctaaatttttctgcatcaatctgtgagatttcaatggtagcagttgtgtgcacctaagtgttatttttaagaacggcatgtttctagaattttccaccttttgattccctatcaatattcatgcaattcagtactgatttttcttagtgcaatttaccaaatttttatatgagatgtgctcttttccatggaatagttacagtaagtatatttgtagcttttcagttcagttcacaatgtcataatagttcagttttccaatcaggtattaatgagtcctggatgtatcaatcatttgtgatttataccatgttaattaatttgtttcatgattggaaatttaatctttgaaattcaaatgagcatgttcttggtagcacattatgcttgagtatattcatcctgattggcttctaggtgcatgtccgttaataagctgtaagtatgtttttggtctgcagggccatggagaacaagcacaatttggttgcagagccaacatgacttgtccctctcactagtcactagtcaccacctagctgaatggtcagtaaacatctattggcttttgtttgcaatattgtaccggatcatactggatcttgcggttgaggttatcgactgatataatagtttaatttagcttatattgctaatgtcgtcatgccattcttaattactattgatttatgctttccattcatacatatcttgagagaaaattattgaaatccatgttcatgccacttgtttattggaaggcttgaatgaatgagtgaaactctatgtggggagtagcagcaggttcatttggattaaatcatcaagggataatgtttacatcttaaaatgaatgatactctctccgttgttacaagacattttaactttggtcaaagtcaaactaatctaagtttgactaattttataaaaaaaaagtactccctctatccacaaaagttgcacctattactttgtcatcaagatcaaggaaaaattaaattatcttggatgttacaaaatcaaggagtgaatgtaagcatgcaatcaatgagtatttagattactccttagattctaatcaaacatttaatttatctcttcatttaactcttgaatgcataaatactacaaatatgaacaacttatttggaaaagctcaaatgtgaaatatgtgtaacttttgtggatggagggagtaatatttttaacccaaaacaaaaatattatgaacatttatttaattatagatttagtgaagctatatttgtgttgtaaatattactatttttttctacaaaattagtcaaatttaaagtggtttgactttgaccaaaattaaaatgtcttatatatatcctgaaacggagagagtagtgaataagaaaatggtgatcttgacagtgatttgaggaagagcactacaagatgaatacttatttgcttctatattatagcaacccaattctaattaaaacttctattttcatttttcaggttccaagttgtacgcaccttaaaacttctcggctagtttttttagaaaagcgggttgttatccatggataagtatgagccgggcgcgcgcgctctgacaagacccgacgatcgagctgtgctagccgaagtagtactagtttcagacccacgcaatcgtcatacaagctagctaggccgcctgcatcgcaacatgctctgatccaaattagttttattaaattaataattaaatatatttttataataaatttattattactatttttctataaacttggtcaaacttaaagtgaccaaagtcaagacatctaacctgaaacagagatagggagagagtatttgctttgctatctacgagatcttaggctgtgtttagatccaggggtgtaaagttttggcgtgccacatcagatatacggacacatatttgaagtattaaatgtagtctaataataaacaaattacagaatccgcctctaaaccgcgagacaaatttattaagactaactaatcaatatggtttcaccgcagccgttatcaccgccaagtcgccaacagcttcctcaccgttgtgatgcgcctgagtatctcctccctctgctgcaccagatcatcttgcgtttgattttacaatgtaatcatgaaactgatactggatttacagtatgtttttagcccaaattcatggaaaggtagctaggaaggagtcttatgagcaccttatctgatctttgtgtcattagaggaattaactgacattcatttattgttatggctaatcagaattatttgatctgggattgctgcattcattgtaacgagctgctgaaaggcttttttttttcatatttgaaagaagaggcaacctactgggcatgatgccgccctggaccatgtacaggtttggacgatgacttgtagtggaatgagcactaatgtttttcttcatggtatttattaggttattccgaatcagaatatttagcatattgccaaaaaaaatgttggtgtttaccttctgctagcactctgaaaagcatattaactttttgctcactgacatgtggttcctaggtttgataaattttcccatgtgtgctgtcattgcaggacgccaggatccagttaggccttaattcttctattttatgacgaatactcatatttgatatttggtatgtatacctgtggtcctgtgcagatacttgccttgatgttccaataaatgtaacaaaaacttcagataaatgagcaatcatatgtttggagtttagaaataataactgaagagaaacataaccaaggcataaagcaaggtagattgctactaacactagactgaaactgaaggaatcacctattgcaatagctttatccaagcactcataggtacaacggacaagctgcttggaagcttcatcaacatttccaacaaaatatgtctcgttcaaatcacctgcagtttagttatatactgtgtcaaaaaaaccaacaactttcagcagcgaaatacaataccaggctgcagagaacttaccatgaactcctttgtaatatacagttacgtcgacatttacaatgtcaccatcttcaagtttcctattagagaaagatcagataaaaaccaaaatcaatttacctgtttgttttttctgaaaatagcagaaaacgttatcacaatactgatataatagaattgttacatttctatagcatttaattcattctttagaagttcaagaaatggacctttatgtggaatctggtattctgccttttctgttcattttaattatagagaaaaatattgattgttaatgtgcgcagttgttgaattggttgtcatgcattgtgtattatttttgctgtgtttattaatcatagaaaatggaaattttctatgtttaaggtgtgccatagcacttctgtcactgtactaaaaatggcaaattttatgttttcacaaattagtgatatttttacaaattttgcagtgtaaaggtgtgaaaattgagcttccttgaatgtcttttttttttacagcttttactaagtgggcatgtgttcgggaggattataatagtttagcctaattacattatgatttgataatatggtgctacagtaaatatttgctaataaaaatcaattaggcttaataaatttatctctaatttatttttattattaaactatgtttaataatagtgtgtcgtatatttgatgtgacaccagaacttttgtctgaacagccgcatgcatagcgagacagtccacactccagagtctcgactgcctccagaccggcgaggccagggtgagttgttggtggccacacccacacgtacagtacacacagagcaggagcaggagggcgacttcctccattggttctgcacagaaatggtggagtgtaacagtagtacgtacccggtccgtccattgcatgcagactgtatgtactcggatatgtacggtttatctatagcagtagatatgctcacttcacgcacgccaagaaccatactccgttcaatgtacaccgtgtttagttccaaaaatttacttcaaacttttaacatttttatcacatcaaaacttttcaacacatataaactttcaacttttccatcatatcgtttcattttcaatcaaaatataattttgactcgcaatcgctccctgcatataccaggtgcatttaatttgatcaatcccatcggcaagcagcgcaattaatgtttgctactgtaaatactcgcatcggagtagctggatggaatgtccacgaatacaattcagctatgacttactccctctgtctcagcgattttaagttttcgctcgtatcgtttgatcactcgtcttatttaatttttttttacaaatataaaaaacaaaaagttgtgtttaaagtactgtggataataaagtaagttacaaataaaataaataataatctcaaaattttttaaataagacgagtggtcaaacgttgcatgtaaaaacttaaaatcccttatattatgggacagaggaagtatataatattgctccgttcccactccgtatacatattttaaaattcaacttttaaaatatttggttagtaaatattttattataaattagattttatttaatgaaaacaatatcattggattattatttaaatttacttttatatgattatgattttgttgctataaatattgtagtatataagaaatctgaagttaaatattagttttaaagacttagttatgtttgatcacgtcttagtgagtaggacggagagagtatatgtttcttagggagtgggccagccataaatttttttaaaaaatatatttttttagtttgttgactagattgccatgtgaccaaattgtcatcgtgcaggtggcagctaggaccaatactactttgaatgttaggtaattcgtctagtatgaagagttctgttggtagaatgtcgggtttaagaatttaggggataactcatacattttgagaatagttctagagttcctgatgagatactaaaacatcgtaccatttctattgtaaaaaatatcctaataagttgcctatctaattacataatggcagtaccaggatttatgaaaaaaaaatcggttgctttagggtgtgtttagtttacgtcaaaattaaaagtttggttaaaattgaaacgatgtaattgaaaaattgaaaatttatgtgtgtgtaggaaagttttaatgtgatgaaaaaattaaaagtttgaagaaaaaatctgtaactaaactcagccttaatctgaaaaaacattcaaattcgatgaagaaaacatgccaggtcgggcccatcatatatatcccgacgtagtggccgatgaggaggatgagggagaacaaattaccgaaagaggaaagagcggaaagctgcaggccgaaaaacaacaatacgtgcagggtgtgcaggtgtgagagacatactgtatttctgaagctgaagcagctgcaggctgcagcctggccacgcccagagccacagctagagctagctataggcgtgtttgtactgtttgcactgcacccctatgccacatgggtgtgttcctggttccgggaatttccttccgaatcgaggaacggggactacctggaacttctgtctcgaaaatagatgggtcgttattatgctacagaacttagaaataggattgctgctaattgtataatttgaataggagtgctagaactagggagcaaggaggagaaaggttagggcaaataagctcatgattatgggtgtgtttagttctttgggtgtaaagtttttgaagtatacggacgcacatttaaagtattaaatatagactaataacaaaacaaattacatattctgcctgtaaactgcgagacgaatttattaagcttaattaatccgtcattatcaaatatttactgtagcttcgcaatgtcaaatcatggcgtaattaggctcaaaacattcgtctcgcaatttacatgcaaactgtgcgattgttttttttcccacatttaatgccccatgcatgtgtccaaacatttgatgtgacgtttttggtaaaaaaaaattaggatctaaaccaggcctatttatagtactgttgtttagttttggtggcatatttaaaatttgagtttcaaactgtcatgtttgtaagtggcgtcaataatgcggatacggtagaatatatgcttttgtaaactcattaatgttaacttggtcagatgttttaagttcattcccaacctaccaaaagcaacagtatattctccaaataagtacattaattagttcattgaatgtgccaatgtgtacttccagatgtctatagatgcacttttttctcttccttaatgagtgctaaattagaaataatcccctatatggatagggagagtaagaatctccatgctcggatgctcttatccctgtaaaatcaaagatgtttttgattatttttctgtgatgaacaattggcattgaagattatcggttttattatttggaatttatttatgaagtggttttggagatgattggatttacagatgaattgcaggtgttgttattttatgtggaccggtcagaccgggcagtggttgccggtcagaccggcgtgtattgcgcggtctgaccggacgacactatgtcggtttcggtttcggattgtttgtttggatatccgtgattatttcatgattatgtcttctagatggatactatgcgtatgtaatactgttgtttgctaatattgagtcaagttggagatagcttggtctcggaatatggtttctttgtttgttccatgtgtaggtaactcgatgtctcgagagagtatttgcggtgatggaccgggagtcggcttggggataagacgacgtccgtggtggtcagatatcatgcgggatacttaggctagagttgatgcacgtggttggtgaagattccatatggcatacgatggaggtgttgtgtgcgtataggatgcggagtcgaatttggaaggagtccaaatttggtatgagtggttatgtaaagtttgtttcttgcatgagaaggtttcctatggggatttggacttctagtatgagtttggttcgtggctttaggctgcctaccttatgtataaatagagagggagcgtgaggcttcccggtatcgcttttgagagcaattgagttgatagtttagttagggtttcgagttttctcgagatttttgtaaagagtgttgttgatgtactttgtaaacacagagataatcaataaagtcgtcatccactttaagagttcttcgatttgtgtttcaccgggtttctgtggtctaaccggcatctcaccggcagtcagaccggcgacaagcggcggtcagaccggtggcttaagggcggtcagaccggcagcgactccaggcgcgacaggcatcttcaggcggtcggaccgatcgatctacaccggtcagaccgacgacatcagggcggtcagaccggtggatcatcttcggttagaccgatctagtcgaatttgagggtaacttttatttccgctaaaagtttaggtttttgggtgttccaaccattcaccccccctctggttggcttagttcttactgttcgatcctacaatccccactataggagtagtttcttttgagccgcttactaattttaaaatgtattttttgatttttttcaattaaagcttctttttataatattggttattaaattgctaagatacatactcctatataatttttttaccaataaacctttttctaagttgttaagccattgctttatcagctaaagtttcgtttttttcctgttagcatacactatcatagaacatgctagcttgtgaaatttcgagtaactactgtacgttaaaaatttaaaagactatcgtttgtttggagctaacatgaacttagaaatagggtctgtttggcaggccgactgcgatggctgcggctgcgacggcagctacgcacagtgagtgcggtagcctgggcagccgaacaggaccatagaccggccacggccaattttaaaatttactacaatttaatcagctgtaggagtagtctgtatttatctggccatatttgctttaaaatcactaatatcaatgtatattattgtctatattagctgaatatttatggtcgtagagtaataagattttaaaccaataaattagtatccatgtaatactgtagcttaaattgtctgtcccatgcatggttggtatggtataggagtagtagttcatcaggggttcttctgaatgaagcgtagcaattccacatgctagtactacgcggataaaaatgaaaataggctattctatggttgcactttatggacggatggacaagctagggggccaggctcatgttgatgaattaaaatactatcaagggtgtgtttagtttcacgttaaaattagaagtttaattgaaattagaacgatgtgactgaaaaattggaagtttgtgtgtgtagaaaagttcgatgtgacgtttttagttcaaagtttaaatctaaacagagcccaaattataaacttctctcaaacagttacagtacattattatatactactggagttctgttaacacgtttcctgattaagatgattatcttattcaatttccatcagcacgttttacaaactattttaaaaaataatttatgtatagaagttgtcttaaaatattaaatacatctgtttttaaatttataataattaaaacttaattaatcatgtatacgcgctgagttgatatttatcttaatctctcttaaatactccctccgtcccataatataagggattttgagtttttgtttgtattatttgaccactcgtcttatttaaaaaatttgtacaaatataaaaaacgaaaagttgtgcttaaaatactttggataataaagtaagtcaaaaaaaataaataataattttaaatttttttgaataagacgagtggtcaaacagtgtaagcaaaaacttaaaatcccttattatattatttgacgatgggagtaccatactactctacgtgatcatgatactattgttgaaaaattagtactcctactcctatatcgcacgtcttgctagtgagtgacatgtgatgtactaggtgtacagtactctacaaaattgacaggagacctacaaaattgacaggagactgttctagctcgcagtctcgcaccgtgcgacacccccgacgaagcaatggtgcagtgagatacatactcctatataaaaatgtttaccaataaacctttttcgaagttgtttagcttctaactttttttcaaacttctaactttttcatcacatcaaaattttactactcacaccaacttttaacttttttcttcaaacttccaatttcagtcaaatttctaattttgatgtggaactaaacacaaccatgttgttttaccagctaaagtttcgttttttttattcacacactgacatggaacatgctagcttgtgaaacttctagtaactgctgtacattttaaatttaaaagacgatcgtttgtttggagataacatgaactaattatatatatagaccacggcaaattttaaaatttactacaatttaatcagctgcaggagtagtctgtatttatctggccatattttctttagaatcaataatatcaatgtatattattgtctatattagctgaatatataagtacatcctttaatttctttcaaggctgggttaattctattgtgttctggtattcagcttaaccactttgctagtgaatgtgttctccggaccgctaaatggtgaatattaaaaaagtatagaaaagtttattttagaaaaaaatcaagtaataaatctatttttaagtttacaaagttaaattcaattaatcatgtcatattgactcgcatgctacttttaaatattataattttatttgaagtagaagtctaatgaaggcggatgcggcacggctaccgtggcgggcacgagttggagtggagcagctcgtagagcataccggtgcttcttggtggtcaacgatgacgtgaaagtcgaaaaagccatagatgttgataaggctcgggcgcagagagaggagaggatgtgaatctaacggtgatgatagaaaatatgattgtgatggtattgtttttagggtgtgtttagttcacgctaaaattaaaagtttggttgaaattggaacgatgtgactgaaaagttggaagtttgtgtgtaggagagttttgatgtgatggaaaagttagaagtttgaagaaaaagtttggaactaaactcggtcttaattttacaaaaaattcagtaacatgtaggagtagcaaatattacggatagtaatagtatttttataatataacgattatgcaatggtatattggcatgtatcggattaatcctaggacaaatatccgtagccagtcggtctatcagtctgtagctggtctggttaacaagtgttgtgtctgcgttgtttttctgcaccctctcgagtccaatcgcttatactgtatccttgcatcaagtgttgacaagtttatctactaccactatagtacagtactttctccgttacatacagaaccaatctaatacttgatgttgatatacttcatccgtattttaatgtatgacgccgttaaatttttaaccaacgtttgaccattcgttttatttaaaacttttgtataaatataaaaatatttatgtcatgcataaagaatatttgatgataaatcaagtcacaataaaataaatgatgattacataaatttttttataagacgaaaggtcaaacgtttattaaaaagttaatggcgtcgtacattaaaatacggagggagggagggagtatcatattatcatgctttgctgtaactgtaattgtcaatccaaaatacggaatactatggctgtcttgggtgctgagcgaggcactatgaggtcccattgtttcgtttattcatgaaataaactaaacaacatatttacaaatgaaaagtaaatttatggctaaacttttatatatgtgttcttagcgatctaaaagcaaagactgaaaaataaacttgaataaaaaaaactccaaaatcagcatcaaatttaatgttgaaaaatcaaattttagctgataagtataaccatgagcgaaaatatgagatcctgtgattgacgccggttgtccaaattacggttggtcgtgggcctctagctaaacctcaaatatttaaactccttttctagaaaagaacatatatatatatatatatatatatatatatatatatatatatatatatatatagtatatatattgttttgcgaaattggtaagacgtttctctattttctctagcaccttcactgctactgtaaaaaaaaaccgctaatagccaggtaacccctgaggcctaacctctaacctctatggtttttaatagaatcgtttaggattatttaatctctcagtgctaaaaaaaaactcatttaagaactagcacaactacgtacataaactatttctgtagacggacaaaaccagttttcttatgcggttggcatcccgcatgcaaaaaaaatatctatgaaatacatttttctgcatgcggctagcataatcgtatgggtagatcaatctttgcatgcgagcaaatctacgtaccgctcgaatgggaagagcccattaaccgttactagtatagactaatatctaacggtcctgaataatcaatagtttttaattaagaacccttagatcgagtctaaatatttgtctgctctgatttggtggaaatgcgtaatatataaaccttagagaaataaacaaaacaacctttctattttaaatctaaaaaatatacttcgacaaaaaaatcactctaaaatttaagtttcaaaatttacatgtggctcatgagcttaattacaagtagataaggagagcctagttgcgtagtattcattctgtctcgctgaataaaacgtattgaatttttgtgtaacagtacttctattgtagatactagctacactgtctactacagatgacatgactatcatttttcgtagcatgaaaaatcaacatagttcgtaatgctttttggctagagctagctggccacttttatggagaatgcactggtttatcctctgggacaagcccgtaaggaatattgagtcgaacggtcgaatcggcgttgtgtgagagccatctgtaataaacgcattagttactccattcattctaagctaaaataaacaatttgatacgatatatatgatacatcttagtacaacaaattagttattaagataatatatttagattcgttacagaatgtgtcccattaagtttgtttattttgaaaacgaaggaagtgcttaagggaggagtactgtgtttacagctgatgtgatagtgtgtgatgttttgattggataaaacgactgtgtcaccctcccacatactactaaattattacgtggcactctaataaattgatgaacctatttattttttttaaaataaaggccccatatacctcacctctctatcctctttacccaaatacctaattgtagttttatattgtgtacgtgggtacgtgcctcctccctcccctcctacttggtctcccctcttccttttttttaagaaaattaaaagtaataaattccataattttcgaaaagagtagtgacatgggacatggacatgtactgtagcactatctagtggaccacccccccccccccgcgttgccccc

SEQ ID NO: 12005 - DNA, 1000 bp, Oryza sativa
acatatgcttcttatagagcacacacttcatgataaacatgcaggggtcttcgagctagtgggccgagaaaagcaggaattgtgagtgggctagccgacataggtttaaggcctcacattttatatttatttgatattatatctttcataatattagagtttttagcacggacttcattgggaaattgtaaaaagtacgaattacccccctgaaccacaaaaccggacattcttcacccccaactatgcaaaccggatgaattaccccccctgacccaatccgcggtggttttggtctacgtggtgtacgcgtggcggtccagtcagtattttatttattaaaaaaatataggacccacctatcatactcctataccactattcccatctctctcttctttctctctcttcctctctctcttttctcactctctatctcacacgcgcacggtggcaggcgggggagcggcggcggtggcggcggcggggtgcggcggaggaggcaaggcgagcggcggcagcggaggaggaggcaaggcggcagcggcgagcggcgggggatgaagcagcgaacggcggcggggtgcggcggagggggcgaggcgaggctgcggcgacagcggaggaggcgaggggcggcgggagctcacactgctcgaggcgaggcgaggtgagcggcaacggggtgcggcggaggaggtgagcgtgacggtggaggaggcgagcgcggcagtggaggaggcgaggcggcggcggcagttggccggggggggcggtgacagacgacgacgcgcggcgcgggcggggctagagtggagatggcgacggcgcgcgggcggcggggttgagatgccgcggacagggcaaccgacacccttcgttgttttttatagtgatacctaagtcatactcccaccttttagtcatgatatcaactcatgcttgagattcttgtcctatatataagaagagagaaattttaagattctctctttgttac

SEQ ID NO: 12006 - DNA, 15155 bp, Oryza sativa
ctcctaccacgtgaggccgggcggcagcggcagggagacgggcagccgagcaggcggcaggcgaggccggcgaggcggcgggcggccggcgagacgagtctggcgaggcccgcgaggcggcgggcggccgggcgggcgaggccggcgaggcccgcgaggcggcgcgcggccgggcgggcgagtccggcgaggcccgcgaggcggcaggcggccgggcaggcgggcggtgagacccgcgtggcggcactccccaggcgggcggcgaggcggcgggtggtggtgctcccggtgcggcggcgctccccaggcggcagcggagcccgaggcggccggcgggaggccggtgaggcggtggacggccggcgcccgatctctgtgatatggttttttttctgatctgtgtgatatgtgcggccgatctatgcgatgtcgattttttttctgatctgtgtgatgtgtgatgtgtgaatgaatttgtggagatgttttttgaatgatttgtgatgtatttggggataaaaatgcagcttgatgtatttggggattttgtgattgatctgtgatgtatttggggataaaaatgtagcttgatgtatttggggattttgcgaatgatctgtggtgttaaaatgattcgtggataatatgaatggtggtgctcgaaatcatgaaagcaggaaaaaaaagaaaaaaaacattagtcccggttgttaattctaaccgggactaaatctttagtcccagtttttaacactaaccgggactaagatcctctttagtcccggttattttaaccggggctaaaaatatgtatctttagttccggattcgtagttccggttgtataaccgggactatagggacgttgtgaaccggtattaaaaagggtttgtccaccattgcgagcctccccaagtgcggcaccacgtggctcaaggccctcgctttcgcctccatggcgcgccgcgcgcacccgccgccgcccgccgtcggcgacggcgacgcgcagctgctgcaccacccgctcctccggctcaacccgcacgactgcgtcccgttcatggagaagctgttcgccgccgggttggggagcaagatcatggacgcgctgccgtcgccgaggctcatggccacgcacatgcaccactcgcttctccccacctccatcagcgacaaccttgactgcgaaatcatatacatatgcaggtgaatgatttttttgctacttcctccgtttttaggttataagatgtttttgactttcgttcaaagttaaactgtttcaagtttaactaagttttttaggttataagatgtttttgactttcgttcaaagttaaactgtttcaagtttaactaagtttatagccaagtatagtaataattaaattaccaaaatatttttaataagttaataattaaatatatttttataataaatttatcttgagtaaaaaacattaatatttttttctacaaacttagttaaatttgaagcagtttgactttgatcaaagttaaaacgtacatcttataacctaaaacggagggagtatataataataagaaccactatatactacaataacattatctagtactcatatacgacatgattgtatcatatcataggacaaaccttgggtttccgtatctaaatttgaccgtccgtcttatttgaaaaaattataaaaaaaattaaaaaggtaagtcaaagtattaatcatgttttatcatctaacaataatggaaatattaattataaaaaaaatttcatataagacgaacagttaaacgttagacacggaaaccacgatttgtctttttctgggaaggagggagtatgtggcagttcgccagaagaatactacctgagctccaattccatgacgtgtttgagctttgcttgtgagggtcgctgcttgagcggccctatttggaaccacatcgtcggttactggaacgcgagcaaggcgaggccggagacggtgttgttcttgaggtacgaagagatgctgcagtaccccatcgacaattttaggaagctggctcgattcgtcgggcaaccattctcgcccgacgaggaggaggctggtgtcgtgatggactcatggacatcgtgaggttgtgcagctttgagaagatgaaaaatctgaaggtcaacaaggcagactcatctcctgtacatgtgcctcgtaacaacacatttgcgaatgactctttctttagaagaggtggagcaggagactggacgaaccacatgacaccagagatggctcgacgtttggacgctatcatgaatgagaagctccatggaacaggcatctctttctcgtgatcaacacgttaattagttgaaactctcataaataaagattacaacatcgacgaagttcctgaagtgtatgtaaagaggtatgtaaagattattattgtaagatggcacgctctatcaccagagcgactctatgaaatatatatttagatcgagtgaataagttggaaattaaacatacacacgcgtgtgtgatagataactttatcaccacatcacttggtgtgtacttattagtgtcagcaaagaaataatttgagccatcaatttataagggtacgcaagtacctttttctaactatgttttgaatattcatgtctctagtttagatatttctttctcaatattataatatgaaaaagaatcaaagagactatatcttaattgtttcatgtggttcatagttggcagtctcgcctatcactcctgaaagctatgtcccaactgacccccaaaaataattcgcagatcgaaaagctcgaacgtacacaacaaattaattaaggaatgaaaaagcaaaaagaaaaaagaaaagaaaagaaaagttacccgtttgttatgctgtccaatcgatggccaattctctcagattcgatccaattccaagccgttcttttaagaaaactcatataccacatgagaaacatttatttattgggactacctatacattttgtcgataaattttctcctaaaaattttacagatataattatagtacaatcgtagtgtaattacactgtaacttgcatgtaactacagtgtaacttatatataagtttcacataattttgaatcgttagatctattacaagatttgttttggtgaggaagaaaacaaatcatagcacacacatataaaagaatttgttcccacgacctccaatttaccgaaataacatgttacggagagatttttgaaagttacatacaagttacactatagttacaatgtaattacatacaagttacagtgtaattacactacgattgtactataattacatctgtcaaatttttgaggaaaattttgtcgacaaatatatagcaaatcgttatttatttaaggaaaaagtacgaattaccccccgaactatcgtggtcgaccgaattaccccctgaaccacaaaaccggacattactcaccctgaactttcaatactggacgaattacccccctggacccaattcagagcggttttatcctacttggcgtacgcgtggcatccagtcaacattttcttttaaaaaaatagagggacccaagtgtcatacctacccttcccctcttcccctctctctctcttcactcactctctcggcgagatcgcgaggacacagagagcggcggttacagcagcgttgtcgtcgtgggacacagaggaatgcggaggccgcgacggcgctggacactgaggccgcggcggcgtgggaagagccggcggcgacgcgggatgcggaggccacgtgttacgatcgggctagagattttggggattttggaaggaagaggatgacagagaacagaacgagagagaaatacttgagcagaggaaagagcagtagagacagagtttggtttcaagtttacagctcaaatatttgatatcctttcctctctctacctgtgcttatatacatgcacggcatacagctggcctaagaccactccggcccagagactcggacattcggccttctctccctttgaggtcgtttcccagacttcacaggattattctcccttaccggttcagatacagtagcagcacccgtaacattccttcccccttcgaaagcggcttgcccccaagccggcgcatccggaaatcgaagacgcaaagccgcagcatcttcccaggtagcctcacttgatgattgacctgtccaacgaaccaagacttgttccacagctccagctcctttcttcgaaactcgccgggcgagaacttgaacaggaaccacctcctctggtgccatggtaggaagagcacgaacatcagtcgcagtggttggtgccacagcttgtcgaagttgggagacatgaacaacgggatgaatcgagcaatcatccggcaatcgtagtcgataagccactgctcccaccttattcagtacctgaaaaggtccgaaatagcgaaaagcaagtttgtgattggtatgcccggtaagagaactctgtgcataaggttgagccttcaaaaaacccaatctcccgtagcgaactcgcggtcagaacgcttcttgtcgacctgaaatttcattcgttgctgagctcgtaaaagatgctgacgcaacaaactggagattactgcccgttccttcagccacttgtcaagatctggaactgcacattcagctgtactcgacaccccaaaatgacgaggaggatgcccataaagtacctcaaatggagacctctcaagcgctgaatgataagcagtgttataccaaaattctgctaaagcccaccaacggaaccacttctttggacaggcatgcacaaaacagcggagaaatgtctccaaacactggttgacacgctccgtttgcccatccgtctgtaggtgataagcagtacttaacttcagacgagtatccgtcaactgaaataactctgtccacaaggcgctggtaaaaatacggactctgtccgaaatgatatgatgtggcaatccataaagtttataaacattgttcagataagccaaagcaacatcaaaagcggtgaatgggtgcactaaagccaggaaatgggcatacttactgaatttatcaacgaccaccagtatgcagtcaaaacctgctgaagaaggcaacccttcaataaaatcaagtgaaacagttacccaggcatgctccggcacaggtagaggttgcaaaagaccggggtaacgcacacgttcagcttttgcttgcttacagatcgaacagttggacacaaactggcgaacggcctgcttcaaacccggccatgcaaacaagcgccgcactctgctgtaagtaacttgtataccagaatgcccacccacggcagagcaatggaaagcagacagaattttaagttgcaattcagagtttgcacccagccaaatgagcctcatataatagagaataccattcttcagagaataagaaggaaattgactaggagagagcaacactttagcgagcaattgagaagtgcaaatatcagaatcataacccttctgaacttcctccaaccaagagggcacgcaagatgacacagtactcaattgatacacctcattggatctgcaacgagacaacacatcagctgccttattctcaagacctttcttgtataccagccggtaagataagccaagtaatttggttaatgctcgttgttgccaagatgtcaccaaacgctgatcatcaagatgaatcaagctgcgctgatccgtacgaatgataaactcaccaaactgcagataagagcgccaatgatcaacagccagcaatatagcgagacactctttttcgtaagttgacaggcctctgttgcgtggacccagggatttgctaaggaaagccaagggatgtccatcctgcattaacaccgcacccacccccaaatcagaagcttcagtctcaattacaaaggtcccagaaaaatcgggcaacgccaacactggggcagaaaccaaagcagccttaagagcttcaaatgcagcttgatgttctgaagtccaaacgaagaccacctacttttttaacaaatcagttaagggccgactgatgatcccaaaagacttgacaaacttgtgataatatccggcaagtcccaagaaactccggacttccttaacattctgcggcactgtccaagcttgaacagccctgacattcttcggatcagtagttacacccgcagcgctgatcacatgacccaaataagtaaggctggattgagcgaacgaacacttagatcgtttgacctttaactggtgagtcgtcaatagctagaacacttgacgcaacagcatgacatggtcctgcaaattacgactgtacaccaatatatcatcaatgaacaccaaaactcccttcctcaataacggtgcaaaaatcatgttcatcaacccttgaaaagtggccggggctcctgtaagtccataggacataacccgaaactcataatgaccattatgcgttttaaacgccgtcttatactcatcttcagctcgcattctaatctgatgataccccgcgcgcagatccaagctggtaaacagactagcacctgacaattcgtccaataattcatcaatgattggaaggggatagcgatttttaactgtaacagcattcaggtgacggcagtcaacacaaaactgccaagtgaggtcctttttctgcaccaacagcaccggagaagagaagggacttgaacttggttgaataactccctgctgcagcatatccttcacttgccgttcaatctcatccttctgggctgggttataacggtagggatgaagattgactcatgaaggagctgagaaatttcggctggtatttcaagagaggaatctgaatcttctagaggacataactcaacagtctacaaaaccgcatcatgattcattaagccctgcacctgaacaaccgaaagttcagagcatttctgagtattagcaaccacacccttcagacagacattctgttgttgatactgaaattgcaaaatcttgcttcgctagtcaatctgcattgggctatggtcaaccaaccaatccatgccgagaattatgtcataacttcccagaggcagcaccttgaaattggattgaaaggagaaaccctgcacccaccaaaggcaatttgtcaactcccttgagcagtgcagtatacccccatccgcaatcctgacttgaatagcaggaacaacacgcagcttacagttcaacttgccagccagcttttcagacataaaactatgcgtgctgccagagttcactaacatgagaatttcttactgctgaataagtccttgcaatcgaagcgtacagacagatttcgtaccaatcatagcatcacgagaaatctgacagacttcgccttgaggttcagactcagacccaatgtcagtagttggttcaataatctcaggcataccatcagcagcagaatcagctaacaattccaaaagctcttccacaatatgcaactgaacagtaggtccacacttgtgatcgcgactccaccgttccccacatgtatggcataatccctttgctttgcgataagctctcagggcagctaccttatcttccactggcagtgtccgttcatcagctcggccaccaccaaatgtcttggaagcaaacgacggtgtagcagaacgggccgtagctcggtaactcgtcatagcctcctatcgagcagattccagtacttcctcctacaggcaagcgagatccacagcagtatccatgtccgtgggacggtgtaaaagaatagcaccatgaatatttgcccgcaacccatctatgaattgagtaaaaaaaacatggaatcccaagaggaatgatgagcgtgaaactggtgcattaactcattaaacctctccgcataactaagctaagcaccgaacatgtctgcttgagcctgttaaattgacgcactaagccctggaactcatctctcccaaattttgcacacactagctcagaaaactcactccaatccataaattcaacatgagcatttgtggattgaagccaagtcaaagcccccccccccccccccggaaaattgcaaagaagcaacacctacccacacttcagagcaaattccactcacacggaaataggtttcgcacttcattttccaggctctagggttctccccatcaaactgtggacaatctacccgagcgtttcctccgtgaaaccccgcagtaaaaccccgattcgaaccctctccaaattccagagaaaaacggtggggcaactgattagagcacgtacccttggccgggagagacgatggagaggactccttcccacacgccttcccccgtggaatcgaagcaacgcggtggcctaacggcccgtgaccttcgccacccacacttggagagacctcctcctccttgggagcggtatcccgaggccgagtcggtgtaggaagcagcgccggcaactccgatggcttgacggagagcaccggattacgggctatccgctccacttgttggcgcagatcccccatctcctcatgcagctctgtcaccgccttgtccatcgccggcttccaactcgctaactccaccaccaggggcttgatctcctccagcgatccaaccgaagtttgaatcgccgaattctgcttctgaatcgcagacatgacctccacaagttccgccaattgttgctccatctcctgggatttgagttgagctcgcgaatgatagcgtggtttctctagatactccaagattggtggctctgatacctaatgttacgatcgggctagagattttggggattttggaaggaagaggatgaacagagagcagaacgagagagaaatacttggagcaggggaaagagcagtagagacagagtttggtttcaagtttacagctcaaatattcgatatcctttcctctctccgcctgtgcttatatacacgcacggcatacagctggcctaagcccactccggcccagagactcggacattcggccttctctccctttgaggtcgtttcccagacttcacaggattattctcccttgccggttcagatacagtagcagcacccgtaacaccgcggcggtgcgggatgcggtggaggcggctgcagcggcgacagcgtgggatgcgaaggcagcggcagcgtgggaagagccgacgatctcggcgcgcacacactctctcgtcgccgtcgtcgagccggaacgagccgtgtcttctcgacagagctctgttcacgccggccacctcgccgggcgccggcctcgggcacagttgccaggcaggcggcaccgtctctttggcctgtgctacagcatcgccgccttggggttgcttacttgctgttgcttggttgcttgctgtttgaatgcttgccattgatgtgctattgttgattaatttcagctgtggcccaatgcaagccgattctctcggagctgaacgggaggatgaattagtctagcaggagtttgttagagatgcaaataagtcgtgaatcagttaatcgtgaccgagtctagcgctggcagtggcgcgggtgtgtgcatggagttcagagaaaagcggatcgtgggatggcgcgattttgcctcggattcctatttttttttgcgttgagtataagtagttctcttagctctttattctttttgtaaggtttacattcagttgaatgagaaaaacccagaaaaaattgccccatacattctcgcaagaattctttctctgaaacttctcctctgctctgtttgctgctctgttcgttgttgccgctgcagttcttgccgtgccgggcgtgaacagtctgccagcaaggtgtttgatcagagtttttttgctattgccaacaagtggtatcagagcactcaggttgagggctgatctgacaccatggcgttggttccggcgggagcgggagcggatccggcgagggggagctcggggagtgctttctcctacccacaactcacggcaacgaactacaccagctggtgcattcgggttcaggcgatgatggaggaccagggtgtctgggacgccatcgagccggtggccggggtggccgtcgacccaagaagggacaagaaggcgaggtcccatctgttgcagtccctgccggaggacttgctgatgcaggtggcgaagaagagatcggcgaaggaagtgtgggattgcttgaagacaaggttcgtgggcgcggaccgcgttcgcgaagcgcgcttgcagacgttgaagggtgaatttggtgccatggtgatggagccaggggaaactctggatcagtacgcgggccgcatcaccgcgatgagcgtgcgtcactcggcgttgggctcgacgctgggtgattccgcgatggtgaagaagctgttcgacacggtgccggaaaaattcgtcagcctcgtcgcaggtattgagcaattttatgacattgatactatgccatttgaggaggcagtgggtcgactgaaggcctacgaggagcgcatgcggaagaagaaggctgccgccggcggggtcaccaccgacgggcaggtgctcctcactcaagcggagtgggaagctcacttcaagaagaacggcggggaatcctcgccaccacagaagaacaaaccttcaggtgaaggtgctgggcgtggccagggcggtcgcggtcgcggcagaggccgtggcgcaggcggacgcggcgggacgccgcggggcgactcaggtgcaggctctggcggcggtggccgtgacaagagtcacatcaagtgcttcaattgcgaggagtacgggcactactctaaccaatgcccacatccgaagaagaagaagggagaagcacatcttgcacagacggaggacgccgggcctgccctgttgcttgcggtgacggaggatgtgccagagcgcgcgtcgtgcggcttggtcgtacgcgagcagcgcgtgtggcccaagctgctgctggcagacgctggtggacatgctggcgatgtctggttcctggacaacggggccagcaaccacatgaccggcgatcgaagcaaattccgggagctggacgagtcgatcaccggacgggtgaagttcggcgacgcttccacagtgcagatcaaggggaaggggtcgattcttttttcatgcaagaacggtgatcaatggctgctacaggacgtctactacatccccagtctgcaatgtaacatggtgagtttgggccaactaacagagaccgggcatcgcgtggtcatggatgaggatgtactcgaagtgttcgacaaaagtccatggcggctggtgatgaaggtgaggcgcactgtaaatcgtctttaccgaattgagttgaagctggcgcatcccgtgtccctgctgtccagcctcgacgacccggcttggctgtggcatgcgcggctgggacacgtaaattttcaagcaatgaaactgctggtggacaaggagatggcggggggtgttctggcaatcgtccacccgaatcagctgtgccaatcttgcctggtgacgaaacaggccagggcgccgttcccggcggcggcgcacttcagggcggaggagccgctcgagctgctgcacatagatctgtgcggcccgattacaccgagtacgatgtctggtaatcgctatttttttcttatagttgatgattattcccggtggatgtgggtgttcgtactcaagacgaaggatcaatcgctcgatgctttcgtaaagttcaagccactggccgagaacacggctgggcggcgcgtgaagacgttgcggtcagaccggggtggtgaattcctgtcaggcgagtttgcacaggtgtgcgaggaggcggggattcaatgtcacctgacagcgccgtactcgccccagcaaaacggggtggtggagaggcgcaaccgcacggtgatggccatggcacgctcactactgaaggggatgcgcgtaccgggcaggttttggggggaggcggtgcgtcacgcggtgcatctccttaaccggctcccgacgaaggcaatgggtgatcgtactccgttcgaggcatggacggggaggaagccacagctgggacatctcaaggtgttcggctgcacggcacacgcgaaaaacacgcagccgcacctcaagaagctggacgacaagagtgcaccgtacgtgtatctcggtgtggaggaagggagcaaggctcatcgtctgttcgatccgcgtcgtgggcgcatacatgtaagtcgtgacgttgtatttgaggaaaatgtaccttgggagtggacatcagctgcaggacaggagccaacggatttcgcgatggaggaggagcctggtgagcagctgccgagcccggcaacagcggccggcgtagtaccgtcgtaccaggcaccgtctcctggcaggcgcaccgggaaggaagcagtggtggcggcagaagaagtaccgtcaccggcaagcccggtggcagcatcaccgactctgcctggaacgcccacgcccggttctccatcgacaaactctgccggggtggtgccgtcaccgggcacagatgacaacatcgatacagatgatgggcctaggcggtatagatcgctggcagatgtcctgcgtgaggccccgcgtgtggatttggtggaggacgaatgtgatggagaggcgctcctagctgagtcagaagagccatcaagctatcgagaagctgccggccaacctgcgtgggaagaagcaatgcagagggagatggaggcaatcgagaagaacaaaacgtgggagttggccatgttgccagccgggcaccgagcgattgggctgaaatgggtgtataagctcaagaagaacacggcaggggagataatcaagcacaaggcatggttggttgcaaaaggatatgtgcagaaacaaggggtcgattttgaagaggtgtttgctccggtagcgaggcttgataccgttcgtgttgtgcttgcagtggcggctgatcgccgctggcaggttcatcatcttgatgtcaaatcggcattccttaatggtgaacttgaagaagaggtgtatgttgcacagccggaagggtttgctagatcaggaaaagagcatcttgtgctcaagctgcataaggcattgtatggactctggcaggcaccgcgagcctggaatatacgcctggacagaagcttgagggagctcggctttgatcggtgtacgcaggagcaggcagtatacacccgaggtagaggaagtgatggcataattgtcggcgtttacgttgatgatctcattgtcaccggagaaaatccctctgaattgaaggttttcaaggaacaaatgatgggggagtttgagatgagtgatctcggtttgctcacatattatctcgggatagaggttgatcaggatgagagtgctaccacattgaaacagactgcatatgccaagaaattactgtctcagtttgggatgatggagtgcaactcagtttcaattccaatcgatccgagatcgcagctgagcaaggatccagaaggtcacccggtggatgcaactgagtatcggcggatcatcggtagtcttcggtatttgcttcacacgaggccggatctgtcatatgctgtcggggtggcaagcaggttcatggagaggccaaccgtgatgcatttcaaggctgtgaagcaaattctcagatacatcaagggaacgatggattatggtctcgtgtatgctgcaggcactggggcactgaagattacagggtatactgacagtgacctcgccggggacttggatgatcggcgcaacactggtggaatggcgttctacatcaatcagagtctggtggcgtggagctcgcaaaagcagaaaactgtggcactatcgtcgtgtgaagccgagttcatggcagccacgacggcggcctgtcaagcgctctggttaagagtgttgctagcagaagtggcgggagtggaggagaaagcagtgaagctcttcgtcgacaataggttagcaattgcattgatgaagaacccggtgtttcatgggagaagtaagcatattgacacccgttatcacttcatacgggagtgtgtggatggcgggcaaattgttgtggagttcgtccggactgaggagcagcgggcggatgcactgacgaaaggattgccggcggcgaagctggcgacggcgagacaccttcttggtgttcgttcactagggccacggcagaattaagggggagattgttgattaatttcagctgtggcccaatgcaagccgattctctcggagctgaacgggaggatgaattagtctagcaggagtttgttagagatgcaaataagtcgcgaatcagttaatcgtgaccgagtctagcgctggcagtggcgcgggtgtgtgcatggagttcagagaaaagcggatcgtgggatggcgcgattttgcctcggattcctattttttttgcgttgagtataagtagttctcttagctctttattctttttgtaaggtttacattcagttgaatgagaaaaacccagaaaaaattgccccatacattctcgcaagaattctttctctgaaacttctcctctgctctgtttgctgctctgttcgttgttgccgctgcagttcttgccgtgccgggcgtgaacagtctgccagcaaggtgtttgatcggagtttttttgctattgccaacagctattgtgcttcattgcctgccaatcctcagcaacaatggatggcgtcgttgttcgagtagcgcattggggcggccctgggtagcatcccagtacggagggacgacgcgtcgtctaccgccaccgcgtcgcgcggctggaggagaacctgcgctgttgttgctgtacttgcacgacacaggcatcgcaatgtcgccgccacgctcacctcgcctcctcgacgccgccgggagtggaccgggttgtcccgcgtcccgtcctgccgccgcctccgcgtgccgcgccgccgtagccgcccgccgctcgacgacggagacgagagtgtgtgtgcgccgagatcgtcggctcttcccacgccgccgctgcatcccacgccgcagccgccgcctccaccgcatcccgcgccgccgcggcctcctcgtcccgcga

SEQ ID NO: 12007 - DNA, 6663 bp, Oryza sativa
ggtgagctccgaatgggttcggtgaactcgcctcccgccgccgcgtgggttggcgaggagcgccggatgggagccgggggagtggtggtggtggacgctgtcgacggcgtggggcgagcggggccggcgggggaatgggcgagcgcgggctgcggccgacgacggcgcgggccgaagggaggtgggcggcgactggaggtagagaagaaggtgagaagaggggctgacgggtggggccctttccacgctggcacgcacggtggcacgccacgttggcaaaagtggcaaatagttaagaaattacctctctccagtggcaaattattttatgcaaacctaagaggggtatttggataattggcaaacctaaaagtggcaaatagttaaattccctcgttttttgggcacaagtcgttttttttctgggacaaccgctcggtctcatgaatcagtttagtctgggacggagggagtagctagctagctatctaggctcgtggctgatgactatatatcaatgttttaaatagcagactaaggcatttagcggttagcttctcaaacaactatagcggctaaattatacatgagactatgagaacaaatagctaaaacccttctcaaacaactatagcggaagacagcggcagtttaactagatatttaaaactctgctatatatacgtactcgccatagtcagcgcggacgatatatagcacagctagcctatcatgggtagcaccggcgacgaacccatcatcatggccgggccagtgccgttcgtcgacgtcgtcgtcgacaatgccggcggcgccgtcgccaacaaggccgatccgggcgtcgtactgccgcaggaagaagagtacgagagcttcgtgtcgtcgctgccgagcaaccccaagctgcagctgctgcgctaccaggggaagtggctgctgcagtcgtgggtgcccgggatcatcgccatccagcgcggcggcttcgcgccgcgccgcggcggcggcgacgtcgtcctcgcgagcctccccaagtgcggcaccacgtggctcaaggccctcgcgttcgccaccatggcgcgccgcgcgcacccgcccgccggggatgagcagcacccgctcctccggctcaacccgcacgactgcgtcccgtcgatggagaagctgttcgccgctgggttggggagcaagatcatggacgcgctgccgtcgccgaggctcatggcgacgcacgtgcaccactcgcttctccccgcctccatcaccgataaccctcactgtaaaatcatctatatatgcaggtgaatcatctttttattatgaacatccaatataagtatttgctttttatgtccttttaatctagtaaaaaatagtgattttttttaaatttttttaaaaaactaccattaacttgttattatcatacattaattgttgcatgtatttgttagtgacatgtggaccttttagtcctacactattattttttcttcctttaaaaataaagagttggtggaagtggttgacatgtgagttctctagccccacatctttaaaaggtacagagttggtggaaatggttgacatatgagttttctagccccacatgttattgttcctctaaaagaaagttaggagttggtagtggggttggtgggagaacaaccaccaccactactcccttttataaatagtatagataaattatgcttaaaatatttttaatgatcaaacaagttattaaaataaattatacgtagtatttttttaataaaataaaaggtcaaacaacccatgtccatatatctacaacgctacgtataaaactaaagttagtatttgtattcttataacaaccaccaccaagtaatacaacatcctctaaatatatatatatatatatatatatatatatatatatatatatatatatatatatggttctatgtatcaaattaaacgacagggatccaaaggacatgatagtttccctgtggcacttcgtgagaagaaggctaccggagatcccattcctcgaactgttcgagtctgcttgcgagggcagatgcttgagcagcccaatctgggaccatatcctcggctactggaatgcgagcaagacgaggccagagacggtgttgttcctgaggtacgaagagctgctacatgacccggctgatagcgtcaggaagctggctcggttcgtcgggcagccattctcgcccgaggaggaggaagccagcgacgtggaagacattgtgaggctctgcagtttcgagcagatgaagaacctggaggtgaacagggcagctggcctgtctcctgcgctccagcaaaacgcctacaccaatgggtccttcttcaggaaagggggcacaggagattgggcaaatcatatgacaccagagatggctgaacgcgcggctagacgccatcgtagaagagaagctccgttgatcaggcctctctttctcatgatctcggcatgctagtttatgactcgtaaataaagattatgccatctactaaggaatcatgtaaaaataaaatgcccgttgtgcagtcactagctatatttgttaatctcgtatgtactgtctaaatactccatgttatatatgttgtttatctagctatgttatgttgttctcagttattatccatgtggtcataaataatcgatgcatatctttatccaatagctacctttatctcacatgctagaaaaaaatattgacattaaatgtagtactaaaatattactccgtagactttttaagatacagttcaccattttatcttattaaaaaaaattatgtaattatcatttattttgttgtgacttgattatcgtcaaatattctttgaatatgacataaaatttgtttatatttgaaaaaaatgaataagacgaatagtcaattatttatcaaaaagtcaacggtgttatatattaaaacacagaggtaatactatcttttattggacaatgccttgattacataatgaaaatgtattattgcgccttaatttgtgatgaagtacgtgtgggactgctacacacataattaagtctatagcaccaacaagtgacgatcaactgatgggagatttcaatccttatcatatgccctacggtgtagccgtgggatagttgtgtacacacttacgaggtcaaaaagatgtgcatacagcccaaaaaagaaaagaaaatatgtgcatactaaagaaagagaatagatgaataaaaagaccatgttcagattatcagtcgcgtggcagtggggattactgctgaagtgctgatgcagtagcagtggctgacatgtggctgacatgtgaactgcgtagaatttgcatccattgtgtggtgtgcgcagtgcgtggcctccttttgtaccacaaaacagtgacacaggtggctacagcccacgtgaaagctctccggggacttttgccgaccagccgctgccactgcagaaacggagcctgggagggtgcacggtgagaggagcgaaaacggcgtgttgcgtagagaaagggatagagtagggagagatggaggaagaagatggagacttagtaggtccccatctttttttttcttgactacgataaaacgtaggcgccatgctggataaagacctagtctacatgtcacgcagtgacgtaggataaaaccgctgttcaaactacttgaggaggtaaactgattcggttttcatagtcgagggatccttcatgcctggtctgcaacagttgaggtaggaaaagtaaacttattctttgtcaaattggggtggtaagggctgttttttttttttggacccaggtgccttggaacccactccagcccattgggctccgccccaaatgggtagaaaacttacattgtccgatcagataaacataaaacgtgtgatgttttcacagaagaacttttaccatcatctacacactgctctcgacgccaataccacagccatcaccgaaggtgccacccgtggcgaggcttctgttctctacttgaaggacgctcaatctacaaaaatttctaagcgtctctaatataataatttatccagtgtcacaactaacttatccctgattctcatcttccggctcacctaatcattatagatttattgcatcttgaacgactggctactaaaaagcgatttttcatagcgttgctctagaaaatttcaaggcggagctcataagtgtccgcaagcgaaaatagtgttttcgatggcggtacgtaaaaaggaccgctgtacaaaattttttaggctaattaataaaatccaccgcgcgcccccacaccgtgcctctctccctcttctcccttggtctctccgcctatctcccaaaatccctcttcctctctctctccattcggtgggcggcggcacggggaggaggtggcttggcggcggcgcggggtggcagcgtggtggaggaagaggatgatgcgggcagcggatccagcgacgggccacacggcggcgttcggaggtggatttagcggcggatccgccgccgcctagtcccagctctctctccccctctcctctctcctccccttcccctgtcaccatcaccccctctccctctctcagatttagcgcgcggaccacggtgaaggctgtggcggggctttgtagcggcggtggcgaggcggaggccggcagggctcggtagcggcatcgtcgcggtggaggctgcggtggggctcgacaacggcggcgtcgaggaggaggcggtggttcttgttggccacttcaaggacgacgccgacaatctcgagtgcgacaacgccgacgacgatggttctcgtctattctgttgctgttaatgtgttgaattgttgatatttgtgatgctccgtatttagattgatgcttgaatgatgttcaattttttttaatatggatgcttgaatgctctattaatatccattttcaaatttttgttaacggaaaattgtgattgtgaatggaaattttttactggaaattattgatgtaaatttctgtggatttgtggatcgagcgttgacagagacggatggagcggtgtcgctccgtcattttttttaaccttggccaatattaacactggcagctggtatagtgcaccgcctgtgaaaataaattttcatgggtggctatcttaagaaaaccgcgagagaaaatgaattggcgctggcggccggctaccgccaacgaaaatactatattattattggcctttagacactgacagtgccgtaggccgccagcaaaaatagaaaattttttctagtagtgactattaatcaatgatttctttaatatttagttacgtattgattaattacttattatattaatagttacatgacctatcagccaatcaattgcttagttgtactattaatttcgtaattcttatcaattacttagttttggtagatgatctttaaattactgttaatatctttttactgttttgcccttcacactttgacgtggcaatgatgcaaataacctacttaaccttccactaaatctttaaattaataccctagctactccagcccacatatcaagtagtactaccttctaattggtactttgtgtttcaaatcgttagattgaccggaatcaatggatctcgttattttcaatcacaatagatcaagtctctagctatctataaatctcatatgtactgtctgatgattaattatgaccagtactgttattgtttatctgttgctttcagttatcatgcatgtggtcataaataaaacaatgcacatctttatccaatatagctacattttccaaatatcgcacgtgtcattaaaaaattattgacatttaatgtaatgctaaaatagacaagccttgcatatttcgagagatagaccgatttagaccaaattcttttcttcactttcctagctcaactatctcgttttctgcgtgcatgcttttcgaatcactaaatgcatggtacattttttttaaaaaaatttctattcgaaagttgttttaaaaaattatactaatatatttttaagttatttatagctaatacttaaattaattatacattaataaaggcaaaatctaattcgcgcgcgctctctgttttgccctatcgcgcgacatgttcatcggccgtccgatcccacgagcgctggtgcgtccgtacatggcctggtgatccacggacgtgagatgaatccaaattagaagccatgtgatgctctacactacgccggcttcaaaaataattttctcttaaactaatcatccgatatacgatccgattacaccgttgtattcgtaagaattgaatctttataataagatctcacatgattatattttgatgaaattataaattacttttataatatatctaaattacttttagatttcactaaattacttcttagacccataaaagtatattcaataaagtctaaaagtaatttacacacacacacacacacacacacacacatatatatatatatatatatatattatagaagtaacttagaaaaaaagaaagtaactttatcacgatattaaaagtaaatccgttacggaggtaaaaacatgagtctatatagaaattaatttaatcagcacaaaggggtgcagg

SEQ ID NO: 12008 - DNA, 1732 bp, Oryza sativa
atactcaagcttcgctcactcacttgcagtgtcagtgttgctgattaagctatccaagggtatatatattattagattgttaattgattaagaaatggaagggctgataccattggtgtacaaggccatagtggagtacaggaacaaggcaagcagcaggcaggtcactctgagaagcttcttcttcgtcaccgtcgtcgacgaccagctgcacggcggcgactccggccggtggtgctacgcgccgtcgccgccggcgagtgccgcccaccagctggtgtcgccgctgctgcgatcggcgccgcgtcgccaccgtgcaggttgattaaatttaggtggtcaaatgctcaatcaacaagaggttagttagcctgcatatcatatcatatcatatcatgatcatcatagtgcgtataaataagatcaataacatggaagattgaacttagaatcattcttcctgatatatattcaatgaaatttcgtactgtctaagtgccggtttgtttcgtttttttttttaaaaaaaaagaaataacatggaagaatgcatgtgaggtgtgcatggtccagatctccaaagggagtagtagcaccagccacctgcaggagcaaagcaagcttcagaatctgcatgatccagtgtgtgtttgtgtgtgctggaacagcactagctagcttaattagagtgatggaatgaacatgatgctttggtggtatattgcacatatgtacaaaggaataaggatgtgcttgtactgtgtaaattgatctagcaaatttgtgcatgatgtcatatatactgtgaataaatgaaatgtttatgtatctggactctgggattcttccatttcttaaaagagcatttcaagatcctctgttcttttgaaagaaaaaaaatgattatattacatttttattatgcagaggacgaggtttaattaatccttcgttatactacctctatttttaaatatatagtgttgtgttgacattttgatacgatgtttggttattcatatagcttattttattattaaaagcactttaagcattcagtttttcatgcttgtactaaatttttaagtaagataaatgatcaaacatcgtgttcaaagaatctcatatattttaaaaaaggaaggagtatactccatccaggtaaaaataactctttttgaattttttatttgaggcgaaactttcaaagtttgactatcaacatatccttttatatccttttagtttgaaaacataaaagatatagacttacaagtattttcgtaatctcataagattattagattttatgagtttattccaaaaaagtcatgattaaatttgcacctaaaaatagtaaaagaaaactaacgtcatttaattatttttgaacgcagagaatatactttatatggagagcaataggttgtgttgagctaaataattaatgataaagctaacttttttacagaaaatgatcgagctaagttgattagaagggtaattttatcatcctttagaaagtgcagggaaataccatattttaaagtataaaatttcatacctttacgtgctaggtatctcgaggtaccaaatcttttagtgtaaaatttaggtatctcatgtattttcttaagtactgtaaaatttctaattagaaagtctgatttgtgattcaaatggacctctgcaaaactctggagtattttcttaaggagcgatatcaaaacgg

SEQ ID NO: 12009 - DNA, 8347 bp, Oryza sativa
taatagttagcaatgaacgcttctattaaacttgttgtgatatttccgagaaactcatgtatcctaggtactcctccattctcaagtacacttcactactaatcaaaacaatttttaactttgactattactcaattttaatgatccgtctattctaaaaataaaagattttaaccggatgtgacacatcataatattacaaatttaaactggttttatatcttgagatggagggaatatatgttccgggtgacacatttaatcaagtctcatctatccatgacttcagggtttggatgtaaatgtcgggtttaatttattttctgtgaaaaaagactccagggaaaacagaacttacggtttatagcagtccatcgagaaattttgattgcgattctatatatttaattacgggttcagtggacatttacttaaaatactggatttggatctgatctgtcgtagatccagagaaatagcattgtccatactggcaggtgagacaagggtagcatcgccaaccatgtgcctttgttattgccaacacggcctaccatggtcttcaccaaatggatctacttaagaattagtatgctttaagataggaattgcatcaagctttctgctttttcccatttctcaacaaaattttcaagtcttactgaaaataaacaaattattatgagggtttgaatcaaagggcctgtttagatcccctggcaaaattttgcaccatgtcacatcgaatgtttggacacatacatagagtattaaatataaataaaaaaaataactaattacacagattgcgtgtaaatcgcgagacgaatcttttaagcctaattacgccatgatttgacaatgtggtgctacagtaaacattgttgatgacggattaattaggttcaataaattcgtctcgcagtttacaggcagaatctgtaatttgttttgttattagactacgtttaatacttcaaatgtgtgtccgtatatccgatgtgacacgccaaaactttacacccctgtatctaagcacagccaaagacttgttttgaaacctttacagatacaggtagctctactgtaaatctgccacagtcaacattcaacaatattttgcatgggtggcttgagaagaaacagaaagggaagcagagaaaggcaacagaacacctgaaacctgctggaagatctgtttcccagctgcacagcctttacagatcatggagaccaggagatgcagttgcatcagatgaaacaacagcaaaagggaaaagtgacaaaaaggcagcaagttggatggagcagttagccagttactagctgggagacagcagcaaatgctttgggagagaatgcaagatatggagtataaacatgaatgcataaatcaagcagaaatcatgcaagatattgagactaccattttccttctgtaacaatgctgacttctgaattcagctggggagatgaaattggctgggctaacattcagcagaatattgtacattttgatggatgctatgatgcattagcaatccttcccgttcttttttatttgtacgtttagaatccatgctgccaatactgactataacagaaaaaaaatattgttatactgtaattctgtcagcacatactagcataaaaatttagaagacaattggtcagagttatttctcttaaataccaataacataaagtgaaaggagaagacgagagaaacaaacagtaagaaagtcccactacttcacatttttatcatgcatgatgcccatgaaaagctggtatgatttcacaatactaagtcaaaattagcatatgcttcattttattcaccatgtcaagcagaagcttatgaataagattgacaattttacaatgcaacgagaatcatcgctttttactgttttatgtttcaactcgctgcaaaacaatcacaaaatcacagcccgtgctttttagtaacttagtaaacctccacgtgccattgtttgttctttttgagctgcgacagcttctgctcccaactctcacctctttgctcagctactctcttgagtgtgtcctggatccctggcatcatacccttcaaaccacaaaagtagatatgtgcaccgccatccaaaagtttaaaaatttcatcgctgtactcttcaatcttgtcctgcacatacatctttccaccattcttattcttctgttccctacttagtgctttatcatacctgcaaagtcaatgaaattcaggttagttcacaaaagaatcagtcagctactcaccttttaacttcagtcaggcatcaaatacaaccagatcaatcaacgcaaagctagactacatctttctcaaccatgtcactgaaatactggatagaccaagacaagatgttaagcaaaaagcataaaagggtccacgaacctgaaattgtctggatactgctgaaggtagtttgtgaactcttcatcatacagaaggctatcagtgttagcaacacctagaaatagccaagccagaccaccaaacttgaaacttgggacatcctccatgaacatacgacgtagatagccacggtagggagcaacaccagtgccagtagcaatcatgatatgggttgcatttggatcatcctcaggtagaagcatgattttgcctgaggggcctgcatgtgaagagtaacttcagtgataagcttgaggctggaataccacatgcaagccataagttacaaaacaagtcataataatattgaaagacatctcttcttcagattgttttctccaacaaccacatctttcagaaagcttataagctaatattttctccagccacatctttcagaaagcttataagctaatatgccctctatacatacccatccaaaagatttcagaaaaaaacattgcatcacagatgtgaacttcagataagaaaaaaaggttaaaagcctaaattttcagttaggggctattgtttatcgttggaacatataagaatgatatttatatgccatctgaaaggagcacgatacctgttatctgaactttgtcgcctggtttagagtcgcataggaaattactgcagatacctttctttgtggggtcttcttttccagtttcaggatcataataaacagcacgacgaacacacaaactggcagtctttccatcaaaagaatcaccgtacctagtagatgcaatagaatagagccggacagtatttggggaaccaggtttcttcgggttctctccctggtggaaaattaacatgaagattaaaagggaaaaggagaattcaggatgaatggatgcagcatgatacaggaaagcaagcttggtacttggtattgttaaggaatataggtgccaattaaatttgggtcgttcttttagaactgtttaagaagaaaggtatacagtacatatttcatatctcttgctaagagaaaatgagtaggattaccatcagtttttacagtgcctacatatttcatacctctatcttttatctacagcaatgatggacccaatggcaaattatttgataataagcaagaggttgaaattccaggaaagcgtataataaactttcacttctagacaagatgatgacaaacctaaacaaaaccaaaacttaaaaaatattgcattatgttgagcaagaacaagtccaaattacttactggaggaatgacaccataactttgtccttcccagtatggaacattgccaccatgatcaataacaatatggcatgtttcaccaggagctttagggcctacaagcctttcgactgagacaattgtggctgtgtaaggctcctttggtttgtataagttaaggggtggctccttcgcattatccaattccagaggttttacagcaactttgcttttgcttgcttgttgaacggacatggaaaagatcttgttcatatgccttgattttagggccttgctttcccatgctaatgtggttccaatccatgatttgttgcagaagttaacagtattgctaccctgaacataacaagtcttttgttaaatacaggattaccagtataaccacattgcaacaactataaaaattctcatggaagcaaaataagagagtccacactcaaccaagaacaatgcaactatatgtgttgctacaatgtcctcatcctccatttctcacatgataaatcctatactttcctaggcaggttttggaaaaggaagagtgcatgccagacaacaatttgtttgttgtagcaattctcaaaataaattcgtgcacatagcacatggttcccattcaaggactgatgtaccagtttttggcagtaactgacccaacaccaggtaggagatattgatgccaaactccaagcaggcaggaaggtggcagcttagctaatctaagacaggccaagtgcccatatagccagtcttcagggcgacataaaactcatctagaattgatatttcaccacataaatcatcacaatacaattaatttatttatacttgcagagtatactgtgaatgtgccatttcaagagccactgctgctggacagaatctgtgcgagactgatttccacatgctagaaagtactacacgcgaaacaaaaactagctgcaaaccccccaaatttataggagcacaatttgaaacttatcccttccagcaactaattttctacagtgccagaccagatcgaaccacgagattcctcaacgagagcccctaaaacgcaatctctagaggcagaaatcagtcacaagattcacccccacgcaccttgctcgaggaactcctcccgtagccgcccgcaccgatgggcgccgcgacagacgcctgcaggacaccacagaaagcgaaagttagcgccacaggatgcaggaaaagccgggaatcgtgcggcgggagcggcagcgtacctgagccccgagggcggaggccatcgccggtggatcgcgaggaagaggaggaggaggaggggttggctagggttttgatctctggaattgacgcgaagctgaggagagggaaagggacggatatgtttggcacctcggagaagagaagagagcaagcgaagatgagacggattccaattttccttttccaaattagtaggagtatcaaattaaagaaaacgattatccaacttgctttgagcatgtgacaaaaaaactttctttttttttccttcctaaagaatgtctaatgcatgctgctaataattttgcaaatagaaattaagaggtactaagtaaatatatactatttcatactaacaagtattctctccgtcccaaatacgtcgctattcatagtgttagaaagaaataactatgttttggaatggaatggtagacaaaacatgtgataggctgatagcttacatatgcatacatcatagtcgagttcaatggtcttcattcttaaacatgtgctgaaacttttttccaagcaaacaaacatgtgcgaagcaaatggaagcaagagtgcaagactcgaagcaaacatttgcaaatcaaatgggagggaagtaacccctgtaagaatttcaaagcacatgaccatgacctctggaaaaattcagtcaaatatagttatacaagtacaaccatcatcacaccttcaagcaatggtttcttactgggccttggtgtgggctgtttgatgctgggcaatgggcatagtttgctaggctttgcaaattatatatcctttgtgaggccactcaattgatggctgacatatgcttcagtttggaatgaaatcatctcaaatcttacatgaacgttctgctcattgcttctcggataatcaatttataaaattaactctaggcaacggatcacacattcacacatccttaatgctgatcttttaattgttttactggagaggaggttagcgattgtcccttctaaaacattttttttatcaaaaatcacatgagctaatggcatcttcgtaattattttcagaattagaggtatggccaaaccaagatcccttccattaaaggacggagagaacaaaataaaatatatcacttttgtaggcctgtaacaataatatagaacaaaagtctcagcatgtgaatatcacttaaggcttttcaaccttataacattactattaattatagagagctctacagtctatatatattaagggtaagtcaagatgtataagggaattaagaagctaacaaaacaagccacctcttcatcatagtatgcttgaacacaacgttggttcatctgaatttcatctaatttgaattttgccgggtccacctaatttgaatttgaatcaccacattggtttttgcttgaacatatggagcattttgaactgcctgaacttttgtggttgctctttgtttcgtttgaccaaagtgccatgcacaatgtataatcgagctaggagtaaaaggaaaaagaaatgtcagggtttatcagtacttaaaatgaaataaataaacaatacttacgttttaatgtgcaatatattaataagtatatatgttaaatattataaaataatagattgatttgttaaaatattatgaaagtgatgtgagaaataatgattgaatatacttgtatgttgatttgtagaattaaaaaaaatataaatgatgttacatgcttgtatgaggttaattatgtaattattgctagtagatgataatgtgctatggttgtatgttgagctttaaagttagtgattataactttataggaagcataaatactctgcacagaggttgcgccacagctgcagtagagtagccaaacatgtttgtcctggtatataataatctatcaaaataaatggtcttcatttgcagtaatataacttttttatcgaggttgcaatagtgtaatcgtctattcccttgtaggatttttttaaagttctactccatccgtttcaggttataagattttatagcattgtccacattcatatagatattaatgaatatatgtctagattcattaacatatatatgaaagtggactatgaaacggaggaagtatcataataagggtgtgtttagctcgcgaaaagaaaatttttgggtgtcacatcggaagtttgacaggatgtcggaaggagttttcgaacacgaatgaaaaaactaatttcataacacgccttaaaaccatgagacgaatttattaagcctaattaatccgtcattagcacatatatgttactgtagcacttatggctaatcatggactaattaggcttaaaagattcgtctcgtgatttccatgcaaactgtgtaattagttttcttttatctatattaaatgctccatacatatgcctaaagattagatgtgacgtttttggaaaaaaaattgagaactaaacaaggcctaagtcaaaacatttttaactttaaccgaatctatggcattcaaatatttaccgtaacaaacatatccattgtcgatacatattctatggaggatttaacgaaaccaagtttaatattgttataagttagtagatagttttgatttctaatgaaattaaagcgattggatatactgcaatggaggggtaattttaacttgtaataaaattaaagtgatttacaatatatagaatgaattaaggggagtagttaaatacctcggtggcacgggacacgagggtacgtgatgttgttaactggacgaggaaggcgatggggaaagatgggaggccagtttactaaacgcgaagcgctcggccatgttgccgttcgatcgatcgacctgtggtgaatttggatggaaaggggcagcttggctcttcttatgaaggaagggatcgatcacctattgaaccacacgaaatatattgaagctgaatacggaaccatattaggataaagatatgtatttgtgatccgttttctgagcagaaagcgtcccaattcccaaatctgcatgcctaaacaaccctttgctatcagataatcaaaactgattaagagaaaaccacctttcaccattgggtcctaatattctttctaactttgtaaggtactccctcctcggttattttttttactagaaaaaaagcacgtgcgttacaacgggtgaagtctattttaatcttattattgttgtattgtttagttaagatgaaattcactatgggagttcgtttggatacggagtatttagaaaatcatgagttgcagttaggagtccgatcgtctcaagttagcatgcgagttttcttaaatatatttcttatatgattccttctgtattatcaaaagtgaatgaccttaaaaaccgattcaaatacggatacatattttgaaaagc

SEQ ID NO: 12010 - DNA, 8104 bp, Oryza sativa
  unsure (1)..(8104): unsure at all n locations
tagattaaaaccaaaatataaaattaaaatcaactcaaacgcggatgacgaaccaaaatagattaaaaccaaaacataaaattaaaacctacttaaatacgaatgacgaaccgtggaaacatcttcgatttttataaccgactcaaagacagatgacggaccgcgaaaacatctttattttttttaagtagtaaagaagagatagagattccttttcccctctatttggaatattgtatcagcgacacataacacatatatgcatgcaagcatcacaaaatcgaagctgaataccgaactagggaaacagattagttgctactccctccgtttcacaatgtaagtcattctagtatttttcacatttatattgatgttatctatctagatttattaacatcaatatgaatatggaaaatactagaatgatttatactgtgaaacagataaggaagtagtaatatatgtctagcaacatacgcgctgcgcgactgcaaaggtatcggccatgagctgcacactcgtcggcttcaccgccttcgccactggcccattgccgtcaccaaccgcaaccgtggcgccggcgaggccgtctccggccgcgggtacagggagcaccgtctcggggactaatcgacgtggctgcagcgccacgtggggagcagcaagaactgggacaagattaggagctgcctcgccgacgccgtcatgtgcaggagcctgcaggacggcaacttgacgtgcgcgtagacgcgtagtttgtcgccgactttcaaataatttcggccaaaattttttgaaatttcggtcaccccggcataaaatccaatttcgaaattgaaaaccctggtcgccgacgacctgtccccgatccagtccggctgctgcaaggcgtccacgatcgagttgcaacttcacatactttcgagttgcaagtacgtaccagctacaactttcacgtacgacgacgtacgctgagtgctgatgaacaaagcagccaacaaataaatttagaccaacaaattcatagtacatcctaaattttttgtgaaatactccctccgtcttacaatataagggattttcaatttttgcttgcaacgtttgatcactcgtcttatttaattttttttgcaaatataaaaaacaaaaagttgtgcttaaagtactgtggataataaagtaagtcacaaataaaataattaataatttcaaaattttttgaataagacgagtgggcaaacgttgcaagtaaaaactcaaaatcccttatattatgggacggagggagtatttggtatagcggtgcccacccggcacaccctttgggtccacccctgactgtgactgcatgcttacgtccatggcgctgacaatccagtcccgcatgtgatttacgagaccgcatatgctatggagcaggctactagtatactcctcttgctcagatacgcctgcagtggaagcagccggaggcaggcacggtggacgacgaggagaggggcggctgccgccgctggtaggcccaaggggcgggagtggaggaggccgcgccatccttatctccgccggcgagaaaggagggaggagaggagagagagatgaagacaggagatgggagagaggaggaagaagaggaggggattgaggatggcatgtggggtccacgtgggctccactatttaatattactatgtgtaaaactgacatgtgggtcccatgggttctattattttttcggatcgaattgctatgtaagcgccacgttaatgccacgttagatgaagactaagtcaaattagccacgtaggcgtcacgtcagctaaaaccgccatccaaaccatcatgagcctatattacatcggtcttgacagttgatggacatattatatctggttttttgttgaaggatgaaaatcggattcgttgacaagttaagaacctcagatgcacttattccccatgagaaaccatccaaaatcttatgaacaaggagctgtacatgtgttgtatactaactaaaggggaaaaaaaaggtaattaagctagactcgaggtgagcgacatactgtacttggctatcaaggataggactgatagcgacatacacgtgttgtttctggttcggtttcccactctcatacgctttcaagtacaattattgtagccatataatgcgtgtatcatagtagtatgtcacgagctaatagttactatacgcaaaacaaatgcttagctgtcgagaatatgtcacaggttccattcaccgattaatttctctgtcggcttgattgtgatgccctcattgaattgacttgccactaattactgctccgtctgatcttaaatagtactctcttcgttcctaaatacagggcgtaacttcttttcaactgggttccataatacaaggcggcagcttctcggtgcatgcaggaattgatgagtaatcctcggctcctgtactggtgcatgcagaattaactgatgactcggtttggcttttaaatgcatctgcatgcatgctggctattcgcgcggaaagtgcaggtcgagcgcacgctgcatgcatggtggttaatgctagcgtatctactgcgcaacaaccgaaacgtcgctcttcgaacggagagaattaatcagcataactgctatttaaacggttttattggtctttgcaactacaacagtcacgccctatattatattaagaaacggagggagtagtacatgatcaactcagtcaaaatattagttttatattaagacaagtttataagatctaataaacgtgtatcagtgcaaatttgtgtatacttatatttttttataaattaagcatttgagaaattattgaccgagtattaccgtaaacataagatccaagaaatactttagttgcagaagctagctttacaaattttaacagtttgaccttttgtaaaaactaattttataaataaatcacgacaaaaacttatttcataaatgatccttttgttcagcgtcaaatcgtatagcactgaacttagaaacctcagcgccacgtcaactggtgttaaatgccatgctactgcggatgggagactgagttggcgtgccgacgtgcattcagcgccgtgctatttggcgctgaggtgtctaagttcagcaccatacgatttagcgctgaacaaaagggtcatttttaaaataagttttggccacgattcatttataaaattagtttctgtaaagggtcaaattgtcaaaatttgtgagctagcttggcttcactatcatcgagaaacgataagtctaatgtgtactccctctagtcgtagatatatttgacacttctaatcaaacttttgaaattctgattataaaaaggtttcttaaatgacaaaaactggtctcaatatgtagagatttgtctaaaaaaatattatactaataacatagatattaaagcttattgaattttatgaacttaaattaatataaattgattgctagaatttgaaaagtttaaacaaattttatcctagatgtcaaatatattttcaccgaaaggatagcaaattttacagtggtcttcataaaatcgtcaatttgaggaaatctataacttgtggaggagcgcgggaaagctattttgccatttgaccttgtgatatatatttttaaataaatccaagatagtctatatatggtactcctatatcacgctacataaatatacaaactaaatttgacttgtataaataaaaaaacaacaaattgaactttgcatgatagtactagattttcaccatagtactagctagatttaacacaaatgttcgtatttagaactaattattatttcaatagtaggcaatatactcgtcaacagcgagatgtctgtaatgaatttattaatttcaatatatactagctcaattttttcaagatactcatagcagaaggatgtatgtgtgggttcataggaatgagtgcacacgtgtcattagcacttatgtttgtaccgcatttctaaataaaaaaacattgcacagtatgtaatatctacccgacgggttggaatttatttcaaataagtccttcttcaaaataattttataaataactcatcggtactaatgacattggcaccatcaccttcgtataagtgaattagctttttcggagacgctgagccaatggcgttggcgcagcgaaaggatccaatcacggaataaacttgtttagggccttgcttgctaaataagttttcacaagggacccaaagtgaaaaatccagtcgtagaagtcgcttcccgtggcaatatatatagtctgatggatgagacgcgaaagaagactgaagacaacgatatcacttcgtcaccttgcctatttccgcaagaacgatcgcacgatgccgtcgtcgccatcgcacccgcacgtcgccgtggtggctttccccttcagctcccacgcccccaagctcctcgccgtcgcgcgcgccctcgccacggcggcgccctccgccaccttctccttcctctccaccgccgactccctcgcgcgcctccccgccaccgccgtcgtccccgccgggaacaacaacctgcggttcgtggaggtgcccacggatggtgatcaggaggagacgtggccggtgtggcgccggatggagatgttcgtcgaggctgcggagggtggcgggctcaggcgggcgatggaggcggccggcgacgcggctggcggggtggcggtgagctgcgtggtcggggacgcgttcatgtccatggccgccgaggttggggtgccctgggtcgccgtctggacgggtggcccgtgcgcgctcctggcgcacatcgtcggcgacgcgatccgggaggacatcggtgacgacgacgacctccacggtgctcgcggcgacgagctgctcacctcctaccctggcctcgggagntaccgcgtccgcgacctccccttcggcggcggcggcgtcggcggcgacatgcaccgcgtcatgaccatgctcctcggccgcgtggcgcggcggntgccacgcgccgccaccgccgtcgcgatcaacgcgttcccgggcctcttcccgccggacgtctccgccgccctcgccgacgcgctccccaactgcctccccatcggcccctaccacctcctccccggcgccgccgccacgcaagccaacgacgacgaccccccggctgcctcgcgtggctcgcgcgccgccccgcgggctccgtcgcgtacgtcagcttcggcacggtcgccgcgccgccgccggacgagctccgcgagctggccgcggggctcgaggccagcggcgcgccattcctctggtcactccgggaggactcgtggccgctgctcccgccggagttcctcgaccgcgccaccaaggccggcgactccgccgccgggctcgtggtggcgtggacgccgcaggccgccgtgctgcgccacccggcggtgggcgcgttcgtgacgcactccggctggggagccgtcctggaggcgatgtccggcggcgtgcccatggcgtgccggccattcttcggtgaccagcacatgaacgcacgcgccgtggcgcgcctgtggtgcttcggcatggcgttcgacgacgacaacgacggcggcggcaagccgtcgatgatgacgcgcggccgcgtggcagaggcggtggcgtcgctgctcgccggagaggaggaaggggcccggatgatgagggctagagcacgggagcttcaggccatggtggtctcggcgttcgagcccgacggtggatcgacgaaaaacttgcacaaatttgtcgaaattgtttgtgcccgtcgggtgtgatcgatacatgcatggcatcgatttttagaacttcagaagaaattaaaaattttagaacgataagctacaataatgttatatatcaccttaacctatataacaatatcatcttcttcctccatttcagattataaaatgttttgattttgatcaaagtcaaactactttaagtttgactaattctatagaaaaaagttgtaatatttttaacctaaaaaaatatatttgaaaatttatttaattatagatttaacgaaactatgttggtgttataaatattactactttattctacgtagtaagttattctacgtagttagtcaaagttaaagtagtatgactttgaccaaagtcgaaacgtcttataaccttaaaaaattaaaatattttactatatttatgaaaaatatttttaagacttgacatgtaggagatgtaagatttgagcgcacgcgcgctcactcaagttttataaacagacttttcattacaccacgacacaaaatccctaatagaagatcagtcggcaaagtacacattcaaagcacaatgtcggttgggaaaaaaatttcatgatagacttcaatattatatttctagatatggatacagtctccaatatttctcgtgttgattatattatatttataaacctataaatgaatttatacgtgtaatttgaggaatttactagccatttgcgtttctagagaaaaagaaaaggtagaggttgccatacgaggtatatatagaggaaagagtgtttgtcgtcggacggaaattaaaactactaggaggaaatgatcaattatattattttaattaattactgaatcattttttagtacatttaaacgactaataaccatgtgtcacttttgcaaatcgtcatgggaaatattatctatgcaacctacattttataatcggagaggctatcatttaattttaatttgttgaacaataggggtggataacataccaacggctcgtttgagcttatctatactttctataaaattataacccactaagtctaaagcttaacatgcaaccatgccacatcatcatccactagcaataattaggctgtgtttaattccacgccaaaattagaagtttgactaaaattgaaagtttaaagaaaaaagttagaagtttatgtgtgtaggaaagtttcgatgtgatggaaaaattggaagtttgaagaaaaagttgggactaaacaaggccttactttttttttacgaattacacagcacaacgcggacacactcacccctatgaacgcacgcaagcaaactttacccatatgacaaagtcatcataggcgcctcgttgtcgacgggtatgtcgccttctaccgaaagcacaatgccgttaaatccttgaaaattcgtttccagggggagtcgaacctaggacctaaggtgctactgaggctctagtaaccactaggctataggtcctttcgcaataactatttatttaacttcatgcaagcatgcaatatatatcatctacaatctatttaattgtataaatcaagatgcaagtatatccaattatcacccctcacatcatttacataatatttgcacagatctatctatcatttttataatatttaacattatccctaaaaatttatttcacattaaaacaggggtgtcatttatttgtttcatgataaatattgataagttttaacgtttcattatctttttttactcatagcttgattgtcgaaaaaatatattaaaaatcgtttagttattctagcagcaaagcctagctcattaattcatttatcttaatgagaagcctagctgcttggctcacgttagctcattaattcatttataccacctttataattttaaatttgctatgttataaaaatagtacatgatgaactcactcattaatacttttatactacctttatatactcctatatatacgtaataataaacactaactaaataaatagaaatagtttgataaaaataaagaactaaacactagttaagaagcactactgagtacataaaaataatgataataaatactgatatgttgtactaacactcagctcacgagcttggctcgttaagcttacgagctaaaagcctaatttagtttaactcagtaacgagttcgaactgatacaaaccataagcatcgaactgttcttttccaccacatttctaaaatgtcccttgacaactgagaaagctaccaatcaacagagctaaaggtcaaggaa

SEQ ID NO: 12011 - DNA, 1679 bp, Oryza sativa
cagcttcctctctagctcatcctgaaggcttttaatgcagtctccgatcataatgctggtgacctctaattgcatctcgtgttcccactggagatcacgaattgaagcactgaacaagctcagcatctccttgatttgccggaacaccacaaccagaagtagcttgaagccattgaagccctcatatatctcaacaagcttcccatggtgacacaccatagggcatgaaccatttgcatcaccatcatggaccaagctatgacttttcaggaaccttatatcctccttgagcttattaaggtgctgttcaacttccagtttcatcaaatctaagtactccgtgtaattaatctctacatttgcatccaacaagtgctggcgcagccgtgacattacagttgcaaacgcctcaaagttgctcccgatatcacagctgcgatggtaggacaacaaccatggtggcggcacttccaaatcgttgaacttttcagcctcgctgttaaactcactaatggaagaggaagacgttctgtcaatcaatggcccgctgaataaggacagatcattgtgagcagtacatcgtgattggcaagtagaggctggtataatcattctaccagtaaatgggtccattctttcatccaaaacctgcaacattttcaaacttaagatttggtataaaatagatttaaaattcgatgaaacatgcttagcacaatagcatctgttacgaaaacaatcaatgcggtttcatcagaaatgggtgtgataatcatggtcacacaggcatttgtcgtgattgaacacaaaaaaacagggttcctagaactatcagatactgcttgcctggctatactgattggcaaaatagcagttcagagaagctgagctccaccgccagagcagtatgcgaagcaacaggcgacgctaacaatactaacagagaacacaagccctacataaaaataaaaacactagatacttcactgcccactccattctattcattgcagaatgcagataccaagcaaacccgcagtaaaaaaatgcaggaagtaaccgcaggtcacagtgcggtgaagcagagtaattaacggcagtttcgttcacaggttcactctgctcatcctccaaactcccccacaaaccaaccagcagattcccgcagctcgatcccaaaaaaaacccttccgcaatcgcagcggagcgaagcatccccagtaccacaacctaggcgcaacgcaaccccccgaatcgcaccgcaccctcggatgaacgaaccgaacgcacaaataaaataaaataaaattcacagtgagcggaaaacacagtagcagcttacgggttggatccccgccatggacgggagccgcctgagctccccccctcgtcgccgtgggctcgccgctcgcctccctctgcgctgcagcctgcaaccgcaagcgtcgggcctcgggcgggcgaggagggagggaggatgcggcggcagcggtagggtttggggataaggggcagcagcggcagtggagtggaggagatcgcgcgtggtggtgaatcgtgggagagagagagagaggcggtaaattttttggttgggagcagtggacgatcgagcagcgatcgcgaggaggaagacgacgaggaggatgacgcagcactcgcggccagccaagcgaagc

SEQ ID NO: 12012 - DNA, 2583 bp, Oryza sativa
caaacaagtggaaatgaatagtcctggatgcagaatactccttctgattcttacacttattgcatggacaacaaataaaacccctttgcctgttagcttcggccactctcaaaaaatagtgcacgccgtcaataaactctttggaccgccggtcagcgtacatccattgccgatccatctacatgagtcaaaaaaaccgtacacaaataattattcttacaataatgacagtcatacaataattataagatatctttattcatacaaaaatcataaaatattacaccaaataattcttaaaaactatttgtaaagttttaaactaattttaatgtgttttacttcttttaattttcattttagtttgttttctattatttaagattaactttcactagagttttccttctcaactattttataaaaccttgtttagcaaatgaactaaatttctatatattctttcttccccacacacattttctctctcatcaacttacaactaaattttggagacaaaaaaagtgtgcaaaacataggtgcaaatgtagtatgacaaaaaaaaacattggaggatgaagttgcaaaccttttaggcacctccgatttgtatgtaatcaccaaaataaattcaatagaaattttggcatgacctcccatctttttggaagaaattttgaagcttgctcgggcagctggaggaggaagaagacatatatataggggtgggactttagtcccggttggtagcaccaactggggctaaagatcaccgggatctttagtcccggttggttacgatctttagtcccggttggtgttatcaaccgggactaaagatcccgggggggcctgacaggccctgacagcattcgaaccgggactaaagatgatctttagtcccggttggtaacacaaaccgggactaaagatcaaatatgcccgttacccttttgaaccgggactaaagatcatctttagccccggtttttattgcatccgggactattgtggaaatcggccgaccgacgaaagatggtttctccaccagtggaagcggcttggtagtagcaacactacctccttttggaagccaatttcctctcaaaaaatctgtgtcccttccatctcgcagaatatgagtcactgatatccaggggtgaagctacagcaaagcgtcggggtcagtagaccccgacgattttccacaaccatcgtataccccgtttatcttaccagccataaccccggtatagaataccattagaccccgatagattgattagttaaaggcaattgtgattaacaacaaagaatgacacaacaaaacagaaaatagctaagctagctcgtatgcattatatgccagcccagcccacataatgagacaacgtttggatgtgagcccacaaggctggcagccgtctccacaaattcccctgcgttgatgtcatattccagtattcctccattgtgatgaatttggaggcgtagacaagattttgtaagtaaccgctaccgaaccaagacttttttttttaacaaaaaatgtgccatagttgattttgtaccatcttatgtatagtcttgtgttcttttctcctgaagatgagacgaagattaagttttttacgcaaaacaaggtggtattaacatatgattgattgagttttaattattacaaacttgaaaaatagattagtatggtattttagagcaactttcatacagaaagttttcacacgaaacacaccgttcagcagtttgaaaagtgtgccacgaaaatcttaatcttcatccaacttttcttggagaaaagagcgggaccttagattattacaagctatagtctattgttagtatcattagttagtagaccccggcgatcatttatcctggctttgcccctgctgttattgccattcactcaattcctcgtgctgcgtgggctttcagcatagtgaaacaagttatcccatatcacctcgacaaggacacctacctccttcaaaccaaggatcacactggttgtagatgttttggaccgcgttgttctattttgcgtcgaggtttgctgcaacctatgtcccatgcacggaaggcgtaagacaaaaggaggaactcacccttgataagatggcatggggtaactccacttcttcacgttggacacctacacaacatgagaaactgagctagcagtgataaatcactaaaaaattagtggcaggtgagaaattgaaaatgaaaaattaaatttatggggagtcttttgtgtggtttgtgcggtctgtcagaagttttgatttttcccacaagtcgagtcctcagtttgccacagataaattagccccgagttttggtttccgattgaacatcagacatttcgatttttgtcttgaactctccgtttcaaacaaaaacatatgacctagaaggtccaatctagtactacctccgtctcaaaataagcgcagccatgagtttccgtgtccaacttcgaccgttcgtcttatttgaaattttttatgattagtatttttatttttattagattataaacatgaataatactttatgcga

SEQ ID NO: 12013 - DNA, 3696 bp, Oryza sativa
aaatagtttcttgttgatggcaaacgatcaatgtgtagcaaatgatccgattttttattattccatggtctcgaactgaaaaaaaaaagtagttcgattttacttgactaaattgctgttcacgttgggctggttctatgcacatactctctgctcctgacactaaatgtcgatttcttgtaggattcagagatgacggcgagatgcaaatttgtcaggcaatgtgattaagtagatatgcatcctggttggtcacaaggtgttatgctcacgcctcgatatggttcttgcgtagccacagaaaggagcagctactatgtgcttactccagccactggagttgtatacaacttgcctgtgaatccagcagaggagcatgtgtaccatgtccagttgatcacctgcacagaccttaccctcatttgcatttgggcatgttgcttccatgggagagtacaaggtgatccatatttacagacctagagctacatcagctctgtgagttcattactgtcaagtgtggcactcaccatgcagacctatgttgaaacacaggcaaacatcaatgttatctcttattgggtggtgtacttgatggatattggattgtgtatatgagctatgataatatgtggtgtaggtaccttcatccatcagtatttcatctgttgtttcaatcttgggatggagcaagaaacgggatgtccagggaccaattagcagcattttattttattttatctttttgagaaagcgattttcctgaggagtatatgtcaattggcatcaacagtttcactgaactgaaaggctacttagttttagtataccaccagcattactgttgaaccatggattaaagagtatacattcagtctggatcattcatccctgttattgagtaggatataaagccaataagccattgttggcgttagatgatgggaggatattcttctgtctaggatggactggattgctaagcatacctgatgagacattttgcacttttccaagaaccagcactttgcagaagtggagatgagacatcttgctggaaatagcacacagcaaaacagatgactttacaaaatggtgatgtagtgcagtattgcaatgtattgctactcccttcagtttgcagttgatgaaatttgcaagaaccatccattgcttttggaattgatcgttgggcagaatcataaattttggctgtgattcttttctactgttgaattgaagcctgcaaagatgtcttcgattcttgaagatgatagttttttttctctttcattttgtactatcttctgagattgtaatataaggtgtacttgtcagcatatatcatagtatctgacataatttagggctgctgcaactttgttttgcagtaaaaaggtgacagattgccagtgccacttgtgttgtaggtgaaattcgctgtgcatgtaaaaggatgcggtttgaatgcttatcatataatctctgttactgttatctagatataatgcacaagctctttgagctcatatattattcaatgagggttgaaatgctcttgtgtattgtgatgaatgatgaggagccttttgttgtatttgtatgtcagtctcagtcaacaactctgtaacaaggctgcatgcctatatgcattgctcagcccgccgtcaattcttgaaaatgaatgctgaataaacctgaaggatccaaacatggagagttacttatattcaagtcaaacagcaacctgttgtgctaccaggacactgatttgataatctgattgttttacttcagaagataatcaacagaaaaaggggaaaaagagttacagtatcagaataatgttacattgaattcaatgagcaagcccagggtaatgttacttgcattgaattcaacaaatcagcagtaatgtcaactgaaccacatgttttgcatacatttaattacattcaattgaaccaatcaagaataatctcagatttgcataataagataagtacactttgtcaataattacaacccatcagagcacagaactcataaacacctcaattctgagctaccgagtatcattaaatctatttctaccaaggcggacaaagcttttcataatacagtttgtccataaatacaagcatcagagcacatctcgcttctgatctacagatattatcatcaactaaatctcttcctacaaaggactaagctaatcagcctacagatcaaactgaattctctacataataacatcagcaaatctctctcttgcttcaggaggctaatcagccggcggatcaaagtctaagaggtcgtccatggagaactccatatccaagcagctcgggtcggccattgtgaagttgatgctgtttagaacctcatcaatggtctctgggaactcgaaatcagacaatgccggcgcctcactgtcgatgatgccctgtgaggagtatttttggttgtccagcgacggcgcaggcgctgcactacaagcatcggcttctgcttcctctgctggtagggtaatcaggtcttcaaggtgactaaacaccatggaagaatcatccatcacgttggaagagcactgatctgcgccgtcagcatcaccggcaacatcgagcagagggtactctgggaactcgaaatcagacaaggagtagttctgatagtctagtgacatagtcccagccggcgcatcaggacgatcagcttcttcttcttctggcaggacgatcgggtctgacagatgagtaaacaccgcagaagaatcatgcatcacaacggagcatccctgatcagggccttcagagctatcggcaacttcaaccagagcagccagaggaggaacaagcactggctgtggctgcggaacgaactcctcgagcagatcagactctattccagtgctctggggctcatggaggtcgcccatggagagctcaatgtccaagcagctggggtcagttgtggtgaagtcgatgcagttaggcaactcatccatgttgatctctgggaactcaaaatcagcccaggagtagtccatcgacgccagcgctgcaccaccggcggcatcaccttcttctgcgggcagggtgatcatgtccggaagatgactgaacaccattgtggaatcgtccatcacgccggagcatccctgattggcacagtcagcatcatcgacagcgtccaccagcgctgcgggaggggaaatcgacacggtctgtggcggtggaacgacctcgtcgagcagagcaacccctgttccggtgatctggggcgcggtctgtggcggcaggacgcactcctcgagtagagcagactctgttccagcgctctgtggcgcggctcgtcctcgaacgtcctcagtgccgacgtccagggcatcctctgttccggcgataggagggatgggaacgggctgtggcggcgggatgcgctcctcgaccagggcatcctctgttccgacgctctggggcgccggctgtggcggcatgacgcgctcctcgagcagagcagtctctgttccagcgctctgtggcgccgcgcgtgctcgaccgacaccgtcctcgccggattgtggctctctcttgcgcttcttgccgtggccgctgaaccggacgcggtagagccggatcggcgacgcggcgagctcggcgggggacgtgacggcgtactcatgcatcacccagc

SEQ ID NO: 12014 - DNA, 828 bp, Oryza sativa
tcgagctcggtacccattctcttctttgttagctgcccgtcaacttctcctggatcgtcccgtcgaatcttgtatcgttttgctttgcaaacagggcatgcttctagggtctcatactcctcaccgcgatataggatacaatcgttcggacatgcgtgaatcttatgaacttccagtcctaacgggcagactatcttcttagcctcgtacgttgtctcgggcaatttgtttccccccggaagaatgttcttgacgagtttcaataaatcgccaaatgccttgtcactaaccccattttttgccttccattgcaacaactccagagtggtatccaactttttgtgcccctgctcgcaacctgggtacaacgaagttctgtggtcctccaacatcttgtccaatttatgggcctccttttcactttcgcagtactcctttggcgtcctgcaacatctgaccaagatcatccgcaacgtcgttaccatcagcagctatttcctcctcgcccgtttgatttccttcaaatccaacatactgagcaaagtccggaatattgtcgtcttccacttcatcttcttccatttcaacaccttgctctccgtgggatgtccaacaattatagcttggcatgaaccccgactcaaacaagtggaaatgaatagtcctggatgcagaatactccttctgattcttacacttattgcatggacaacaaataaaacccctttgcctgttagcttcggccactctcaaaaaatagtgcacgccgtcaataaactctttggaccgccggtcagcgtacatccattgccgatccatctacatgag

SEQ ID NO: 12015 - DNA, 1452 bp, Oryza sativa
agttcttaagcctccctagttgcattgaagtcagtctctgtttctattggagtgtataaattcgtaggaagaaaatatgttgcgtcacatgcataggaaaatacatggatatgaagtcctctatatgacagctttgctgatttagatccatggaaatcatttaggtaaaaacctcgaaatttagtttaaggtggaacagaaatttcggtatatatagagattaatatgctggactttgaagatatggcttcaaaaagaaattatgttcccttgattgcagaaaccttttttctgatgcagtaaatgatgattatatatataatgcagtaaatgatgatgtgttgttaactcgtaatcttaacaagcgcttaacatcttagtgatgttctttttttttcggaagaagggcaggtgggccctcttaggctcttattaaagagaaggaataaaagcaaaagttctaccagtccaacatcttattgatgatcattttaaaaaaccctgaactttttataagcaaccttgcttcccacttttttttttctcaaatattccgaaatacaacgaaccatttcagaaacccagcatctttgtgtgttcttgttcctaatgtttcataatgaccatgcatggatgtgtggctataactattctttgtgtggttgattcgtgatgactctgcaggtgcattcattggtgtttcgttggaagggaacttcgttgcaacccgaagggacgcaaatctgcggttttacggcgacccgtatctgacaaccagcgatattctcatgggggatatgcagagaccaaatgctgccaagtttctgtacacagcgttggatggcctgtactctgggctgagtcgttaggacgatgtaaatctcaactgtacatatttgctctgattcttctggctgtaggcgtttttagctaggcttattgattcttctaagtgcttgccattgtagctaggtccactgctatcagtcaagttccagatggcaagtcaaaacctctatagtttacatgtaaatatatcttcctatgatacatacaccgcattgttcgaagtttatcatcggatatttgtggtggtatgcaactatagaagctgttacatgttactgtatcatggatcatcgaatttaaactaaacttagcacttacatctgtttgtgttagatgggctgcatttaggtaaccagtccagcccaaaactgattccgctctgacccaagtgcaaagcgatgccaataggaataagttcatttaggtccctcgtcttaacatggagtcttataacgcctctcaaccataatactagatataacatgtcaacttgcaaaaccggtccactcaacgatcggtctctacctagcatgcttgtggccccgagaggattatgaggtggactatgaatcttgcgcggggggcgggggggggggggggggg

SEQ ID NO: 12016 - DNA, 1536 bp, Oryza sativa
tttgtgagcttccacaatactgcatcttccacactccttagtccttactgagtttgcatgccctgcagctcatccctaagggagaaattttccactaccgccctgttagatagtgcatctcaaatgtccctcacccatctgtgattgatcagtccttgttccacagtcaacctagttccgtcgacataactaaagagaacactggtggagaaaccctttgtagtcccggttcgtaacccccctttagtcccggtttccaaaccgggagtaccaatccgggactaaagatcgctatctttagtcccgggtgaaataaccgggagtaaagatggctcagccacgtggccggctgagccatctttagtcccggttggtgttaccaaccgggactaaagatcgagctgacctttttttttttttttgcatggccctgttgctgcatggtttatatatatatatatatatatatatataaaccatgcatatatatgtttcaatacatatatatgcatacatatatatatgtatatatatatatatattatattatattatatgtatatacatgcataatatatatgtatttatacatatatatgttatgcaaatgcatatgtatatagatatatatatgaccaaaatatatttacattatagaaaatgtgtacacatgcatatagaaacatatgtagtcatgtattaattacaatccattatatgtcctagctagctacgatttcgacgtagtagtactcgctgctagctcagaagctaaggaccggtgaattgtgtttccgtcgtagtagaattcacccttgggattaaggatttcttcgttgatgaatcccatgagttgttcttgaaccgccgcgataaattccttgtgtgtggtcaggttatccctcatgcgaataaactatatgaatgtatgaaattgattagtaattaaacaagaaatcgctacgtaatgaaattttgaatttatttgtacgtacatcgagctctcttgtggtgatgatttggtctgcaaggcagtggcaatactcgcacacgtaatagccgcacaagttagttccctgcttttgctttgcgcactacaaataaatgacaaacaacgagagatctaattaatatacacttgtatgtatttgaatcggagaaatataaatgtagagcatgtgtactcacaggaaatttgaacttccgcctaagtctttctgtccatttgccgcggaccaaatgagggaaccgataccaagccctacatggagtttaaagctatgattcgtagtagcaattaacataacaagattttcttaattaacaaaggaacttatgacggtacctgtctataagttcgaaaaccttgtcaaacgtagactcttttttatccattgagtcatatacgttgacggtgcaggcctccaggtcgaagagtaaaagcacccagtggaatctgcaatgtgcgtgggatgcattacatatgaaacacttagcaagttcatacgggaatccaatttggtatgtaggaagaca

SEQ ID NO: 12017 - DNA, 2464 bp, Oryza sativa
tctggatcagatctgatgacaagaatctagaaaactgaaggaatgattggattgaattgtaatcttaaacatcatggaaccaaaaatgctatggcactggaatactgggtaaactggtttggctatcggggctgttttggtatcacttcggcttgatgaataaatttgctttgtcgaaatccctataatgagtagtatttgctgttgccgaataaaccaactctgggacaagatctggcatgaggttcagtatcataatggtttcttcgtagtaacgcatctcatgaagaactcttttgtactttgaaaacggacatggatgtgtttttgtgctttgaaaacccgtttgaactagtagatgaccggttggtatttttctcgcaaattcccttagcccactcttctttattttataggggtataatttatcttctttattctaggggtataatttaccagtttaaaatttactagtttgaattgacactttattactgattcatgtggaatgtataaaatcttatctcttcatgtggatggcccaacaaattaaactaaaatctacatttgcgggttttgatgttaatgcatgaagtttgcgggtgacaagtggggttttctatttggtgcagacgtacatctgccacgcactttttttttccacaattgtttttttcaattttttcgcaacttattgtcacgtgagcctttttcccgtgttctttttacgtatgtttggtgaattttttaaatgtattttagaatttgagtctttcacctcaaaattcaaaacatgctattgaaaattttgaactcaaatttcaaaacattcatctcaaaattcaaaactctcaactcaaattttaaaacattcaactaaaaaattcaaacctggatatatcttgacttaaaagttttcaatttgagttgaaagttttttagattttaacttaaaagtttttaaatctgagttcaaagtttcaaatcttgagtttgagttagaagttttcaaatcttgactaaaaatttttcaaagagttgaaatttttgaatcttgagtttaaagttttgaattttagatgtaattcaatttggagttgaaagtttttaaattttgagttaaattgtaagttctaaatgttagaaagcagaaaccgtccggctagtcatgcataaaatcgttaatgacatcgctaatcaaatttgttacaaattccgattttcatggcagctagtgattccgctcatgtggatgcattcgttgacacatgcacatgtgatacgtgatgagcgagctctatttctagtgcgtaggcgcacgttagcctttttggcgactattcgacgtatacctattttgctttacacataatctgtgtacctcgtgtgaaatggttagagcaaattgtgttattttattacaaacataccaagttttaaatttaaaagtcgcttactatagttttttatgagataaatttaatttgatgacaaaattaattttgtacgagaaacttttgaataaggatagaaacttccactaggatttctttttacaaaaagttttttcattagaaaattttgactatgcaactacggaatgtaaatacccctaaatttatactttgtaaaagaagatataaaattttatgtaagatattacgtctattttacctctctcaagtactgcccttggtcgaatcacgtctctcaatcgtaaaactgggtatagagcttgctcctctctcccctctttattcattctctttctttgcgcccacatgtcgtttcagttcatttgttgtcctcctgctcctctcaccgcttgccatctcccacctctcaccgtggagctctcttatcacatcctgatttttgtcttaagatttataaattatttaataaattatttttagaacttatattaaatgttcattaatttacaagtgaagttaaatgtgggaaataaaatttcctaaatataaagtatggttggatttaatttttattaaattctccatgaataattatactctttggaattttctcggatttttcggagctcaattcctaattttaataatacaaagaacatttcagtaattatttaaataatacattaatcattaaataatctgattttaatcttgttaagtaatttaagtgttcaagtattttcaggattattcttgaaattattttagcattggaagtatttttaacaattcaaagatcatctcattgattaatttattaaattggaagtcctttgatgatcccttccggcccagcccaaaaagtctagtttccctccctgccgctacagtgtcgtcttccagctccagccagagccgagctaacctgtgcagccgcctcctcctccatcaaatccggtgcatccgttgcttcccttccaaaattggttgcaaaaacgaattcctctctatctcctctacctaatccc

SEQ ID NO: 12018 - DNA, 633 bp, Oryza sativa
atgaagagtgatcacaccgatgctctcctcacattcccgtgcgcgtgctctgaacacacagcttgcactgtaacgaaccccaagggcgatctcagtgtcacggagtacatcggcaagatgaaaacgctagctgacgagatgtcatccgccggcaagcccctcgatgacgagaagatgatgtcgtacatcctcgccggactcgacgacgattatgagcccgtcgtctccactcttgtcggcaaggcgaaggctgtaccagtcgccgaaatctacacccagctcctgagttttgagagccgagccaagctgcgacagcaggctaatggttcctccgtcaacagcgcacgacgaggaggcaagggaggcggcggcggcttcagcaacaacgtcaacaccggcaacaccagcacgtttcgcggccgtggcggtggtcgcggcgatcgcggaggccgggggcgaggaaacggtggcggcgcgcgcttctccaacaaaccgcgccccacctgtcagctatgtggcaagattggacatgtggtggcagactgctggtacaggtatgatgaaaatttcattccagattcaaaaacagcagctgcggcttcctatggtgtagatacaaattggtacatggac

SEQ ID NO: 12019 - DNA, 719 bp, Oryza sativa
  unsure (1)..(719): unsure at all n locations
acgatacgcagtctannnnnnnnnnnnnnnnnnnnnnnnnnnnnnnnnnnnnnnnnnnnnnnnnnnnnnnnnnnnntttatgcgaaaacttttatatagaaatcgttttaaaatatcaaataaatgtatttttaaaaagtttgtaataattaaaatccgattaatcatgcactaattgtgttttggtgtatctggaatatttgtccttcaacagacactagaaagttacggcacctcacaaaagggaaaatggagttagaaaaggaaaaggttagatgagtattcaaatagtctgaagttcaaaaccaagactttccataatacttttacagaaacaatgacaaatgttactgaagcggaaacatgacactcaataaacagtaagctggcatcccatttcccatccaaggaagcaagaaatgtaagaaattggaatttataagccccagctagccagctttaaagtctcaaacaggtaaataatcagtgcaggtaatcagagaagcagggatataactcaaaactatgttgaacagagcccgagagaatgcatgacaatgttgagtacacaatggcaatgtttttttctttctctggatgacttgccacataagaatttttcggcagtacatgcaacagttttgcagcctacaacagtaagaatgcttgacatccatccttaaacagtaaacactatcatatcgacctctgaatcttgg

SEQ ID NO: 12020 - DNA, 664 bp, Oryza sativa
atattatttgctgatgatgaaacatactacctcaaggcgtctctcatataggaaagtggcacggtttgagaagaacgtcaccaagaggttctgttcctgagacagtcaagaaaggaaatgattatcctgttggacccattgtgcttggatttttcgtctttgtggttgctggttcatgtaagctacattctttgtttatatatttgtggtgaatggttgagctatttatcttcactcatactcttcataactcagaatgcctttaccaacctaaatagattttaactattttgacccttagttcttgtttttatgggtattgcttctgagctctctgcaggactaaactgtgctaaattgcgaaagtgctaatctagtactattatcagttgtcgtgtatgggggtagctgaagtacacatcattagttctgctttaagatgttatcactttgtgggaaagtatctatgtgtgttctgttttgatcttaagatactcaaatccttttcaaagaataagaaactcgattcctgctcttgatgagtccaaaaatagactcatggtttactccacaaattgttgttaactggtggcagtaccacacccatggacattagctactaatctcgtgacacgcgataaaaccttatatgcttataaacttc

SEQ ID NO: 12021 - DNA, 684 bp, Oryza sativa
aattcggactccaaaccagaaggaaaaaagacatggttgatgatccatcattctcctataacctttccaagccaagcaagcataccaccctagcatcctgtacacatctaaaattcaacgtcaccttagcagttaccaacaatccaaaccctctgtccccaccccctggatggctggatcctcctctcagttgatgttagttataccaactaaccatccgtcactcgcaaaccacatttgtattcacattaccaaaccaaagccatcaaccgttatttacagatgatcatctctacccctccttacacagctactccattctccaagaacagagcacacgaggttaaataagagcgaagcatactgcgaccacatgattacagcattacctggccaagctcgaagctgccacgggttcaaccctgcagccaccacctccttgccgttgctcgcggagatacccaagcaaagtttcagcctgcaaatcacacagctaaacataagtgtctccaaaatttggaagcagatttcagattcagtaaatctagatagctaactagtgaagcacacattcgggggtgctctttccaatccgactgtacaactaggcagataaagcacgacaggctagactatggtggcaaaatgataattgtcatataaataattaatatacttattgtt

SEQ ID NO: 12022 - DNA, 562 bp, Oryza sativa
ctccgtgaagaaggtgtaccgcgggttcgaccaggaggaagggatcgaggtggcgtggaaccgcgtgcggctgcgcgcgctcgccgaccgcgacccggccatggtggagcgcctccacgccgaggtgcgcatcatccgctccctccaccacgagcacatcatcggcttccacaaggtctggctcgaccgcgacgccggcgtgctcaacttcatcaccgaggtctgcacctccggcagcctccgcgagtaccgcgtccgccaccgccacgtctccgtcaaggcgctcaagaagtgggcgcgccagatcctcctcggactcgaccacctccacacccacgacccatgcatcatccaccgcgacctcaactgcagcaacgtcttcatcaacggcaacaccggccaggttcccccccacccctcattactgcatccagtttcttcccagattagcagatttgacaagctcacctatcccaaaaatttagggctagaattaattacaatcaaaatcatgataacgttcgatctgttagactatattaggagcaaagcaatagcttaa

SEQ ID NO: 12023 - DNA, 2071 bp, Oryza sativa
aaagaaaggggattccttgcttccacagccaccaaaagtaaaaccacccggtgcatggtgttggtggccggccgcccatgccatggctccctgacctttccgcggctcaactctcccccatccatctcccacacacacatccactgacagctctgcacgagaaacgcttggccccaactgtcatcgcacgttggcgctgaactggtgcgcctaggtttggtaccaatcgggtaacccatcccagcctcctcgacacctgtatcgtcaaccccgggacgagacgcgagcgcaaaagcgactacaaagatacacaccgcaccaccaccaccacgcacgcaagcacgcctctcgtcgcgttccgtttcgttgcgacgccacgcgagccatgctgccgctgccgcgtcgtgtacgtgtgtatatacgccgcgccgggttgtagcgtagcgcagcgtgggagtactacactgcactgcatcgcgcaaccaaccaaccacccaccacaacacaaccctcctctcctcatcatcactcgctcgctcgctctcgcgctttgcggcaactggcggtgtctcctagcccttgcctgccatggtgtcgctagccggctcccagatcccgtcgccggggcagagtccgtgcgcggcggcgcggtcgcagcgccgcggcgcggggtactccatgcggaccatccggtcggcgctgctgcagccggactcctgcccgggctcgccgcatgtggcggccgcgtacgacgcggcgggggcggactcggacatggagaacttgacggactccgtgattgatttccatctcagcgagctggcggccaccgcggggcccgcgcaccccgcggcggtggccaagtcgtcgtcggccaacgcggcggccacggagatgctcgagctctcgcgggacttcagtgactactcgagcttcaactcggatatctccggcgagctcgagcggctcgcggcggcggcggcggcggtggtgacgcccagatccgacgcgccgcaggtgggcgccgtggatctgaatgagcttgagtcgatggatctgtccgtcgaggcggcgccgctggagcgcgtggagccgttcgtgctggcgtgcgtgcgggcgctggggcccgacgccgcgccagacgcgcggcgcaccgcggcggcgaggataaggctgctggcgaagcacaggtcggacatccgcgagctgatcggcgtgtccggcgccatcccggcgctggtgccgctgctgcggagcaccgacccggtggcgcaggagagcgcggtgacggcgctgctcaacctctcgctcgaggagcggaaccggtcggccatcacggcggcgggggccatcaagccgctcgtgtacgcgctgcggacgggcaccgcgtcggccaagcagaacgccgcgtgcgcgctgctcagcctctcgggcatcgaggagaaccgcgccaccatcggcgcgtgcggcgccatccctcccctcgtcgcgctgctctccgcgggctccacccgcggcaagaaggacgcgctcaccacgctctaccggctctgctcggcgcgccggaacaaggagcgcgcggtcagcgccggcgccgtcgtgccgctcatccacctcgtcggcgagcgtggcaacgggacgtctgagaaggcaatggtggtcctcgccagcctcgcgggcatcgtcgagggccgcgacgccgtggtggaggctggcgggataccggcgcttgtcgagaccatcgaggacggcccggcgagggagagggagttcgccgtggtggcgctgctgcagctctgctccgagtgcccccgcaaccgcgcgcttcttgtccgtgagggcgccatcccaccgcttgtcgcgctctcgcagtccggctctgcccgtgccaagcacaaggtaaaaccttttcaactttacattcctcttgtttgctaatgtcatatcgggattggatatttgggtatgatttgcaagatttctagtatgtcgattttcaagtgtagattttgggtttgagcttttggtgtgactgaagcttttggataattgtaccgaacagtatccaacg

SEQ ID NO: 12024 - DNA, 594 bp, Oryza sativa
atgggtccatggctactacaggttgcccacagtattgctatctgctagccgaggcgaaagttgttgcaggtcgtctgccgcaacgggaggtatgagctgaaacccagccgcgacccctccaggtcaaactccagcaggttgtcctccatcatgtgcccgccgatcaccaccgatgacggatacagcgcggggccgccgtccaccacgccaaggcagagcgcgccgcccttggcgggcaccatcgagtttgccccgtacatgatccacgacacggcctccctctgcagcaccagctcaatcgtcggcaccgctggccccgcgcgggtgctccctactttgcgcccgtcgtagcacagctcgaacggtgccacggccggcacacgggggatcgtggccgtctcggccgcgaacgcgtcgatgaccgccttgtagatggaggtctccagcacggtgtaaggagacgccgtgctcagcgtggtgccggctacgccattcttgtcgattgccaagagcgtcgcgttcagtggcacgtcgcggccgttcaccttgatgcccgtcaagccgatgaggtactcgatcgacgtcttccccgtt

SEQ ID NO: 12025 - DNA, 7729 bp, Oryza sativa
tcccttcgatctccctcccctcccaccctctcaatggcggatctcagtgaagtacgcaagccgcggtgagccccgtcctcccgccccaccctgatccccgttgacgacacgatgaacgctgtcaccagcgatgtccccaacatcaactagttgacgatggggaacgtcacaaccggcgccacggaagcgcgttgcgacgccgggcatgcgccgagtgtgatgagcgtcgacgagctgaatccgacgaggcccacgccctcggtgctctgcagcccgatgaacgccaagaagagcccaatcccggtagacgacgatatccggatgagcttgggaatgaacttggcgaacttggagcgcaacccaatgacggagatgaagaggaatatgtggccctcgaggaagacggtggcgagcgcggtgcggtacaggagcctgccaaagccatggagcaaacactcttcgccccctcgccgtccccctccaccgtcgccgccgcatcctccaccccaacaaccgcgcccggcccgctctccctgttgccatccccactcccgcgtgtcggcgcgaccaacgcctacctcaaccctcgccttgcggccgccgcctcagtccactgctcacccccacgtgccgccgtctgccgcctgcccctccatgccgccgtgcgcacccgcgcccttgcacgcgagagagagagagagagagagagagagagattaggaagaggtgaagaggaggtatgaccggtgggtcccaccaattttttcaaatgctgaatggtatgccacgtaggacaaaaccgctctggattggatcgagagggtaattcattaggtactgaaagtttagggcgagcaatgtctggttttcgggttcaggggataattcggtcgaccgcgatagttcgagaggtaattcatactttttcctaaattttataaagagtaaaaccccacctattatggtccaagtttcatgaaaccacaagaacctgtacacattgtcgacgtttgatgtcgcgattccagtatttgcatagtatggggatcgttggtactagggtatatgcgagattgagataaaaaagatggagacagggatttttatacaggttcgggcccctgaattgtcaggtaataaccctactcctgttggccgaagccggtcattgctcttattcaccataatcacaccagtataatatttgaggtagcctatctatctgttgtcgacttggcggtctaaagtgctgactcgtagtcgacaacatggtagccttcctcctcgaatccgtacccggcgaggtcagagatagcactagattcctctcttcggttcccgtaggtaccatattgggttttcctaggcttatctctgatgtcgatatctggcagcttgtcttggcgtatgtaggcttgtattggcttgtggctttgtggcgtccatgttgcctgtgtcccctctcctcctagggggccttgtatttatacccataggtgtcccctttccaagtagaactagggaaaccaatatggatacaatccgactagtccttgtcgtttccatgtagaactctattcatcctttcttacgtgaaactcctactatatccgaaggttgttcccgtataagacatggtatgtggtgggtcctgccgagatttagtcaactactattagatatgtggtatcaataaccctgacacacatggtacctacccttagactattacgatcctaacgtttttacagaatcacattacttatcactttgactttggcctatcacatttttaagttgtacagtcacatcttaaatttatgagaattttatccatcatataaatggtgcatccgtttttctcttttgatttaggagtatgtcaaaatagttaataatgtgatttatgaaactttagatcataatacctaacattatatgtcacatattaaaatacctatggttttatataactttggacaatataatactccctccgtcccataaaaatcaacctagtaccggatgtggtcctaaatttgttttttatgggacggagggagtaggtgatagggagtaggtttaatgaaatttaatctttataaaataagtggcccaatattaaactcaaatttcacacatggagaggtcgcatcgtctccttctcgcctcaccacatagcgtctccttgtctccttctcgcctcctcgtcccctcgccttgccaccgcccgagcaagctgccggcgtgccgggcggcagcgagaaaggcggcggcggggctttcctgcggagaccacggcacggtttaggggtttaccgggtctggggctccggcctacaaatctggcgatgcgggaggtagcggggccatgggcggcggtggctggccgggccgcacccggcggcgaaggtggttgggagggacacaggcgcgggagttggcgagcgacggtggctgaaatgcacttggcgcgcagcagcggaggggtcggaaggcagtgcggtggctggtcagcgagatgtcggcggcgacgactcttcgagtgaccgtgggttcaatggagaacggtgacagccttagtgtcgatgcccagtcctcggcaaggaaaggcggttccagcgaaggtggtttcgtagccagcggctacactaggggcggcgacggctttcgagttcgagcagtgacctcctcggttgcggtggcgtaagcgccggtgcaaggtggttcaggtgaaggtggatccagttagtgacggcagccctaggggcggcggaggcctaggagtctaggcggaagatgatatcctctctgaccacggcaaaggacgccggcagaagtggcggcgggctcggagtccgagaggaggaggattctaacgttggcagtgaccctatgggtggcggaggcttaggaatccggcgaagcagatcctttcagctcgcgtctggttggctagttctgagtggacgatgatggatggctagttctgactagacgacgatggatgaaggtggactacccagcggcgcgtggcatcggttcacttgaagcagatgaagatggcaccaatggagattcgcagcgacaatgcactaggggcggtggcgactagacgacttccactcgtcgttttcgactgtttcaagagagaatgttgggatgcagggatgtgtcaaggttgtaggtttttggttttttttgttgtgtgttctcctctttgttgaggtgtaaatctaagtgctcttgtatctttttagctatgtatatccctcgtggatacagagggattaatggaaatccattatctaaagaaaatcaaactcaaatttcaaacccttctccctttccaactctccacatccaaacagcagactaaaacctaaagccgctttctaacagtcgcaaactcgcattagcgcttcgaaatcccaggcatgttccccacagccggcggccgccggctcctcgtcctcatccgccgcgcctccgccgccgccgcggccggcgcaaaccctaaccaccaccaccaccacgccacgcttttcacccatcgctactcttcgtcccccctagcaagaacccctgaggcggaatccgccgccgcggcctcctacctcgtcgcctccgtcggcctctccccggccgccgccgccaggatctcccgcaaggcacgcttccgttccaacgccgacgccgaagccgtcgtctccctcctccgcggccacggcttctccgacgccaacatcgcgcaggtgctcccaaaaatcccgggcctcctcatcctcaacccggacaagatcctccggccaaagctcgagtacttcgcctccctcggggtggtcccctcggcactgtcccgcgcacccctcctcgcgcgcagcctggagaagcacctcgtcccgtgcgtcgagttcatccgcggcgtcgttggcaccgacgccaacctctgcgcggccatctcccggaacccctgggcactctggtgcgacattaacagcagcatgcgccccgccgtggaatcccttcgccgccacggcctcgctgaggcgaacatctccaggctcgtcgtcatcaatctcagcgctctcacgatgtcacccgaccgcattgacgggatctttggggacctggaggcgctcgagctgcccatctcgcattcgcgcttcgtgtacggcttctgggcactgtccagactcaagaggggggcatgggaggaacggatgtccgtgttcatgagatttggggtttccaggagcgagttgctcaaggcattcagggagcagcccggtatactagtgttcacagctaaaactatccagcggaagctcagtttctaccaggaaaagctgaaggttgcaccggcagatgtgattgcacatcctcttctcttgacgttcagcttggagaagaacatcatacctaaatgtgccgtgctgaatgtgctattgagggaggggaagattaagagatatgggagagagatggacttgttgagacccttgcagcgtagcaatataagtttctttgagagatttgtgaggaagtatgaggaagatgtgccagatgttgtaaaagcgtacgaggggaagattaagttcacgggattcatggattaggatgtcaatgtttgattatgctgaggccaaggcgccagctttctagggtgtattctctgtagcctgtaggtaaggctaaaattgtcgtcaaattaatgcatattgcttcctccttttttttgaactaactaacatcatataaatgaaaatggaggtaatacatttttacattgtcttgccatgcaatcttatcatatcctatatgttggattacttttgctaccgtagtacaagtaactaatagcatcatgagaataacgaagttgtgacatgttatttagcctttgtattttgtagttttgtggtttatatgcacttagagacacaattgctcttaccctaatcttcactaaagggacagtacatttatcttttatggatagccaactcattcaactgtctgtgctgaataagctaatttcccccctcctaataatggtgtgagcagagtattttcactggcacttgacaaattccacttctaagttatgctgctcaaacagtatatattgttctgtgaaatattatgacactgacaactcctttttagagttaagaccctgtcttgtttgaaattcctttttttttttcatttgtgaagcatgtcctccccatacagaatttgtttcacccaatggaattgacaaacttttcttaagagttagacctgtcatgtctgaaattcttatttataaaatatcatcctcctgtaaaatttcttcaccctcttgacttttgtaagtcttcagaaaacatgaaataactgcaggtccattgtcctgctatcttatccccttttatccttgttggtaggctaggactccattaatttattttatagaaaaacaagtttttttttaatcaaaggagccctttgtaatgttctcatgaggcattagaacttataaagttctgtggcgaacttatttgaagtttgtaagtgtccataatgatgctcagtggaagttttaggtcctgaaatgagtatccatttggttagagttgatggcataccattggtacttggtatatcaatagtctgaactgttacatgccatctgagtattcgaagctttattgatctccaaaccacatgtaagtttagcttcaatatggatcttatacatattgcttttccgttaacttgggaggaaagttagtcttgtttcttcacgcttgtagtattgctgtaatgattgttgaaacttatattcctaaaagtaagataactgttaaagtttctagcctcattttcaacggtggttcttaactttttcttataagcagtgatacatgttatgcgtgcgttttcactggatatttgagtggtaaatgcattattcacttattcacacagtagtaattcatgttttgaaatgtgcttttttttttttggttgctgatgatttgaaatgggtcttcaccaatttcattattggtgccttgtcaattttaaggattaatgctgcaaggtcagtggttccaaaaggcaagcgtctactgatgctccttgccgtagtgactgctaaagacagttatagaatcaaactctggctatgaatctgaacaaccatttgtctagattcaatgacccggaggcccgtacgcaaaaatcggttttggttgtctggaatactagtacgtattgtaaaatactagccctccgttttatattacaagtcgtttgacttttttcctaatcaaaattcttttaagtttgatcaagtttataaaaaatataataacattttcagtacaaaacaaacattgtatcaaaatatattcaatgttaaatttaataaaactaattttgtgttgcaaatattgctagctttttctatacacttggtcaaacataataacttgagtaaattttacaatgggccacatattttaaccaaggtttcataatggactagggttaaatcaatgttttcacttaacaccatacatctttacataagttttcagtttgaactaggggtgagcaaaacaaggggaatatgtgagagagcttcatatgatttacacagggataattataaaaggcaaaacactttatgttttcttccttttcatgtgtggtagttaactagttctattttctattttatttttattcatttaccacaatgtatagatcattttgtgccacttttaaacatgtttacgtcattattttagtgtgatttgctgaaaaaagttatttttagatttgctattttttttctaaagatatttatcttaataccgtggcactaaaattgatgattttaactatcttttctctggcaacttccttctatgtgctcaaccctagtccaaagtgccaactagtgcaaacatatatggtgtttagtgaaaaggttggtgtggaccttgcctattgtgaaactttggtcaaaatacatgctgcaatgtgaaatttactctaataactttaattaagaaaaaagtcaaacgagttataatatgaaatggaaagggtgaaactttggcaaaaactcactctttcattcagagattggtattttcagacataaggccttattttgtgttaaacaccgggggacccaaaatttgtaggtatggccatgcatacttgggaacggggcaaatgccagcactgctacatgctagccgaggcgaaaattattgcaggtcgtctgccgagacgggaggtatgaactgaaccccagccgcgatgcctccaggtcaaactccagcaggttgtcctccatcatgtgcccaccgatcacaaccgacgtctgcggctccgtgccggcgtccaccacgccgaggcagagcgcgcctcccttggtggccaccatcgagttcgccccgaacacaacccacgaggcacccgtgctttgcagcaccagctcgatggtgggcacgggcggccccacgcgcgtgctccccaccttcctcccgtcgtagcacagcttgaacggctccactgccggtgctcgcgggatcgcggccatctccttcgcgaacgcgtcggtcaccgcctggtggatggatctctccagcacggtgtagggggacaccgtgcttaacttggtgcccgccacttctttcttgtcgatggccagcagcgtcgcgtt

SEQ ID NO: 12026 - DNA, 7748 bp, Oryza sativa
gccaaagctgcttttgcgccagtcagaaagaatcaccttagggaagttgttgctcctagttgaagacctcaacgatggtggttgtttggtccagtggttttgtgcttggctccagatctgcagggaagatgttgacgggagtattgggaagggggggggggacaagctttgcgctatgacatcggccgggacactaatatatggtcatatggagataaaaaggtaatcactagaaagttgactgcctctagatgaaggttgtcgtcctgttgctcgcttctagtcattcctttgctagtacttgttgtcgtcaatgcattggttgtgtgcttgtccactcaatcaatggccccgacagtgatgatggcctagtactgaatgggagtttctcttggttgatttggccatcaagcaatttattcaacatccacaaattgcaggctacctcttcctcaaccactttcgttcaggtcaaaagacaatggttcattcgtcgccatcctaatctttcacttgaaggtcaactagactttagagatggcttcatttttgcttccaaatagtgggtaccatgcagggttcgccattcgcgttgagcacggttcacgtgtgcaaccttggttcacaggactatagtcagtgttcctcatatttagatttagtggtgaactccgtgaaaatcatttgctgtgttcggtgaagctcataccaaaatttacgacgcaataacaaacctctcatttgtgccattccgtggaggcaaccgaagggaattaccggtttgtcaagcagtgtggatatttatagaggccgttggatgtagttgtcgcggcaacgccgcagcttcctgtcaattgacaatctttatcactgtttgctttcattatgaagcatgtttctttagtctagttacccttccttttaacaaggatggtacaatgctttcacttattttgtatggcgatgtacttgggattattcccctgatccctgactatctctaataaaaatgttcttgagtcttaaaaaaaagaattcttagttctaaagctgcagaaaaattgaaattttcttgcacaccttaagacaatgttttagccttgatacctgcaagttatgaatttagcccatctttgtagtttatcatggttgactctctaatacttcgtgatggtgaaagctcttccaatatatatgcatggtcttaaaaaaatcataatgacgtatttcacgaaaaataagaagagatggcaaaaatgtatataagactaatatattgcagttgttctattgaaataagaagatctatcaaagctatgaagaaaatttttgtattaacgtttctgcttaaaaaaactttacaatctacttggtctaataaaagttgttatacatccatcctaaaatataataatttttagcattcatttttttttcaaaaacatatcaattccaagttgttgggttctgtatttgagaaaacaaaatcaaaacttaactatttgatgggaaacaccatatgaaatcttgcaaatttcggattggatcactttgaaattcatgcaataccccataaccataacacctcctctcctccctcctcactcctaccgctgccatgacttggtcaagtgagcgctcgatgccccacctcctgtgtcgttgtcgtccaccacactaccacccggctaaactggtggtcgaaaggtgccgacaaggcacccctagcaagcctcttctccctttcctagccctccttctacttaagggcccctttgattcgcagcatagaaaaaacgcaggaataggaaaaacacaggatttgaagtggtaggattttgaaatcctatgggaagagaaaacagaggaaaacataagaagatccctttgatagaggcatagggaaaaacaaatgaatctgcacatcacttcatttccaagaggtctgacctcttttttagtttcctttgaaatccactgataggagtgcaatcctatggaatttatacttgccttttctatgaatcaaagaggcttgaagaaaaaaaatcctttggaatcccattcctccaaaaatcttttagcattcctttaaatcaaagaggccttaagccagattcaccaataccacccgccattaacgttggcccgctatcttccttcatccacgcggctctctagcattgttgcctacccatgtccattatttctcattcatagtcgtatcactgtttccacaacaatccatttaaacccgttgataccctctatccctaaaccctaactttgtcagggcattgcatgttattaaagcttcgttggagtttaaggagaaggagctgagattgtgggagcgcgaatcaccgaagcaaattgtgaagtaagaaatttataaggttttaggcccaagtctaggataacaaccatttatccattaaaagaagtactcagaataaatccccttaatcccaaggggtaccgtgaaaaaaaggagtacggctaaaccctcgcgagtccccactcttcctctccccgttctgcatcaccatgttcgccgccatctgccgccgccggctcgccgccctattcccccaaatccgcggtggcggcggcggcgcatatcatgtccagtccaacccccaggccgccctcctcttccacagctactcctcaaccgccgtcaccggcggctccgaccccgagccatgccccgacaccgtctcttacctggtctcctgcggcctccccccggccgttgcccgtcacacggccgccaacacccgcggcctccggatccgatccaccgagaaggcggacgccgtccgcaccctcctccgcagctacggcttctccgacgcggacgtcgcccggattgcccgcagcgccccgctgctcctcaccgtcgatcccgaccgcatcatccgccccaagctcgagttcttcgccacgatggggttccagcccagcaagctgtccaccgcgccgctcctcctcgcgcgcagcctcgagaagcacctcgtccccaccatccagttcctccgcagcatcatcggcagcgacgacgggatccgccgcgggttctcccgcatccctcgcgcactcctggtcagcctggacaactgcatgcgccccgcggtggaagcccttcacaggcacggcctcaccggccgcgaggacgtgtccaaagtcctcgtcctccagatgggcgtgctcatgctgtcgccggtccgcatcggcgaaatcttcgaggatctcaaggctatgggtatgtccatcacggacggccgctttgccaactcgttccgcgcgatgtgcagcatgaggagggcgacctggctgcggaaggtggcgctgtaccggagctttggcttgtccgagagtgaggtgttcgaggccttcaagaagcagcccacggcactgcttggcgctgacgagaccataaaaaagaatgcgtcgttcttccgcgacgcgctaaagcttgaaatgcgcgaggtaatggtgcatcctgttgttatggcatatagctttgagaagaccatcctgccaaggtgtgccgtgttgagcgtgttgatgagagaggggaagattaatccagatatccagttgcttcatgcattgcttggcagtgccaagacattctcagggaggtatgtagataggtttgctgctgatgtgccagacgttgttgaagcatatgagggtaagatcaaattcaaaggattcaagggtcagggtcagggtgtttaagtccacggaagccaaaaggctattcttctggagcaaaatcacttcaggttgggttgtctgtttttcttttagagccattgagatcaaggcatatgattctaaattctaacgctgtttcatggagcagcattactctgttgttggaccatggttacttagtatcatatatttgtagtttagcagtttccattttgaagtattctggtcttgggaaacctagatacatgacgtcgtagtgatacctttaaggccaattcctctatcattttctgatttcaaacaatctcgtaaattaacttaatttgtgattttcaaacagttctttcttcaacacacctgaaatatctgtggtttgtctgtgtagattatcaagtgttcagatttcagagtttccttatatgtggttatcctgcagctttacgtataaatctggcattgtcattgagagaaaatgcaagctagcacaatgaggacatcataaaacaagtatagtggaaaattatagctagtggcatgaggcatggcttgcaatgcctataaggcaaagaactaagcttctaagccttgctctccagatcactaaataagtggatttactccctaatacatagtagaatgaagaacatcagaagaaaactaattactggtatattgatatgcagatcaatgctaaacttgaactatttccactgccaccataagagaagaaacatatatttatccctatattttaattgaagattacactgcagtaatcgtgctgtactgctcttgaagcttgccaggttaaccacccacaataacctgcatctaacatgtgcttaggacttgtcatctgcaaatctttgttgtatgattgctaagaatgttcaagagtatctgatagtcttggaattgtgaatgcggagttacggtgacttctttgaactagtttgatgtactgttcttgcgaggtattgtgaagttttgtgaggaacttgctcaaagtttcagtgtccttaattctgcttagtgggagttttaggtcctagaatgggatatccatttggttgagagttgatgacatacaaatcatacttggtactatatcaataggctgaactgttacacaccatctgagtacttgagtccttgttgttctccaaaccacatgttattttctttgctccagtatgattcctgaacttatccatattgcttccatgaacttggaggaaagttagtcttgtttcttcacgcttgttgtcttccttaatgattgttgaaatttattcctagaaataagcacactgctaaagtttctagcctacccttattccttaatgattgttgaaacttattcctagatagaaataagaatactgttaaagtttctagcctcatattgaatagtgattttttacgtttgatacagcagtgatacatgttatgcacacgttttcactggatactgaggtaactacatgattcagtatttcagttatccatacagtagtaactcatgttttggaatgtgacattttccctctaatgatttgagaggtaattaacaagcatgacaactgtgtatttatcagtttaattataggtatcttgacatcttttcatttttaaggatcagatgctgcaagcctgcaacagtggttccgaacaaacggtccaaacggcagggcgtcaactgatgctccttgccgtctattaatgcagacaaaattttattttatgtatagatagatgaagttatgaaacatgctggtagagaaacgctcaactggcttgatgtacatacctctgttggtttaggtgaatcgctgttcaatcgtctctgtggtgcacacaatccttttaacacaagtctaaggataggggcataacaatgaatccataaatctcaataaatttatattgaaaatgtatgcatgtgaatgctattatgagcgcaagaatttaaactctgatgcttaaagtataagcacgactctaccataccaccaaatctctggcgcttcctctacttgagattttgctgacacatggattagtgtgaatgtgattataggcataggagattttgaactagtgaagtactatttggctgttttctttcctcttttttcccaacccacctcttttttctcacacgcacaagtacgtttttcaaatattaaacggtatgtttttacaaaagttttttttataagaaagttgttttaaaaaataatactaatttattttaaaaaatactaatacttaattaattatagaaaagttgttttaaaaaatcatattaatttattttttaaaaaatacaaatacttaattaattatgcgttaataaatcacctagttttacaagcccgaggattatttgctaacctcgtgtgccgaacacagctttacacacgactctacctaccactacacctatttgagattttgttagggcatcagcaatgtgctcgcaaaccgggtagtaagcaataaatacactcttactacctggtattaagcattgtggggctagtacataactacaaccgggtcatacccctactaccggaagcaaggaaatagaatatgcatgtacacagtgttttctgacagcaaaagcattgcttctcccaaccgttgtatgcatgctctgtccttgctacaatttttattaccccatggaccccaccttactgccaacttacagatataagcaatgtggagcacgtctccctctattaccgcctgtcatctgggcccacgctaataccgatgtggatagcaaacattgctgatgcccttagcacttagagtacttgtataattatttccctacatatcgtgttgactttataatgcattaagaattgaattcgattacaaacatgtttgatgcaactttttttttcagagtttgaggtatctcgttaactaattactttatctgttgcatgatatagtaacgtagtatcagataagacgtttgagatatctcgttaactaattatttcctcagttccataatatataatatagcaacacagtattagataaggcattgtattagggatggtaatttaacccgtttgcccgtttacccgtgggtaaaaaccctaatagagttgggtttgttctccatttagtacccatgggttttttattaggtcaaaacctatacccaacgggtatacgggcacgggcaaaaaccaattgacatgtggtcactcagttaaattagtataaatgccaccatctagtactgataaacttgtaatgcttgtattgttgaacttggtacaactgtaccctttctttaaattgcgataatgtctctctgcttgtagagatttgtggttgaaatgttgaaatgtgagtttgtgacaggtaaacgcgcatgcccgcgagcacatggcgcctgcggacaacgggcatgggtagtgttccttgcccgtcatgtagtaacggatatgcccgcgggcatgaattacctcgcgggcacgggtatgggtagtcactatccgtgcccgtcgtgcccgactgccatccctatattgcatagtataacgaatataaacagatacacgtctagattcattttactatgaaatttctcgtccggtactaaattattatattataggatggagggattagctattaatctaagctgcatatggatgaggatattattgcatttcagaaaatgttactactgtcaagtcagttgtagtttgaaatagagtaaattttaggaaaaggtatgaattaccccactgaactatcgcagtcgatcgaattactccctgaatccgaaaaccagacattgttcaccctgaactttcaataccggacgaattacccctctcgacccaatccagagtggttttgtcttacgtggcgtatgcgtggcaatccggtcagcattttatttataaaaaaatgtgggacccacccgtcatactcatcttcccctcttcctctctctcctctctcttctctctctctcatgg

SEQ ID NO: 12027 - DNA, 12845 bp, Oryza sativa
aaatggtactgtttacacgaatgattcctgttataaaaacgggggtctacaggtggcctggacgcgccgcggtccgccaccgacgttgccttcagtcgccgtggtccgccgccgtcgtcgccaccgtcaccgtcagtccccgccgccggccacccccccttcagatctggccggaaacggcgcggatctggccaccaccaccgccgccccggacagctccgccagccgccgagcgtgggaagggcgaggcgagaccccgccgccgccgtccttgcggctccgcggctttgccggcacccgctcgggcggcggcgaggtgaaggagggggcggggggaggaggaaagcgtcggcgcgcgcgtcgcctcccgagccgcccgggggagggcgacgcgagggctattcgccgatcgatgtggcctaaaagatctcaactggatttttacttgttgtttctaaatatggtcaccaaactttgatttctcggatatatatcgcgaaacatgcatcgcatgtgcacgattactagcaatacaaaagaggaaaactaactccacctttcccctacaagactacaacatctaagcactttccaataaagccatacaaatggacaacgaatgccaaccaatgccacatgaataggccaattcttacttacctagtgtaaaaaaggaagaccgactggacactggacctttgcacatcgcttaaggcatgacgttgccagataaaaaccagacaagcgtacaactagttgttgacacctttttagtcacgccacaacacgatcggaatccacctaaagttttgcagcgtatggagtctccaaccaccttgatcttgagaagcccctgatcaagatgggtttatagatcaaaagcaactaacggagccgatttagacaaatagggataaacacccgtcttgtgggcggaaccgaatgttttagggacaaacctacacagatgactcgcactctcgcgacgaagacggacaactttcaaagcaaaccaacgaagatggatgaactaggctgaaaactaggcaaaaagtatatgtgatattgaaagaacgattcaattggctaattgcgctgttgtagattgtgtgcctcaattgaactggccatggcgactacaacaaaaacctcatataaagacacttttgtagaggtgttctgcaaattgcctctaagatctggtgttttgtagtgtagagacactttacacagacactttgaaaattgcgtagaaaacttttactttagagacactttagagatattttcagcacattttattaaattatatcttgtagaagtattctttcgacactttaaaatgtacctgatatgtaaatgcatttcttgagatattttaaactttgtacaaacacttactttttagaatgataatgtaaactgaagaactaaatataaataactcaaagcacaaacatacaagtaacgacataaggttgagttcgctagtgcattgaagataaaaatgatttgtccaagagatcttgagctcaaggatttgcaatagcaagggaaaaatattttactccttttttacattggtttcatagggttgtggtacaatttaataatttaatgcctctaccattttatagacattttataaaatgtctctttgcgtttcatatggttgtggtataatttaataatttaatgtctctagaaaatgcccataccattttatagatattttataaaatacctctttgtttgtacagacaattcaccgtaagtgtcactagaaaatgcctctaccatcttatagatattttataaaatacctctttgtttgtagagacaattcaccataagtgtctatagaaaacgcctctaccaacttatagacaatttataaaatacctcttgtctgtggtgaaaaatgcctctaccatcttatatattttataaaatgtctctttgtttgtagagacaattcaccataagtgtctctatagaatgcctctaccaacttatggacattttataaaatacctcttatttgtggtgaaaaatgcctctactatcttatagacattttgtaaaatgcctctttgtttgtaaagacaattcaccataagtgcctctggaaaatacctctaccgacttatagacattttataaaattcccattgtttgttgtgaaaaatgtctccaccatcttgtagacattttataaaatgcctctttgtttacacagacaattcaccataagtatctctagtacatgcctctaccatcttatagacattttataaaatgtctcgttgcttgtagagacaattcactataagtgcctctaccaacttatagacattttataaaatgtcttgtttgtagacacaattcaccataaaacacttcttaggtattttattttaaaatgcctctacagtattgtaaaaacatttaaaaagtgtctccacaaagcatttttcttgtagttggctcttattttggggttggtcttgccttccataggtatctctccacgtcccactaggtgtacaaaccaaataggactaaagaaaaccttagcccaagcaagggaacttgagaaacgacaaaatcaggcacggagtcagactctgccagtctatctggccacatgccgtcagttagaccggccccacactgtctgtctgaccggctctatgacgatagtcagacttgtcgcgcgtagcaagctaggtccttttcaaatttggctatattttcctattttcgctttaggtgccaaatttagggttttatgtcacatactccatccaagataaaaaaaaatctaaatctaggacgaagggagtaggtgaatttgtcatattcgatggagaaggaaaaaaaaaagaaaacttggaaaactgtctagagccttcgcacatagttttcgaatacgattatgctttaaaaaaacaaatgaattcacaggtaatagcagctaaacctctcaaatgtaataccagcaaaaccgtttaagaaataccagcgaatccttagaagcacctcaaataccaccatactttttatttttcgtgacgtgaaatggttacgttgttgcaaacaaagcatattattttgtctatagtatgaaaatcttgccccagcgatctctataaatactgagaacctctagaaagtactccaaactatcatcagccatcactttcccccaccttatcaatctgccctcctgaccctagaggtgaccatcatggctcttgaggtaattatgtgatctgatttttaatttctactttgtttcgctttcgctctcatggattagtgatgtgtgtagtgttattcatacatccacgcctttttcctttcttgaatcagacaccctaagtccgatttggattccgaccctctttcaaactctaagtagtatttccccttataaaatttcttttatgggataggacatgagaaatttgagtccaattcttaacatgtgtccatgtccttagccggatttggattctaactccctttcgaattccaagtagtatttccatgtataatttcttctatgtgatagggggtatgacattacaaatccgactcgaattcagaacaagtttccatgtccaggtgacacagatcaagagtgttgatgccgtctgttctgatcattcatgtcaactaataatcatcacttccttaacatgtaacttatccaaatcataggaggcagagtggccatgatagggattttttatgaggtccctcttggcattagtcctatgatatgcacgttcttcattggtagcacaacttacttgtgtcagtgagacattagcgagcggcaaatcgtgtcgtaaaatgttttgagtgtcatatcctagaaccctaccatggttacatgggcgaaataccttatattataagaccgacacacacaaacacacacgcacgcgcgtgcgtacatatattagctatgatgtattagctacataagagggggggggagggggttctctaggagccgtgatatactgtataacaacaatatagaattgaacaccctatttatacttatatctttgattgaggagagttattgcaaggaagaaaatgcactatttcaacaaattattctctactaggtttccctggatagcttccatatacatcataaactttatgttctacttcaattttcttttctgaaatataactaatatttttcttctaagttctccttccagtcaaacttaatagtttagttttcccaatgtcaaatattttttcctggagtagttttgaacaaaatgttggattttttatatttgcttgtagaattgtgaagatatttggttactttatttcatagaagcacacatatttgtaactagcatccctttgtttatttaaagtacttaaatttcatgttttcaatgtttactgaagatgttccaattatgtcttgcatgatattattgacaacaacaataaatttatatttgacaggggaaaccaggtttcattaccatgtacgccatcacatgctgcaaatgcgagaaatggcgtacgattccaacaaaagaagagttcgaggtaatccgtgagaactaccccgcgaagccatggttctgcagcaaaaagcgcgactgctcatgtgagcaccctgaagatatccagtatgacaccagccgtatttgggccattgataggcccaacatccctaagcctccgccgaagacagagaggctactgatcatgaggaatgatctatctaaaatggatgcctattatgtcttgccaaatgggaagcgtgcaaagggcaaacctgatatagataggtttctgaaggaaaacccagagtatgctgctactttaccactttcgagcttcaacttctcaacacctaagatagttaaggagactgtttccgatagtgcaaagtgggtgatggcgaagtctgagagggaagagcagtgtatgcaactagacgcaaaagaagttccaagttccagcagcaagtagttaccattgtgacctctgaatctacatacgcgttactttaggtgatgccaaaaacttaagacaatatggagcagccaccttaaaaacctatacttctccttccttgtttacctccagaagttatgttatgttttgcactacatgtgcttttgtgtgttgaaccttttcattctacctcatgtcgaatcctgcaaagttctggagctattttcatgtggtgattttggatattttctacatatgctttgtttcgcatgtatccggaacttctcgttgtaggtccctattttaataactatacatattaacgataattaattaaatattagcttaaaaaaatttaaaagtgaattaatataacttttaaagtaacttttgtattttttttttgaaaaaacatatttttcacagtttaggaagcgtgtgtgtaaaatgagagtaaagttgggaaagtgtcccgaacacaacctccaaggtaggtgcacactgcacatcaccgtatgtgtgccggtgatatgattgccgtgtgatgccgtttggatggctgggcaaggcccgcatcccgcaagggtcaaaaccctgtcggtctatccccgtgaaaaggcccgctttgccgtgccgtccctctactctcgggattcactcccgctgtccgtcctcgtttccgccccccacacaccggcccagcaacgcggcccgaggcttcctcttctcgcctcgcgaccgctccgcccaacctccgccgccgccgacgacgacgggcggccaaccgccccaccgtcgagtatggcctcatccccgtcaccggtctcgcccccctcggcgccctccacacaggtccgcctctcgccctttcgcctcctcgatcgtacgtcgccatctacgtttcctcgtactggtatttccccccgcagcttctttggtctgttcctccgaatccccgatccggtttggtgtatctggtggtggccatagcatgctcggttgttggtttcatctggttgtttggcttgagaaattgtgccaaatggtggcgcctgcatgttgcgactatatgcgtggatgcggtttcagagttcagaataggggtttggttattccactaggttattccgtaggatgaaatctttaatcaaatagtatcgtcaatgccaagaacaggtgagggaaggatcgatttagagccttaacttaatctgatgagctgaaattgtgccattttggatagaaattgtaggcgtgttgctttgtactgctgtgaatacatgaagcctgaagtttgtttgtcagcaacgggagtttatgggctgtaaagaaataaaaaagatcagcttgcattggtttctcaaaattttgtttgagatccaagaggaatttagaagcatgaaggataatggaatccgtccaataacaaaaaatgcatatactttagattgagaacataagagttaatgtattacactatttaatacttttgcagttcttaagttctgatgacattttatacattagcgaaggggggctgcagggaatggagactgtagagggttataagagaaagaggaaaatgaggacttttctacttagagctgtctgaaccatttcttcacatcactgggtctatgaaacaattttagatttcttcacaaaatgctgcgcgatttttttaaatttctgccccttctaaaaactgaatgcagaatctttttctatggttgcttttgtgcagccaaacataagtgtgccttatactacatggcatctgcattataccaaaagtggccttaccatatggactctatgcaaaatataacttccaacttctaagaagcagcttttatggactgtaaagaaaaaaacaatgtagcggtctttattatttctatttgtgcgttgggaagttgttctgttatcctatccactagaagtatacatcatgtcattaacatccattttccattagtttgtgcctgatagaattaaaatttacattccaaatgcatattttaggatcagaaaaattattttgcttgatatacaatagtaatgaatggtaacgttcttatttcaatagagaaaacgaggctcctccacagactccattggcatgtatgcagttcaatgttgtgagtgtcacaaatggcgcaaggttccgacgaaggatgaatttgagacaattcgtgagaatttcactgaggagccatggcactgcagtagaagacctgactgctcgtgtgaagaccctgctgacatcgaatatgatagcagccgtatatgggtccttgacaagcctaacataccaaagcctccagcaggaactgagagactagtgattatgagaggtgatttgtctaaaatggatacctactatgtcatgccaaatgggaagcgtgtaagatgcactgcagaggtggataagttccttgaggccaacccgcagtacaaagatcgcttttcagttgaaagcttcagctttacaacaccaaagattgtcgaggaaactgtttctcacaactccgtgtggaagtctggaaaggctaagaagcaggacaagataaatgctttgagcaataacaattaatttctttcaaaagactttatattatgcttaggtgatgctcatctcaggttgtggtgctaccctcatctactttgtgggctggtcaaatctgtttatatttgcacttagtctgttcggtctctgtgatctgtgtgttatgatgcgctgaaccttttctttcttcttcattatgtattaactcttggcaaactttgagatggttgagaagggttgtgggtatgttggccataactaaccttagttataggcatgctcttttgttacatctcacatgtttacttttcatacttctacgttgtgaaatttgatcatataacctccctttagattgaaactaggatttacccacctgacccacacatgtcagtggcacaaaatggtaattccttgatcctcattttccagataggaaaattcaacaacaaagtactaatacaagttgggtcagctgctatcatgtgagagctgtttctatttgagatttctatacatgggtattgctaccagaataatcatttgagatttgatttgatgtaatatgttaggtttccatttaagattagaaaccaagcattagcataaactaattccagatcaggaatgttcagtaacaacatataaaggatagcaggtgtgctgacatacctgtgaccaaaatcgccttcttccatgttgtgaaatggctcttcgtttttagtgtgattgtgcagcttgtgggaagcccgtggaagcgcatgcatcaagtcctggtttgcattgtgagatggtattgcatgaggctttagcagcaaatcaaaaaatacaatgtgtaagaagcagtggaatcagatagtgctgtcttacatgaaacggagtgctcaaatctgtggctaagcccataagcacttcactcatcgtgatcagactttgaatgtggctttttttggattcttgtctcctgcatgacttgcagttccgttctcgcaattcccattttgactgatccacaaaacttcaaagccgcttcttcatctctgcacaatcaaacataatcatatgcacggttccaaaagttagcagaaatcattccaggtcaatcgattcaaaaccatcaggtattcaggtcagatgaacatcatacttttcagtggcctgtctcttgggtcattctcatctcaaagacttgcagtgcaatctgcactgttcctccgacttatcctacttcccaacttttttctctgtcataaaacgcacaatcctgtcaatgatcaagaccaattttcacggacaatgactcaaataccaggtctctgaaaactgcttaccttccatagcctgtcattcaggccctttccatcctttttctcgccgggctaaagaaggaaggcggccaaattttattcagagttgaggtagttcgtcatctgaattatcttctgtttttggtcgagcatttgacgatatcttcgtatctgaacagcagcagaagtttgccctcagaaaaatcacgagccctcacaaaccctgttctgccactccctaaagtagatctcaatagctcttaaaaagaagagtagatctcaaatcctcaatacagcttaacgtgccaaaaattgccaacgaggctgaaaaccatggccaatttgaccggcactgtccttgcaaacttgttaagaattcgctacgaaattcagaacggcagaacatgtagtagtatacaagcatctgtggaccatctttgcgaaggatccagggagcagaactctgatgaaccgtggccttctaacagctgcatttgtcttgttattaatcaaatctgccgaagtgtcaacttcacaaaacttcaaaaagcaaaagttatcagtgagtcgtagtcgtagaaacatcgacaatgcaaatctaagtagtagacaggttggtctccagaagaatttatgcgatcttctgtaaaaaaaaaaaaccagttgtttgttgcgacagttgaattgataagttgccagagtagccaccttcgccctgagaggggcatctgatcgaacaccttcacggcgagttacgcggcgcccccttcgtgcctgaacctgaacacgagaaaaccacccccatgacaacgccatgagcgcgcgcgagctccgccaaacacggccgcgtgtgccaggaacgcccggtctcccgctgaacctccatgcgccacaccggcacactttcgccgagcgcgcccaacacaaggagcaccccgcgctgccgtcgccggcgagcgtgcgcgcgccgcgcgcgagtggtggataccttggcgtaggagtgggtttcgtggcgtatacctgagctagcagtgccggattagtaatgggcaatgggcgtggagaacctagggcaccgacgatgaagaggcacggcggtcggagtcctccagaagttgaaatgttgaattctttcctgggaaaataaaccggcggataaaatcgtgccacacgcgtcaggaaggaaagctttcaatcgtttcatttccttttgagaaaaattgcttcgcaccaaccatcggggaaaaaaatcactgcacagtataaaacagagatgttctcaaattagtatcatgtaaatgttcatgtttgtttcatatcgtgtccaaatatttggatgaatatatatgtttctgtcttttgtgttcggtttattttaagaactgctaatgtaaggcatatcaattttgggatggtataaattataggagatcgatccgtattcgcggcttccttgagacacctttactttgcctcatctgccacgagcatgcataccagatcctcgtgtcttcgtcccaatcaagtatccatggttcaagtatgtgataccttgtcgacgttgttgccctctcaattcatccttggtatcttgttggcatagcctcatccacgatgttacctcgatactttatcagctcaggccttgttaggtcccactccaaaaattttcaccatatcacatcgaacatttgaacacctgcatgaaatattaaatataggctaaaaaataactaattgcacatattgcgattaatttgcgagacaaatcttttaagcctaattgctccatgatttgacaatgtagtgctacagtaaatatttactaatgacggattaattagacttaataaattcgtctcatagtttacagacggattctgtaatttgttttgttattagactatgtttaatacttcaaatgtgtgtccgtatatccgatgtgacacgacaaaaacttttacccctagatctaaacacagcctcagtcgttttgggagtttgggtaggtggtaccttgtcggcgccatcatttccaaaattccacctttgtaccttattggagtcttcaccatggttcatcaatccctagtactcacgtattattgctagcccctttaggcccttcccagtgcgtgtacatggcatgttaccttcacctgccatattggactcgcttacgtgtcgacgaggctcgcgcctctgcttagccgctcgccccttatctgggagacgagtttcttcgttgcaacgagggcgcgcagcgcaagaaaccccctccgcccctgcaacgtggaggtcgtcgctccgattcgtcgcttcctcgcgccgccccgaaaagtgaatccccaaaatcaccctcccaccccaccgattcttgcctcccgcgcttggatttgggggagaagcggtgcagtggatgggcgaggagaagtggcgcagattgggagaaacggtgcggtggatttgggaggagaagtgtcaaatttggggagagaagcggcagatctgggaggagaagcgcgtggtgtggtgaataagaagaagaagctcggtatttttttaaccgaaggggggtgggtgggacggggaaccggcccgcagatgggaagaagtgacgggatttttttctgtgtagaggataagcatgaaggggcaggtggggaaaattaactctgttttcgttcgactgggagttccgacttgatagcgtattgtgggtcacgagcactgtggggtgtgtggcctactggccttcgggccaattttatcgcacaaatgggctagaagcgcgctatgcgtgccttgcactgttactgcccttacaagtataatgtgtggtactattagagtattgttccataagtatcggagttgatacccacatatatcattgctggtacatatatggttagttttgttgatctaatcaccacgatacaacatatcatggaagaacgtagggagagagagagaaagagaaaagggaattgggtcgttgcgctatcaacatggagaacaacggatgggttattaaggaagggatgaagggaatgtgtaacgccccgattttcgttcgggattaaaaatcattaaataatgcattttctagaaattaaataaaagttaagtcaattcaatcaagtgaaataatgggagaatttgaaattttcctttaaaaatcattggccgagaatattttgtaatattctttgtgccctaaaatactctccggatttttccgcgaattttcggagctcaagaaataattataataatacaaagttcatttaatcaatttaaataaaaagaaaagaaaataatcttccccttcctccctttcgggctcggcccaaattccatcccccttcccctccggcccgcctccctcccctctcctctttgggccgctcggcccagctcggctcctctccccccccaaagtccagaaaacccccacccggcttcccttctctcttccattagctgacaggtgggacccgcgaccccacctgtcatccccttcccctacctccagccaccccatcgccatggaccggcaactgccgccattgccaccccaccccgccgctaaaaccgccggctctcgccttccgcgcgcacgtccaaccgtgcggacatggtcgccacccattcctcctcattttcctccacttttccccaaaaatcacgccagtttgacctccctcgagctccacgtcgccaccccacgtcgctggccggttgcctcctgattccggccctctcggccacgatttccctctcctgagcctatataaacaccccatgcgaccctcgtccatttccccaattttttcgtactccccggactctcccccgctctccccacgcaaaaccgagccgtcgccactctccggcgagctccggccttctctagccggcgctctcgccatcgccggactgcgccgtcaccacca

SEQ ID NO: 12028 - DNA, 1871 bp, Oryza sativa
agatccgatcctggtgatcttcagccccggttggtgctaccaaccgggactaaagtcccacccctatagatatgtcttcttccttctccagctgcctgagcaagcttcaaaatttcttcaaaaaagaggggaggtcatgccaaaatttttattgaatttattttggtgattacatacaaatcggaggtgcctaaaaggtttgcaacttcatcgtccaatgttttttttgtcatactacatttgcacctatgttttgcacacttttttttctccaaaatttagttgtaagttgatgagagagaaaatgtgtgtggggaagaaagaatatatagaaatttagttcatttgctaaacaaggttttataaaatagttgagaaggaaaactctagtgaaagttaatcttaaataatagaaaacaaactaaaatgaaaattaaaagaagtaaaacacattaaaattgtttaaaactttacaaatagtatttaagaattatttagtgtaatattttatgatttttgtatgaataaagatatcttataattattgtatgactgtcattattgtaagaataattatttgtgtacggttttttttgactcatgtagatggatcggcaatggatgtacgctgaccggcggtccaaagagtttattgacggcgtgcactattttttgagagtggccgaagctaacaggcaaaggggttttatttgttgtccatgcaataagtgtaagaatcagaaggagtattctgcatccaggactatttatttccacttgtttgagtcggggttcatgccaagctataattgttggacatcccacggagagcaaggtgttgaaatggaagaagatgaagtggaagacgacaatattccggactttgctcagtatgatggatttgaagaaaatcaaacgggcgaggaggaaatagctgctgatggtaacgacattgcggatgatcttggtcagatgttgcaggacgccagggaggactgcgaaagtgaaaaggaggcccataaattggacaagatgttggaggaccacagaacttcgttgtacccaggttgcgagcaggggcacaaaaagttggataccactctggagttcttgcaatggaaggcaaaaaatggggttagtgccaaggcatttggcgatttattgaaactcgtcaagaacattcttccggggggaaacaaattgcccgagacaacgtacgaggctaagatagtctgcccgttaggactggaagttcataagattcacgcatgtccgaacgattgtatcctatatcgcggtgaggagtatgagaacctagaagcatgccctgtttgcaaagcactacgatacaagattagacgagacgatccaggagaagttgatgggcagctaacaaagaagagaattcctgctaaggtgatgtggtatttccctataataccacggctaaggcgtttgttcaggaacaaggggaatgctagaatgttgcgatggcacgctgaagagcgtcaacaggacgggatgctgagacacccagccgatggttcgcagtggcgaaacatcgacagaaaatttaaagaatttggaaaggatgcacgaaacatacggtttggtttgagtacggatggcatgaatccttttggagagatgagtagcggccatagcacttggcccgttacgttgtgtatctacaacgtcccccctggctatgcatgaagaggaagtacataatgatgccgattattattcaaggccccaagcaacctggtaacgacatcgatgtgtacctaagaccactggtcgaagatcttaaacagttgtggaagaaggaaggtgtccccgtgtgggacgaggacaaacaggaggagttt

SEQ ID NO: 12029 - DNA, 918 bp, Oryza sativa
attcatcgaccctcggaaagtaaacgtcgcaatgctcgaccaatatccacaagaaacagaggcaatctcgtccatctcctgaaggcgcagcattacaagacgttcatactgttgccatacaacacagagttagtttaattttactgtcttcctacataccaaatttcattcccgtacgaacttgctaagtgtttcatatgtaatgcatcccacgcacattgcagattccactgggtgcttttactcttcgacctggaggcctgcaccgtcaacgtatatgactcaatggataaaaaagagtctacgtttgacaaggttttcgaacttatagacaggtaccgtcataagttcctttgttaattaagaaaatcttgttatgttaattgctactacgaatcatagctttaaactccatgtagggcttggtatcggttccgtcatttggtccgcggcaaatggagagaaagacttaggcggaagttcaaatttcctgtgagtacacatgctctacatttatatttctccgattcaaatacatacaagtgtatattaattagatctctcgttgtttgtcatttatttgtagtgcgcaaagcaaaagcagggaactaacttgtgcggctattacgtgtgcgagtattgccactgccttgcagaccaaatcatcaccacaagagagctcgatgtacgtacaaataaattcaaaatttcattacgtagcgatttcttgtttaattactaatcaatttcatacattcatatagtttattcgcatgagggataacctgaccacacacaagaatttatcgcggcggttcaagaacaactcatgggattcatcaacgaagaaatccttgatcccaagggtgaattctactacgacggaaacacaattcaccggtccttagcttctgagct

SEQ ID NO: 12030 - DNA, 6560 bp, Oryza sativa
aaagatacactggaagcacgtaatgatctgaagcatatggaacaacgcggcgaccttcacccggaaccaaaggagaaaggaagccattacttgagtccagccagctacactctaagcaaggcagagaaggaaagtatatttgaatacttggagagcataaaggtaccgtctggatactccacgaatatcaagcgaataataagcatgaaggagaagaagttcacaaacctaaaatctcatgactgtcacgtgttgatgacacaactgctaccagttgtaataaggggtatccttccagaaaatgtccgggcaacaataacaaagctatgtgcattcatgaacgcaatttcgcagaaggtcatcgatccggatagattagaagcccttcagaatgaagtggtgcaatgtctcgtcagttttgagttgatatttctaccttcatttttcaatataatgacgcatctgctttgtcaccttgtgaaagagatccgtattctcaggcctgtgtacctacacaacatgtttcctttcgagaggtacatgggcgttctgaagaagtatgttcgtaaccgtgctcgtccagaggcaagcatcgccaagggttatggaacagaggaggtcatcgaattttgcgcagaatttatcgaagaccttcgcccaatcggggtacctgaatcacgccatgaagggagactacggggaaagggaactctcggaaggaaaagcaataatgacggtagacaacaatttattccgtaaagcccatttcactgttctgcaacactcttcattggtagctccttacatcgaggagcacttggctctagttcgcgccaggaacatcggtaagtccgatgcatggattacatggcatcacattgatactttccccacgtggctacgacaacatctcatgggtaacgagtcaatcaaccaacaacttgccttcctggcgaggggaccgtctgggtcgatcgcgacattccagggatatgagatcaatgggtacacattctacacgagagcccaagacatgaagagcacgaaccaaaacagcgctgttcgtgtcgatgccatgggacacgatgcaacaactgccacgtattacggtgccatcgaggatatatgggaacttgactatggtcctctcaaggttcctttgttctggtgccaacgggttaggttgactggtggaggcataatgattgatgacagtggtatgacaactgttgaccttaacaaggttggatactcggacgaaccttttgtccttgccaatgatgtaacgcaagtctttttcgtgaaggacatgtctagcaaaggaaagaagggcagagggcctaatgagcctaagcgtcaagtggttctcccaggcaaaagaaaaatcgtcggagctgaggacaagactgacgaggattacgatcagttggataggcaaccccctttcacggtgacgattgaccctagcatcctcctatcaaatgaagacaccccttactcacgcagcgatcacaaggagggaacaatagtaaggagaaagtacgtgcggtcaatcgtcactgccgatgtaatgccgtaattattgtgtacacgatgtaaactattttggatgtattgattatccatataaatcaattgatgtatggcataatttactatcattcatatgctacatttaattgaatatcattcatatgctaattataattgactagaaaatttttaaaagtattaaatcattcatgtggcatttacagatgttaattagagtttttcacaatttaatttactatctttcatatgctacttatatatgactattcgaatttttaaaagttttaaatcatgcatgtggcatttacatatgttaattagagtttttaacatttaatttaatataattcctacgctaagtatatatgatgattacaatttttattaattttaaatcatgtagtatgtacatataaatcttaattagagtttttaccaatttaataatatcattcatatgctaagtatatatgattattagaatttttattaattttaagtcatatatttgcttattacgatttatccacttaatttattacagacaaaaataatttttcaaagtaattgtcattaatctttgtactttaaataatgttaatgcattaacttctattttagaaacacatatgtaagcaaaaataatatgcagtgctataatctttagtccaggttcttaaccctaaccgggtttaaaaagaatttggaaatagcgggaaaatatatttagtcccagttgatgagaacaacgatctttagtcccggttattctcaacaaccgggagtaaagatatctttacttccggttgttctcatcaaccgggactaaagatcgagggctatatatattcccgaagcgcgccctcgtcttctccaccaacacttaacgttttcggtcgatcgatctctctcggcctctctccttcgccgccactgcctagggcaaatccccgcgccgacgccaccgtatctcaccgtcgtctcgagctcgtcgtcctcgccgccacttccgcctcctccgccgccgccgcatctttggggtgagagccgccgccgcctctcccttcatcgatctccgatctcgatctctctctccgtcgtgccgcccgccacgagacgccgtgccacaacgacaccgcgccacgccgacgccgcgccacgccgccgccttcgccgccgcgcgcgcaaccccgccgcctccacgccacgccgccgcgcaacgccgccgccgcatgcaacgccacgccgccgccgtcgtcgccacgccgccgccgccgccaccgccgccacgccgccgcgccaagcgccggaccgatgccgccacaccgccgttaacgaacacgtgaacgagaacgaacacgtcaatatacgttgccgcgagaacgtgaacgagaacgagaacgatcgaacgaaggagagcgagaacgagaacgatcgaacgaattaacgtgaacgagaacgacaacgaacgtgtacgagaacgaacgtgaatgagaacgagcgaatgaatgtgaacgtgaaatgcaatatatatatatgttacttcgcatttatcctaatacatattttttgtatcttgcagaaaagacgtgttgtcggagtcgtccctcaagccggagtgaagagctagccctagaaggtattcgtgcaggcaagtgacgtaataatataaatgattgttatatttgtaatgcaattaagaatattagacttgtaattagacttagcatataagattgtgtagtgttctaatattatttgagttttaatataagattattttattgcaaattagacttagtatgtaattattgactacggaattggtgcgactcctagcaattgactattgtagtcttaattagacttagcatatacgcacgaaacacttagcatacatgactattttagtcttagcatgtaatattatttgatttttaatataagattattttatttgtaattagacttagtatataattactgactacggaattggtgcgactcctagcaattgacaatttttgtcttaattagacttagcatatacgacagttacacttagcatacatgactctttcagtcttagcatgtaatattatttgagttttaatataagattactttatttgtaattagaattagtacgtaattattgactacggaattggtgcgactcctagcaattgactattgtagtcttaattagacttagcatatacgcacgaaacacttagcatatacatgactattttagtcttagcatgtaatattatttgagttttaatataatattattttatttgtaattagacttagtatataattatttactagctagggttgtataatatacgtcacctagacttagcttatatcacgatttgtaattagacttagcacgtaaggttgtgtagggttctaatgtacgacatttacacttagcatacatgacttagattgttaaaacataaatgtctcgtgacttagcagatgtttcttgtatcaacagatggctgaccgcgatgaggaacagatattgtacgatacaatcgcggagggaagcagccagtactggaatgaagaagaggggaacgaggatccaaatcagtacttgaacgagaaagggaacgtggagagggatgcggaggggaaccagcaggggcacgtggaaagggatgtggaggggaaccaggaggaggaggctagtggtagtcaaccctccgttggacagaagagggcacgcgggcaacgaggtgcagcgaagaagcttgagggtcggcacatcataatggaagtggaagaagatggacgtcctagtgccccggccgtagccgccaagaactatgtacgtcacagcggttgggttgtgcgggataacgtgcctgtcagtacggtgtactggcgaagaacaaggacacgcggagatcatgagagctttgtcctagattcggagaaagagatgctgtggaccataatgctcgagacattcacccttcccgcgggtacagaggacaaagtgaaaaggtggactctgaagaaaatggcagaacagtttcagagcttcaagggagagctgtacaagaaatatatcctgaaggggcagacaccgaacttcgacacattcccaaagctaagggatcactgggacgagttcgttgcatataagacaggtgaacaagggcaggcgatgatggaaagaaacaaagaaaatgccgccaagaagaagtaccatcactacttggggtcaggaggctatagcgtcacgatgccgaagtgggaggagatggaggctatcttgattgagaggggtatcgaaccggcaaccgccaattggccggaacgatcgaagttctggtactatgctcatggtggaacgctcaacccagctgatggctcactggtcttcggcgatcagatacgagaggctgcgcgacgactaacagatgcagtggaagcctcctctcagggcacgttccgatcggacagatatagggacgagctgacactcgccctgtagactccagagcatccaggacgaacacgagggaaaggggtgattccttagaagattggtttcaaggaggacatccacacgtacaggagtcggatgaggagtaagagagataccgaggcgaagattgcagatctagagttccgggtatcgagctacgaactcagcatgcaagaggaggtgacaaggaaggttgatgaacgcatagccgcacatcggtcccatgatccccagccgaccattcctcctgcaatgatgagcccgtcaggaaaccgtagcagctgtgccttaacggggcaggtaggattacagagcatggacgccattcaaacacaggacgaatcgacctgtcccgttgatgacatcactcagcagacaccatctgagctgcatattccttacaagaacttatcaataaaggtaagctcgtagtttatatattttagatttagccattccgctagttgctgcttatatatgttgattactaataaaaaatatctcacaacatgaaggtggcgtcgggcatggccatcccaacggacccttcaggtacttaccactgcaggccgattccagcaggatactcgaaggtcgaagttgagttggtcgaaggcgcatacgaggacctcgagctggattaccctggaggagacggtgagacgcatctacgagacacaagccatgccattattctatggcgcaggcggtacatcatcctccctgggcgacaagcggcgtctcgtgcaccatctcctcctcaggatcttgcaccgtctcctcctcatgatccgccagcaccgtctccaccttaggctccagcaccgactcctcctcaggatcctgcaccgactcctcctcgggctcctacacctactcctccgcaagctcctcttccggcacctcaaagtcaagggcccccccccagctccaccgcctgcccacacaagggcaacgaagaaggcgaaagttgacgccgccaagaacaaggacccggggtacgattgcacgcaagaggagcttgacgcttacgttgcatcagaagtcaagagacaattcaagcctcgaagtccagaaaagaagattcctatagaccctagtgtcaggaacttcttcaggggtatgtctgcatctgtcaaggaggccatcaagctatcggactatgagcgaacgctgaagaaagcatcttctggaaagtccaaaccagtccctcagcttggagagcgaccaaaccaggagatcgagccgttggtgaccggtaaagaaatgatgatagaacaatttattactgacaccggtctaactacggatcaattgctaggagtcgcaccaatcgaaaagacggaagtgaaatacatgtacgaactcggtaaaccgcttgtcaagcctgagctgctgcagtccctacccacacaaatgtacaagttccatcagctgtacatggagatgagcgccaccggtagagagatgatcggagcgaggatcagggaca

SEQ ID NO: 12031 - DNA, 3828 bp, Oryza sativa
cggtgggtggaccggaggctgagggactcgttcccggtggaggcggcggaggcgatgacggcggtggcgctgcggtgcgtggcgagggacgcggcggcgcggccggacatgtcgtgggtcgccgccaaggtgtccaagctcttcctggaggcgcaggattggtccgataagttccgcatccccaccgacatctccatctccatcgctcccaggtgaaggtgaaaccccacccacctcgccggagactcactcaccgcccaccgcacctcgccggagactgactgaccaccgccgcatcgcatgcatcctcacagtaaaaaaaaaagatgcaatttttttttacagtaaaagatgcatttttttttgacagtgtaaaggatgcttttttcttcttttgtggttttgttgttcatcaggcgatgtatatagatagatgttgctgtagttgatgtgcagcgcgattgagatcctcctatgtagatctgtgggtccatatgttagtgacaacggtacggtgcagtcgactgcagaggatcgtgatcctcacttctagtacaaatttatttattagtactgttaatgtaggagatttagcctaacagtggttgacacgatgtgattgtgagtgaggtaggaattgttaggcgaaaatgcaatcacacatgctaacatttgaaacagagcctgatgatttctggatgtacatatatactatgcgtgaatggaacatagcagtcaattggatgatgaatacttaaaatctaaactcgaaaactatcaatgtcatgaaaccaattttcctatagtttttaatggtgcccgtagaaagttttaaagacttgcaattgcatccttttttccagcgtttgatgtggacgtgtctggtaaatctggttttgaattcttcgtcgttccaacggagagaaatttgcgttgcctcctgatcatccatccctctttgatagtgcgcgtgtcgtaacaacgaatctgattctcatctcgagcaagatttttatttttctttttccgcttgcttgtcatatccacagttcatgatctcgtccagcgaacatattctgacgctttaacaacgatcgaatattagactgaagtggtaaaaggttgagaataataataataactcttactccatccgttttacaatgtaagtcattctagcatttcccatatttatattgttgttaatgaatctagacatatatatctaaatagattcattaacatcaatacaaatgtagaaaatactagaatgacttacattatgaaacagaggaagtataaaggaaggatcacaattcagcccatgctatcctctcctttttcattttaatcgatccaaaggcaagcactttgaaaccttaaactgagctttacaacgcatagaatcaaacattcattctgattagctcagatgagacgtcaggttatcagatcaacgcaataagaaacaacagtttccacaagaagaacccaccgattcttcaaccaccgaaagcacagatgcaagcagacacaagaggataaaaagggcagaaaaattcagtaatagcaggttcaatgggactacctcttgggatataactatgttagcactggtgctcactggatggaaatttggttcaaaagcattcgattctagctatttttattggagtccttctgtctgaacttttctgaatttaggggggaggacgggagaacagttttcattcacatcctctcatatgataagagatccgcatggtaaaaccaataatacattacaacaagtgttaatccaacatgaacgatgatgtacagttccatcggctggaaagttgtacacatttctatctgcttcgctgtttatggacccgagctgtaggcgaaaatgccggttagtcgcagccgctgtagaagacatgcgccagcagatcagatcacagctttgctcatcgtcaccaccctctcagtgactaatcaaacaggggagaaatggaggttagatacatttcagcattagtgtcattcatttattcaagaatatattgttgatatttcaagaatgtagataattctaatgtaatgcagaattatgctcttgtactagttttttacatctgatctagcctcaaaaagtggacctgtacttacctaaccaacttcctatctttgtattgatactgccacgcgcgcttagtgggggacaaaacaaagtaggtcaaaggcaatagggtgtaacatcagatatgggttgaactgttctgtgaggtcaatgtctaacaccaacttcgtcctctatgattacaacatgcattgccatggcatacactggaaatgtaatctatcgaggaagaaatcgaattgtctgaatgtattatatagcaacctcgtgaatttttcatacaaccagaaacaaataggatatcaccaaaaatggttggcgtgcgaatttcaattgtaagagctaataattagtattgctgagcattgtatttctatggcaatttaatcagagtggaagtcaaattgttggtaaagtaggcagttgcaggagataagcttaagcacacaatcacctcagccaactgaaacctgccacttcattctgttaaaaaaaagagcaataagtgccctaacttctggaattatcaagtgcacaggaattcctgagcaggtttggtggtcagacaagtgctcagttaataatattacattgagtgcaaatctttctttaaaatgttccatgaacgtcacgctaccagttcaaatcattttcacattttttaaaaaatatgaaaataaatcgaaacggaacaactatacagagcaacagtggcatgtagagagcaaatatcagcatgtcccttttttttggaagggacactgcagggaatcgctatatattgtataaataataaaaatatctgtcacttgcatactactagttatgcataccttgaagccggatttggaattcgtggaaccacccaacattttcctcgctggttttagtatttgaaaagagcacatcagtgtatcatctacactcatcatggcaccagcattatcaaattctccacagtaattaggggccgagaatattgttacaagttggcggttagcaaagaactcgtacccatcttcgacaacctgaattccaacaaggcaagaataactgataaatcaattcacttggtaagaaaaataaaaaggtcaggtaattgtgagcatggggcacctgatgggctcgacagatgaggtctaaatcatgcttctcaagaaattcagacactttgtctggcccgaatgtatatgagacacctcgatcattcatagcccacccttgtgcgtcattggatggatcggaccaaaggagatcacaaagtaacccagtatcaggcacatccgtggggcggttgaggttgagtatttgatccagcttattcaactctggagaaagacctccgtgcatacaaagaatcttttcatctatcaatgctgccactggtaagcagttaaaacagtcagtaaaagtcttccagagttttacactgaatctgcgcttgcactcgtcataaaatccatagatgcggttgaccgatgcacattcatggttgcctctgagtaggaagaagttttcagggtacttgatcttataagccaaaagaaggcatatcgtctcaaggctttgctttccccggtccacataatcgcccaagaagagatagttggactgaggtggatacccaccataatcaaacagcctcaggagatcagaatactgtccatgaacatcacctgatcagaagaaattatgcaagatta

SEQ ID NO: 12032 - DNA, 2294 bp, Oryza sativa
  unsure (1)..(2294): unsure at all n locations
cgcatcatcatttgtttgtttaatcaatcgatcttggctcgtggacgatactacatgcagtcacgtcgctgtacaccatgcctgttgtctatagctcgcatgctgtttaattgcatttaccagcacaattaattatcccgatggagtcaaccgatcgatcctttccttaattttctctctattttagtctagatgtgtgcatgcaaatattgggattttttgagagaaactaccctaactgggaagttgttcgtgctgaataattgggagtttttgatcgacttaattaggtactagagatgacagatgacttggtaatattattccacgtagtaatttacatttgcagtgcaacttgaagctagttgcatcataatcgatggatcgtgcatgcgtgcctgccgaagacggcagccagtcggcatcgatcgatcgatcatcaattgggttgaatttcagacagccagaggtcggtcaggtcagaattggatgagccacttgatcgatcacttactcatttctatgctttcagatcgatctagtgcactgcatacataaggcaggcatttttttttcagacagtggatgaagctaggaagaggtccgattaactgaaaaaataatgagtaataataagtatatactaattaactacaccattcattgtattgcaggcaaatgcagttcaacttgtgttccagcaaagatgcaagtgacagtatactactacagtaagcggcagcgcactagtcgtcgtcgttggcccaaagggtcaactagatagctatagggatactgtgattcaattgtctcctcttcagggttcagacgagctagctagtcggtgaaaggaccattgttctactgaaaataagcacacggatcaatagagacggcatatatcccttccttcaaacccgatcaacaagatccatgggatttttcatactttgtttcatttatcatttgttgcaaaagaaaatgatttgtagagattctgaatttaacttgtatgccatagtttacttgcaatacctaataattaaactaatcttttgatgcagatcatatgatgagcctaggcatttaaagatgcacaaaaatcgaaagtttgactaaaagcgtatctaaaacgacaattataccccatgaggagtgtgtttggcttcaaccaagaaaaggtaagcatgtgatttgtgggaatgttgggccctagcacaatatgtttaattccatagcaattaaacatctcgcaaagcacaaaaagatcagtagccgtttagaaaaacaaacagcgaatcaatcactagaaaaaaaaacattatcctcttgtttttcaactggaatgaaccaccaacaaagaaaaaacaacattggcaactatgctctcatgaatgaaattatagttgaaacttatgcactcctacagtcctactccctccgttaggtaataagttcatttttaattccttttatttattccaaaataaattcacttttaaattaatcaatactacatcgaaatttgtaaagtaaagaaataattacattaaaagtagagtagataaagtgatgaatagttacatcttggatttaataaagatgagtattttagtcttttgttgtattagcatgtgtgaaataaataaaaagtaaacttagacctgatttagttcctaactttttttcaaactttcctagacacgtaaacttttaatttttctgtcacatcgttttaatttcaatcaaattttaaattttagcgtgaactaaacacaccactattttggaaggtagcagtgaaaaacaaagattgcaatgcaaaattgcaacatgccaatatccagttgggcacatttgacctgtctctgacctgacaaccctccttgtccatcatcatcttcttcctcccctcccctcccctccctctcatcaagggcaaaggacaaaggcgcaagctttattagctggccgcaattcaactctccacagcagcagccgcctcccgatctgggcggccactagctcaaccaatcaagcaaccaagcaagcgagctcggagctcgtcgcctcgcccatggttaccctctggaagcggaaacccaagcccaatccggagccggaggagaaggagaaggaggaggagaaggatcatcggatgtgcaagaccaagagctccgtcgccaccgccttcatggccgncttcgccttcaccggcaccaacccaagaaagcatcagcatcagcatcagcggtcggcttgcgccacggcaacccagtacttcaccaccttct

SEQ ID NO: 12033 - DNA, 16572 bp, Oryza sativa
cagttaggtcttcgtcagttccagcatcaggaggatcatcagcatcttcttcgctaccaaaaactgaataatcatcctccataagctgaaaagtcagggtctttgttaggtcgaatttatggcatcaccaatctactcaaaccagtgttaaggcagtgttgtatcacatgtaattaataataaaacattcgtgcgaatatagacgagcatctaatgctagctcgtccaatttttgcactatatgctggaatatcaaatgcaaatgatgaaacaaacatatgtaaggattgaatagatccatgtctgcgatggcagcatgtttctcctatcatactgtaaacacaccaatgcatacctcttttgaagggcaatctgacacctttggtgaactgcagcatgaggaataatatctgccgcccgtttcaatgccatcagctctcaagtcatctacacttcctgtatggctggtgccacctgtgtcactcatccatgcactgatcccgaaagatccgaactggagattgactggctccgccttcccaaatgtatcatacatgggattttttgttgatttgtcactgcttgtaccatcgagacttccattgccattgtttttatccacatgccaagctttggtgacactaccgtcagtattaaggatagccatcaaatttcttgaagatccctgtctttgtatcaactgaaacattcccttggaacccagtgagttagcagcacgctggttcctgtattcctcattcactacagctacagtgtttgtgttgaggtcatacaactgctccccagcttctcgcctgcgaagacagctgaaaaccgtggcgtgtatggccgccacactctggtcaacattagtattgttaatcttgggcaccagatgcttgtctgcacggttacaaaggtagtcctggattgctctgatgttccggatgtatttgatatatctgttcttcgctgggtctagtgtcatgtactttgcacgtacagcgaatcgctccatgtgtttctcctcattcgcaatgtataccataaatggtattatggaagggtgtttcttcattagccccatctgttggaaaatgaaaatagaaaaggctacatcagttctctagtatgcaacaaagtataagtaattgatgcaaatatctaactagtacgcaacgcaccacaaaattgaggcttagatgaactccctcaacaattacagattgtttctgctcctcccaggacgtaattaatctgtccaggctgtctattaccatctcgctttgcgccttgaacccttctattgccatttgcttgctgccgatcaactccgttctaggaggcaattcggaggatccatgatgagctttatcatctgaagtgtcgtctctgccttcattggtattaggatgagaaacaatgtcaagcttctgtgccttccgttttgcctttgcctgagcaactgcaacagggtctaagcattcgcctgcatgataggttgatgcatagagaagaggattttgcttctcatccgtaaagcctctcatcatatggcgtatggaatcagtagaaactactgtcgtgatacccaatctactaccctgagaaaaacagacagaccatatcaagtattaatcaagacccagaatcattcattgttcggtaagcgatacaatcttctgaaagcaatgaggtaattgataggtctagaaaggattttttttttcaagtggattttgttctacagacgttttgcattatactttaacatgtaacaaactactactatgttgctggtacagtagagcattcactcatccggaattgtatggttcgcgtaagtgataaacataccaacaaagatgatagcgtagatttgccgcatccgctagtcccacataagagtactgtcactgattcctttctctccttaattctgaacagaacaattggaaaatgcacagttgcacaaaaccattgttatttcaatgcattcaggtagctttccattggctgtaatgaactgatgattggtaactcattgtaacttctgaatttataaatgcagaaacaaggaaaaacatgttacctgcaagcaagaagaaagtcagccttctggtttggccccacatacttgtatgaagagagggcatcacatacaacacttaggaacttctccctagaaacaacgatggttgtttgggtcttgtataactcgaagggtatgctactaagagttgcttccaaaattttgggcttcagcatctcaacatcttttacaagggaaggggcattttcttcattatctgcagtatctgatttggatgcatccaagaattcactcctcatcacattgaacaccctcttgctaatctgatgatgccaaagaaagatgaaaaagaaacttcttatcttcacaagtcaagagagaaataaaaaaggacactttgtgcagtctgatctacagaagtaggcatcagcaattagtttcttttgcagctagccaaattgtgccttcagagaaaggaaaaagatgtcaaacagccatgaccaagtcagggaagaacaacgcataccgagtgggaacccatgaccaactcaagtcaattgctagatactttctagaatggcaacccatcaaactacaggcccaaggcaaaaagatcaagcaaggcaaacaggtctacatcatacagcatggtgttgtctttgtcgatagaacataataataccaagaaaggtacagtaattctcatcagctaggcaacagtttgcatggcagtatatctctgacaatgactcgtcacaaacaagtatatttccgaaaggacaagttcagtatgcaacaagaacatatcttgaaagatatgctgggtttttggacataaaaattgcgcggaatcagaaccaagtgaggcgctgggtgctcgaatttgacaaaggttccggtttcccctgcaaagaacgccctcgcgcaaaaagatatcgaaaatgatgtgagagagtttgatcaaatcaacagcagtgtgtgtaaagacctgacttgagagagtctggatgtgagctaagaacaaatctgcacatcaatcactaaaacccgtcacctttctttgtcaagatcatccatccccccccccaaaaaaaaaaaacatacaacatccagatactatactcggcatgcaattctatcaattaaaccaagaacaagcaagcaattcacagaaaggagcaaaaggatctatcacatcagcacgtgcaaaccatacacaacgctggatacgagaagcagcaaaatttccagtcgaatcgaagcggaagaatcacgagagagccaatcagatcgccaccagttggatcggggccagattaggcagaaattaagcgggagagagagagagagagagagcaggcacagtttttccattgttgggatcaagatgaacaagaagatagaaagatagataggtattataccttgaaggcatggcgagccttgcatcccatgagttggagggtgccctgaagcacggggcgcgtgtagcggaaggcgcggcgagcggcggcgtctgagacggcaatgtagaggagcttgggcggcggcggcggcggcggcgcctcctccgccatgtcgtcccctacctgcaaaatcaagaatcaagaagaggcctcccgcggcggcggatcaaagcaaggcaagaagcggcagcggcggtggcaaacctcgtgctcgtggggatgaggaggaggaggaggagaagggggttttgaggaggcgcattgcggcggcatgggcatggcgatggcggtgcgcgggcggcggcaggtgtcacgacgtccacgcagcgcacgcccatggcgtacacatggcctcacccctctgccgctctcggcgtcctcttctacccttcttcttcttcttcttcttctctctcttgtttctctctctatctgtgcttgctttctctctctctctctcttgtcttggtttgattaaccttcttcctcttgggtcttcgcttttggatttgtttttcgcctaattttctcctaattttaagggggggtcattaaatctagtggagttgtgtgtgtgtcctaccttattcttcttctacctcttctcttctcttcttctttgttccgcttttatagtgttctgttctcccttccttgttttggattctttgcttccttgcatcaatcaaatgcttccttccttgcatgtgtcgatgcctaatgtgtgtgtgctccaccctttggattagatataacatgcaattcgagctcaaatatattacttttatgtatccactctttttttaaaaaaaagaaagctttacagattgaattgtactattgccctgtttattttagctaataattattacgagcacgttttacaagccgttaattagtgcgatttttatattaaaaaactattgaacacttttttgggctattttttcaaatttttaatatttatttcgattgtttatggccttaagtaattgtcatgaaattagaatacgtatgtcaaacggcgtaggggaaaaaaaggaatatatgcaggtttcactttttttggtgaaagtagccggtcaaaaacgtactctctctctctctttgtttgacaaaatgttaatgcaccatgttatgtatggcattacaatgtcaattctacgacggtgcaaggatttgaccgtgcaatgcttgttccaatggtcctctagcttccttgatgatactagctgtttttgctaggcttttctacaagggaatccaagaaagtctttagcttaattagcctcgtctattcttctcttcttagttgttgttaatattaaacagcaatgttaacagttggtcaatgtctttggtgtataggacacaccttggctcgttgttcttgattgctccaattaatagcacaagatatatagtaatactaagagttaagtaaaaaaaaaaagtctctggatgaagaagcggttgcagctgcacaacgtgatgaggagcactcttgtgttaatccaaagacgtggacaagacaaatcttttggatttgtttatctggcgctacggtttctattactgccattcaattgtttgttagtgccactactactccagttagcgtacacactgagtcatggatgatgtgtaatcagcttctgattgctagcagtggtattccagatttttctttaaaaaatggcatctctatatgttcaattgctcaattcaaaattttcacgtctgtttgaaaaacaaaatcatttggcaaatatctagatataccgattcattcttgaattagcttagaggggtatagtgtgggtgcatgtatatgaacaggtgtgtgtgtcagtgtttcgtaatttttttttttttgcaaaattggaaaaaaaaacctttccaaatattcttttaaaaattgaaaccttagatttttttttctatatgcatcattcgttttatagtaatagatcatatcaaatttataaggtttgtagtctcacaattttatttcattgaatttttcgtataaactagtgtctctgaaaataaaggaaacaagggggaaaaaaaggaaagagagagaaaggagagcgggtcgcggggggtgcagaccgcgtccgagcccagtgcgcgccaaaaaaaaggcgatcaacggtcgccgcggcgcgccgcgttgggtgggcccacccaccttcgtctccgttggttagtttactgtcttgctcttcttccccagcttagcttagcttagcttagattagctcgccatgaatcaccttttttcttcactcatcagaatatcaggccagcaaaacaaaaccaaaaacttgatacgcaattagtcctttatcagctgatcgaaaagacgaaaccaaagagctaggataggagtactggtagacagtagacggtggacgaagaatccaactctctctctctctctctctctctctctgcgtctttctttgttttctttccttctttcttttcttaaaaaaaactaaaagaaaaattatactacctgaaatccaactgcttttgctagctaatgtgtacgcgaatattgggaggattgataaaattgtgtactgtcagattctctgatttatctgatccagcaacgaaggagattaagcaaagcaactatcaataacatacttcttctcctagatggatggattgtatatatgctctctcctttttttttcggcaatcagttggctttaatttttgctcttctgctataagaataagaatactattcttccttcataaccttcgtttcagactttcaggattattaaaaaaaaaagaggattctgggaggaaattaaagtgatcgtatgcaacagtacaaattttacacgtgtgcggtgcggttgccgccatttcttttgacattctccgttcttcttcttgttcattcatgtcaggctcgacttcctacagcagcatcgtgagatgagcaggattcctcctgtttaatgctttgcgttagccagaatctcttttttttttctttgtttcctttcttcaaaaatcaaagcaaaataagaagacccaatgaaaggaaatccagagagatattaagtaattatagcaagcaatggcacaaatgtatgtgtaattgtgtttgccgcaaagggtcaggcctgaatcctgaagaccggagccaaagaaaagggggcttttaactatttgccactcttacgaatggtgcttaatgatttgtcactaggcccacatatcattgacagggtgtgtggcaaatatttaattgccatgtcacaagagtggtaaatagttaaatttcccaaagaaaggagcagagatggttaagcaacttgtaagccgaactgtgaagaaaccatggttatgcaaattctcgttaaccatagatatccatggatataaaatctttgtttttatggtgatatttttaagtagttttcttgcttttagttaagctgtgattttgttatttggagtcgttcgtcttgcatcatctataataaattgtttgtaatttttttgaagtaaagattagaatgaattcttttattaaagaaaaaaagtatataataaattgattgtaattttttgaagtaaagattagaatgaattctattattaaagaaaaaaaaagtagagcagagatatacaaagactagtaggatggtcggtctacaagagcggtgacggtgcctgaactgactgaccgaccatttcaacattcaaactgcctgcttcacacgttcatttattcagaaatcaattatcaataggaagattatattacagataggctaacatgttcatctgtgattggataagagtagtacgtaacccttgaccatgcagttcaacattgtactactcctctacctcctagtccttgccgacctctctacagaagagcagccccttcagaaaacgaaaggttgttcttttcttttcagatgagaaaacaaagagtttggactttggagtaatagcttgatctttttttctcctctcttgtctatctcagatgggtacagagaccttattagttgtgatcacactgtgctggtagagcatatatcacctgctgctacagttaagggagcaacaaatgttcagaatttcagaacaggaaatcaacttgagttcaaacacagggaatgacaacttgggggtgtttagatccaccaccggcaaaaaatttttgccccgttatatcgaacgtaacacatgtatggagcattaaatattaacgaaaaaataactaattatacagtttgtgtgtaaattacgagacgaatcttttaaacctaattacactatgatttgataatgttgtgctacagtaaacatttggaaagggatgccatactgtgccatatgagctttgggcccaatagtaaacaaatgggcctccattattgaatactcctctcgtagtctcatctcatgtcagttgatgctgctccatgaacaaactgtaggagtatgtcaattatcattatcattattggtattatatggtggcattcgttccgaatgaataattgtagcctcattccggcaaaatttttgagaaataataatacaggtgaggtgattgataattgattcagggaatgcaatgcagtgcagtgcagctcagcagcagctatatacgggaccggaccggactaagacgaaattattccttccatggattccatatttccatgtatcttctatatcatttggagatatataatcatcaccacaatgtcctcctcctactatcagatgtccatgattgtcatcagaccaacaagacaatgagcaccagctttctttctgggtcatcttgatcaacctgggtcatcttgatcaaggaagaaaagctttgcagcccaggcatcaatggtggtgatggtggtggttgtgagagaacggccaccatctcctcttcctcgtcgtctgcgacctcggcgcatctgatgtacaaaaagaatcaagaaacaacagcagcttcagattgattcttgaggcgaacaagacagcagcagcttgtgtaatggtggttgcatacgctggcgacgaagaccggacatgcattgcatcgtatgccaatggcaggcagggcctactcaccgttctgcggatatatggagttgtagtgaacctccgcccaaaagctcaacagcaccactgcaatcaatcaagtcaaatggggagcatcagatcaagccaaacctgtcatcatctatgatctatccactatgatcacttgccatgtgcatattagtacctttgttggacttctgaacctttggttggatctcaatgtagcacgtatccttgaacgatgtcatcacgaaaatcttaactccatactgcagcagattgtagcgttacattagaacggctttggaaatagaaaagactagtctttgtcagctctgatttgtaatgccatgaatgagacagcagggagagagatttgtataaacaccttgtcagcagcagcctgtagagtcacatggtcaccccattcaccatttctgttagtttatgcactaaaacatctgttaggcaagcattcacatgcacttggtttgtattaacaacaaatgattgaattgctgtggaacatactgtgatactttctccaagtaatcgtcatatgccatggggacatatccatcgtaggcatcacggttacttttaagctgggagacggatggttcatcagaaggaagagagatggaaggatgcaaaataaagcctgaaactagggatcctggagcaaagattaatgcagatatttacctggctcataatctgctgcctcacaaactcatggtgatcgggactttgatacagttgatctgatagtgcccgaaactggggaggttgaggaaacacaatcagcatcaattgatacgtctttcacaacgcatgtttaacagcagtaatgaaactttatactaatattcaagcacatgaactaccccaaccgctgatatggtaatgctaaaacttcactattaacactataggataaccatgtgccaaagcagagggggtaaaggaaagatatttttaggggaaaaatggtttaatagggaaaagagccaagcatcatggtgaggttgttagttggtactaacctgacagttgccatctcctttcaccttgtgctcaactagttcatacaacctcaacctacaagattacataaatacaaatttaaaaactcaacatagatacagcatgtatagtaaaaaaaaagttaaggaaaaactgaatcatatgttagtaacttggcccatcacagaaagcgcaattctttcagaggcatttgtaacacaaacagggtatgataaggtgtgaggcttgcatatataacacaaaagcagtatatcacttagaactgaaactaagttgacctttctgtcagcctttcatggtccatggtagcttcatcgactgaagggatctctccattaattttaggaacatgctggacaaggcagaaacaagtactttaaccaaatgtgagaatgtagagagagacgccaaactaattcacagtaggttcatttccatctgatttctgaacaattattggaaaagaaaaggacagtagctctactgctatgcaacagtataacactgtgggataatactagtttaaagcaataactagcatggttttagttatttgagaagttctgaacttcagataactgttgtgccttgaaattatgctgatactatgcactttgtgcatttatgttttctcaggatacacacaacatgggcaagcaataacatatggcaaccacaatgacacaaggaattcagtatacatggcttgaaagcaaaactcaatccacaaaacttggacaaaaacagaccaaagaatatccaaatttaattgttctttcaatgtacctaaagactcatggaagcatttggtgtcacatccgttatttaagtccaatggcatttaaaggaagtggtccaattgacaacgatataaagcgatactccctctcaatgagattttagccatggattaataaacatataaaggtgttttgtaaatatattagctactatcgaccctgcttagtagctactaataacttaataataaagcaactgcccatgtttcatttggtgaattgaacagatgttaggtccttcctagtttcctttgaagcaaaacttcctatcttctggtggttcctgatgcagatcaaaaatcataacaacactacttattaacctggcttcaaagggtcaatagacttacgggaactggcaccatggggtaaaacctctttcctacttcttcatccattgggaaactgtcgtcagtgtctgggcatgaattggaactagtcggctctatatagactgtgtcatggtcatgctcaccagcatttcctgcaccacaccaaaagcattagggggaaaggcagaaggaacaaatattttgcgagtcaaattacagatattttcactaccaggatggtagatgcctactgatgggttgtacaaatcatatgtcagtgcagaagaatgcaagtgcgtctcatccagatgtgatgcatctgcagaaccaaaatcatatacatgaggaacactatctcatttttcatagtttttttctgtaaatacatgcatgtcattccacaaaactacctctagcataatggaggtcacaatagttgccatcaccgtaaccatgaggaggtccatagtacccgataggagcaaaagggtcacggaaaaggtcataaccccagtggaaattttgatctttctcacacatgttcatccgttgaaatcaagctctgtcaaaaacactcccctggcaagaagattacgatttaagcgtcagggtattaacaccagatagagagagcaaaaaaaaaaaggctgatattctcggtttcatcaaagttgagctctggtgactggtgagacttgacagaaatgcgtcatttcatcatcacattaaatgtgcgatgataagaatggcagattgcagacagctaacgaatcattacacagtcctccagggaccacggtggaattattagatactctagcgcgtcctgtgtatcactccaagcaaccaaatcagcaacctaatactaataagcaagaacaaaacatttttcgttcgctgcacactgactgaaagggtccaatatcgttatccccaccacaccaacaaactaaaggttgcaacggtctaacaattcagtccaagccaatccaatacttttctttagcaaacttaaaatagcctactgctttgtaactacatctgatatgtgcgtttaaccttttgatacgaacaattaagctagtattaattaaaaaataactatacctgtatctaggtatattgcttttccgcacagctattgtctcaaggagaaccaatgatgaaaaagttgcaaaagtattataatccaacaagcttttcccaatcgaagacaaacaaagaaacaaacacgcggttttgacctaaagtgtagcttcaacgatcatgaaccaaactgctgctaccttaacatgcaagattgcagctttcttcctttcggttcatggacctaatcatttccaataaagaaaggggaaaaacataaaaaaaaaaaagcaaccctttttgttgcaccactgccagttcataagcttacaaaatcaccagacagcgcgataatccggcctagaaactcccccccctccccccccccccaaaaaaaaaacgcaatatgaaaagagatgataaccaaaacaaaaaaaatcagtacacgaacatctcaagatcacacaaagtttttccctcctgcaaccgcatcgatcagcaaagctatgggagtaaataaacttaaattagaaaaaaaataagaggaatattcgaggaaaggactaaccgcgtgtgctccacctacgacgaaattcctcgcgtccgtgaggggattctgcagtcgaaaaaaattggatcctttcgacggcgagccctgcgattccccggaatacgatcctgagcgcggataggagttggggacgcgagggtagaagagggatcgagaggtcgaggaaaaaccggagcagattacgtcgccgcggcagatccacggccactctacgagtccacaccacacggggcagaactcaccgctcggctcgccgccggcgaggcacgtccgcggcggaggagcggcggcggtggtggatgacaacgccgatgagcggcagcggcggcggcgagggatcgttcgggaggaggcgggcaaccacccggccgcatgaaatcgacgcgcgaaggagtcgagagcagccagccaccggagaattcgtggtgggattgacggcggcgagagagagagagattgctgcgtgcaagaagcgcggcgagagggagaagaagaagatgagacgggcaaaaaaaactgcttcttttttcttgtgttcttgagttttttttttttttttgaggtggcatatgctcttgtgtttatagcgtggtgcgtgtgtgttttgtggataggaccttgaaattttgttgtttgtttgtgggggttggagtgaacaagatggccttctcctcttgtgtggcggcaaggacgacggctctttgaaatttttttggttgttttatttatgacattttgttgaccttttgtttgaatttgatgagaaaaaattgacctaggaattaggtaggagtatgccagaattgattttaaagactggtgattaataaaatgaattggtttttaatactacgtctcagacagtgtgctcgtttgattaaataaagtcgtcatgtaatttgaccggtttttttctatgttgttctttttctaccttttttgtcgagttgtgcagagttcattgtaggttttagaagctaacttattatagtgatttaaaatggatacatattgataaaatatggttcacctttcttcgtagccacatgattttgccatgtttgacatggaaaatataaggtcttttttaatccaaataaaagagttgttgtataagttatgtatgttttcaatttttttgttaaattgtgctaagttcattgcaagtttttaaaagctaacttcgtatgtgctagtatttaaaattgataaatattgagaaaaatatggtttatctttcttcgtggccacttgctttgtcgatgttgacatttgtagcatggcaaacatatggcccataacaacaatagtaccactagctataactaacataatagaccgcactgtgttggaggaatggaaggactgaaacatagatatcgataatattgtgataacacaggctttctgcgtaatgggttaggcaaaaaagaactcgtgtctcaagagtttccttttgtagacaatgaattgattcaatttagagaaaacaaggaaattggtgataaaactctactacagtttgttcaaaatgcactagtcataatcccttgagaatattctagtaccctatttctaatagaagaggtacctactgaaaatcgctccaacaaatccgcttaagaaaaattacaaagttttgaactcagaggtttttccaagggatgcatgttgtttcaacctctcaccaaaacagacaagaggtatatcactgaaaattaatacccagccatatgggtatatgcagtgcgcgaatacgtttataccccacccaattagaataagaggaaataaaacataaatggagaaagttctcgtgataagatcagccaatagaagaaaaaagtctctaatttttcaaaccattctaagcatgtgaaaggtcaatagcctaaaaataaaaaaacctctactttgtgcaagtgataagagagaatatgaaagattttcctatttttcttgattttcttaagatttttttaacctgaccatgaatagacttatatatctcgatatatacatatataatgtatattatagacttatgtatgttttcaatttttttttgttaaattgtgctaagctcattgcaagttttaaaatatatttttgtatgtgctagtatttaaaattgataaatattgagaaaagatggtttatctttcttcgtggccacatgctttgtcgatgttgacatttgtagcatggcaaaacatgacccataacagcaatggtagctataactaagataatagaccacaatgcgttggaggaatggaagaattaaaacatggatatcaataatatcgtgataacacaggctttttgtgtaatgggttaggcaaaaaaaagaaaacaagtgcatcaagagtttccttttgtaaacatattgttagatatgtatgaattggttgaattttagagaaagagaatatagcttagaattgatatcaacctaaacctaactaggctcaggattggtctgataacccgcaaagactcaataatacctgcactattatttcctccactctcaataaatactcctaagtaattacgagttgtatggttatatataagacgttacacatttcgatgatataacatacttgcaagtaatttcagtaaaacaagaccagcatccaaggtataaacttaaacatcgtcattatctacttcaataacggagggagcactactgccatgatcaagctaaaacgagtacaactaactaagtggtggtgattaggaaaagcactgcattgcgttggaattttttttttaaaaaaaatcactgtactgactgggtgatgaatcacgctgcatttccattttctccatttgggtggcagtgagcccatgaagtaaaaaaagtaaatatggttaattagaagaaaacagaggggcaaggtgaaaagcggcagcgcggcgcaccgtcgaccagtggatcgcgtcagcgggtagtggggccccacgtgagcagtgggggcgttgacgtcagcggtacgcgagtgaaggggaggggggggctcgcgttccgagggaatctgagcgctctgttgggcatctgacggctgtcagggggcggtgggtcccacggggggatcgtacccccggatgcgtccaactggagggctttggctttcagtttcagaggggtctgggcgaattgcgtgagtccaaacctctctctctctcttgtttttgtccttcaacatcaaccccaatttactcatagaatttctcgtttttttaatctatactatgtactgtactcctactaccgctatatgaagtggtatatatttattattttattttaatggtgacagagaggatacacgtggacacattactatacacgtaaaccacaaagatttaccatttccatcctataaaaaacctaatacttgtgtgtccaggttcaatgctagaaataatttttttaagggcagagaagtatgactatcgtctatcacaagtgcacgacctgtgtatagatgaagagtaggatcaaatcatgaaccttactaaagtataaaagtaaagcttccgttggctgcgtggttaggggtgtttgattatcggtcacaatttatcacgtttaaatttagatatgtttaatcaacttgacaactgttttgttgtagccacaaaccatataaattaagttccacacatcaaggataaaaaaaagtgtagcttgctaattaaggtatggccaaaaatttgattgtcttaacttagataaacatagcattatttatccgcaaatgatgataaagtatgggcaaaccacttcctctgagtctcatttgtacctttatcttattacttttccttttttattcatttcatttgtttgattattttctagtattctttttcgattatggaatatatggaaaacatatgtgcaccgtctgctagtatccatcaaaacactacccgtgttaccgtgtaatatctttttaacacgcttaaaaaagctatagaggatgaataagagggataaattcgtgaaactcactaagttctcgagtgaaagtaaatataccttatgtgtttggacctcatacaaagatcgtgttttttccacgtctaaaatactttt

SEQ ID NO: 12034 - DNA, 19369 bp, Oryza sativa
acattcttcctgaggggctgacaaaggaggccgagatggcgggcgtacgccggctgggatgcagatctgtggccgagcatgcaggctccgggtcattctgcagcagaccgactgaatgaaatgaagcctcatgttcttccgatggatcactgaagcgtgcgcccaagaggaaggcggagtggcgcgccttcagcaagaaactgttcaagtccggcgatggcgccctggatctaaaccagagggctgctgccatcgccggacccctcggtgccattgggactagtgacaccggtgcatcgtctgaagagacggtttcagacagttgagtgtatctctagtagtagtgatttagtccagaaaaccttgtgtcagtctgaagctgcctgtatgattccgctgctgaagctggtaaacagtagcagtatgatcaaaggtaaaatcgagttaaatttcagccaagtgattggattcagtttttgtaaacatgcatcgatctgaattctgattacatcctgtgtaatatattattggcttgtgtaatccaaaaagattgaaccatatatgctcgcatgctgaaaaggaattgcgagtttttgtgatttgccatgaaccaattggtgatcatccatcgatatgaagtttactgtagactgggcatctcgagtaacaagttttttttttcaatcacagtataatgttagctgatgctagtatgtcttgcacagcttagtacttttatcttatggcaggcttggcatcattggccataactgagtcgagagcatctggatgcatatactccctttgtcccatggtatagcatacagtatgttttagcccttaacatggctattaaggggagagagagatatatagagttttttattcttcttttttggtcttaggatgaatgaggtgtggtgttggtttggactagttggaatgataacaaaatgaggggttttttcaccaaatgatctaattggcccattgttaacgaaaaaaaatcgaacacaccggcctgggagatctgcttagctcctgtgcaggtccaaagattaatgagatgcgggcgtgccagtcagtttaatcctgcaattgacaagatttgcaaataatagatcaaacagccgatcggctgacaagccgatggagtagttccagccgatagccgataatagccgatgccgataccagccgatagcgatagggtttaagcaatcggctatatgtcaaatgtagatactgatataaaggccaatggctgatgatgatgtaatatagaaatataatcctgcataaaccaatcagctaacaatatgatatagtagaacaagtattgatccgaaggttaaagcacccatcggctggaggtccgatgtcatgaaatccacaagattaaattaaacaatgaaacctttgttgccatcggctaaatccaacttatatgtatatgcaatccttatgagccgatgcaacgtccagataactcaccagctgaaaccccgatgaaacccttattggcaatcaataagcaggctagagattatggttctaagcacgacttagtagatcaaacttaactgatgcagcactaagtataaaaagaaacacaatatctagacaatcaagccgttgactgattttcagggtggtagatgcctaggctaatctaatctagcaacgcgatttagccgataccggcagaaaccctaaagcgagagacagccgatagagctaaattgatatgctaagactagattaacatagacatgataaataggtaggcaaatatatcatccaaaccagagcaatccaagaggtcgaatgcactggtgcaaccttgaacgacgccgatgtagatgagacaattgcctggaccgacggaacattggacttatcccttcgccggagatcgaagacgatgcagccccgcgtcgggtgccaagttccgccggaacgtaaaaaacgaaagtagaagtaaaaagggtgccgatgcgccgaattgtattgatcgtagcgatatattacatagaccccgggtgtacatatttatacccatgggttgatacaagtccttgtcggacaagaaagaaactaacctaaagataaaaaggaaaatataaagtccttatcggacactaaacacactttcctaaagataaaaggaaactaacaaactattcctaattaatagataaattgtcatgccgcatcctctttaaactcggtaacttagggataagcttcctttagtagattgatttccttaaccgaatatagcaggaatccgactattgacgactttataactcctatcggctgattccgagatgctgcagctgataatgattataagccgatgacgtctttgccgattaccaaatttcactgttaacacccattagccctacccgagtttgttgggctgggctgggccgggccacgccaaaagcatttctccccgtggatcaagtccaagacaagagtaaacaaggcacagcaataatacaaataataagtacaatgataagtaaataaaatataggcaaatcggtttgatccatgccaacattcctactgtggtaccactgcatgcatgaattgttatgtagtacttctatatatggacaaggtagcatgcagcagtacaaaatgttccaaatttaaaagcaactaattaaactagtgcttagtaacaaattaagccctatagctatagctagctagctagaccacctgatcacctaggtacgtgtatgcctagtacgtagctcttagccatgcatatgcatactctctccctttaaaaaaactcaatctagaagagatagttcatattcattatactaggaggagccaaatctatttttagattaagttttttttaggacggaggagttatatcgatagagtgtgttctctgatcgatcagatgagcagatcgacgtacgcgtgtatagtgtaggtgtacgttcatgcatatatataggactaatatctgcctcggaccgtacgtgcatgattcatggatcgatcttaatctccatgtgtccaaagcaagtctcaaattaatatagttccaatgcagggtttactcgtttgtcaatgcacgcgttgatgatcaagtgggagatcgatcgatcgaaggagatgagctagtacgtaccctgcctgcgtcagggcacaagcctcattcatatatatgcatgtggtttacacttgattggacaaaccaaagtggatactgaagctatgccacttgtgcccagggtacttaccaacacagatagcttaacacttgcaggccaagtttgttaattaataatccatgtcccataataattgtatttataggatttgaatttatctcaaaataattgtcaaaatatagtactaattaatgatctcattaatcacttctcattcaaatttctccttattttactctcaactatcctgtacactcttacgtagtaccatttaataaggggcattatactctttcttctcaaatcttcgtatatgcgaaacaaactagaattataatcttaattagcaattgaatcgaacagaagcacacaaacatgcatgcatgcatcgatcgatcggtcccatatatatatcgcgcatcaggatcgggtagctaccaattgtatgtgtaaatgtgtgcgcgcgccttcccatatcgggaaacgatgctccatcgatctgcattttattgatgtgctccagcaaggcgagtcgtagttgggtaaattctaaaattaacgccagagtttgccacaagtaatttggccgtgtttgatcatgttaggatagtgtttgcttcatagacatatatatgccagtcatgcaaaacttcatttaaaggagacctgaaatacatgatgtaggaacactaattaattagatgtggcaatgttatagcttctgtttgagagagcttctaccagctacagctttttccacagaatctctaattaagcttctcaaacatttcagattctcaaccaaattctgatatagaatatagataataaattgcatttgaagtcaaaagctagaaacctatcttttgtctattctcactagttgattagtactagaaagcttctgcgctcagaaaatgtggcatcgatagtcactcggcctgccccttctgtgcttaggatctgaagacggcgaaccacatcctcctcaattgtgtgtttgctcggcaggtctggctccgcgtgcttttgcctcttggctgggctgccctctctcccccgtggcagctggttctaggactggtggccgagcaccagggcccgctttacctgagcatctcctcgccggcttcgactccctggtgcttttggtttcttggcagttgtggaaggaacagaacgctagggttttcgactctgcgctctcttctgtctcagtggttctggagtccatccactcggagggtcgtctgtggtctttggctggcattgccgcctttggggatttgttgggagtgtagcgtggctctgccccctcccgctgtttggagtcttgtttttagccgccgtagtttttctaagttttcagctttgattttgcctttttttccccttcgcctggcataagccggtctggctgagtgaagttgtgtagctattacttttttcttctaatatattgacgtgtaatcgttttacacgttcgagaaaaaaaaactagaaagctgcttctcggaatctcgagcttctcaaacaaagtcattgcctacaaacacaaacaagctaagttgtggcatcaaatttgatggccacaactttaacaattgggacacaaatgtttagatgttcttggtctatcaaacaaataacctctggtaataattcgcagccacatacatactggcaatcacgcttaatttggggtagaaacagaactagctagttagagatatactatccattctggaggggaacaaagtacatgtgccatgcagaaagtgagggagcttagcacaagaactatgcagaattaatccaaaataatagtaccaatatccttttgtggtcctgctaacccattggtgatggtgactaattaagtaccaattaagtagagtctaggtgtcaattaagtaaagcagccaagttacatgacaactgacaattgtcacaagggccaaggccatccccaaattctttttgccatggacaccagcaaaggacgtagtactagcttgaagggtcatcaagttcatccttggacttagccaattctttcctcttctcatgcacctgcgcgccgtttcatcttttccttgtttgattagacgttttcaaaaggattaataggggtccagttctagggaggagattatattacttgttgatttgatataacccctatttgcatgcacacaccacctgtactgtacacgtcttgaggttggggttgagagcttaggtacactcatatcaatgttttgacttgatgtgagtgtcgaattatataattactccagtaagcaaaattgtagtactccatatatatcttagtaccttcggtaggatttctgatttctaccaccacatttaattagtttcactgaaagtacattgctttcctactagttaatccggaaattaattttgttgtttttattaattagtgtgaatcatgactcgatgtgatcgtaacatacatgtggtgagtctcaaattttctgaagacgggataaaatgcgcaaagatgagtattatcagggtgtgtttagttcacgttaaaattggaagtttgattggaattgaaacgatgtgacggaaaaattagaagtttgtatgtgtgtaggaaaattttgatgtgatggaaaagttggaggtttgaagaaaaagttggaaactaaaccaggcctcagatgccaatttctaagcgggaatgctagggggcagttgcctgatcgcctacttccacaccatcctgccttctgactgcatccccgtccatccatctatccattgtgcaagatcaaatctggcgagatggtcagtggtggtgtggatgaagcgtatgtgacgaggatagagccaccaaggagcagctcatcacccccttggtctttcacattgttgggtgagcactcacttcgatctcccttttcatctctatcgtcttcttcgatggggaaagaaggaggaagtgacgaatggggaagtaggggagatgagatggtggcattggcgagcgtgatggaaggaagtcttatgctactcctctttgatgtgagctcgtcactaccacggttatcctctcatgaaatcgaataatcatactcaaccaaatgcatcaacattggtgaactgattggtagttataggtattaggcacgtaccactagtatcaggcctgatacaccacaagtatctagtatcaggccatgatacaccacaaatatctagtatcatgcctgatacacaagtatgaaggacgtcttatactgacgggtatcaattgatacctatgggtatcggtctggtaccgatggggtaccagatcgacagatctgatatctacatagtattatcatatttgaacgggatcgcgtatattatcatggttaattgagcaatccagatcccaacttgctagtagataatgagaacagatctagaagcataggccatccatctttttccttacaagttagctagctagctagcaatccttcattctaaagttttgccctccacagtcagccctcttgttcaagtaacacatgagagctaaacaatggtgcaaaaccctaacactggtcctccctttccacattagggctccccatatatcctgcctccacaattcccatcagatcaaagctactagctaatagccactgcacatgccatgctacccaaatcatcacctcccttgtacctttattatattattcctagctaatctccacttaattacagtagtgttcaatctcatataagcatatgcatctcctagctaccaagctctctcttcctctgatcaactccactataattagctatagcttagctagctgagtgatcagtgagcaggtcgatagcttaattagcttccaattaatttgattaagagcttaagatggtaggcaagccacatcaccatggctcctcctcgcttgtggcggaggagctcaacctcttgcacggcggcggcgatggcggccgcggcggcggcgggctggggcagtggaagtgccggctgctgggctcgctggccggcctcggccggccgcggcgggcgcggtgcgtcgtgtgcctccaggtgcagcacgtcaccggcctccccccggcggcggaagggcgcggcgtggtggtggggtggcgcaacaggggcggcgagggggagcacacgtcgccggtgcgcgcgtcgcgcggcgccgccgcgttcgacgaggtgttcctcaactatttcgtcgccggcggcgccacgctgcggagcttcgccgtgtgggcggcgctcgtggacgacctggcgtcgacggcgaggggcggcggcgacctcggctccttccccgtcgacctcaccgagatcgccaccgcggagagctccaacccgcggttcggcggcaaggccctcagcttcccgctcggcggcgcggccgccggcgccgtgctcaccgtcagcgtctactgcagagtgatggagcgtgaggaaaaccatggcggcgccaatggtaataaggaagaaacgaaaccctagctagcctagttaatcacttaattatggcgctaaataacagtgtagtggttaattaattgcgaattaagaagtaaatactaattaattactacgtgtatcgatcacgaacaggccatgcaagagcggagaggaagaacaaggggaagggatcctacgcgtcgtgcctgccggatctgagctgcctccggaaccggccgtctccggcggcggcggcggcgtcggggtcggctcggcgggcggcgtcgctccgatccgatcgaggcgggttcatcacgatcgagaactcggtggcggagatggagggcggcggcgcgttcgggcgcgtggaggacgtggacgaggagggcgcggggttcatcacgatggagaagggcaccatctcgtcttcgcggtcgcggtctcgccggccggcgggcgaggacgacgaggccggcgacatggaggacgagaagccgtgcctgctgatggagctggcgccggaggaggcggcggcggcgttcgaggtggagaaggtggaggaggagttcctggcgatgctggaggacaagtactgggcgaggagcaaggagatcgagaaggggttgggcgtgagcctggacatggggctcgatctggggctggacctcgactcgctcatcaaggacgcggagatggagctcgccaaggcggagcaggcgtggcggagcaaggtcggcgccgccatcgtcgaggaggaggagtacatggacctcgtccgccgctggagcgcccgcgacgccgccgccgcgtgctggccggccgccgccttcgccttcgggagccccatctaggctatcttaatttgttctgctcgatcgatcatcaccatggcctatggcatgtgctactgcttcactcgtgtaacatcatcagtgatttatgtctgttataagtgttaattaattgttgcaatatcatactccctccattttttaatagatgacgccattgactttttctcacatgtttgaccattcgtcttattcaaaaaatttacgtaattataatttattttgctatgagttgttttatcactcatagtactttaagtgtgatttatatcttatacattcgcataaaatttttgaataagacaaatggtcaaacatgtgagaaaaagtcaacgacgttatctattaaaaaacggaggtagtatcattgaagagacaaacaaattaatttgaaggattcatgaaactcctggatctcttgttagtaggttgtttgccataaaaaagggattcgctagaaaacttctgcaaacttttggctccaaaactttcagatttgtgaacatcggattgccttgagatttatccatgaaggaaaaaaaatactagaaagaaattttcacacatgtcacgtgtgagatctcaatgctaactaaccaaacgatagttgaatgcaagttttatataagttatatcgtagttacagtatagttaatgcagttacaatgtagttacaaacttacaatctaattacactttaattatactatagttacatctgaaagttttttaatcaaaaaaaattacgacagccatacacgtctctttaagggatgtttggtagagctctaaatctaacatttatctagagtcatggaatcagggaaggatagtcatactcgtatgtattctctgaagtatattcgcctgcacctctcataaaagattaaagttctagtagcgtttggtttggctctagctctacaagacgagaatccaagagctgagcctatctaccgtttgtgatcacttgtttagatcatcacaaacagtgtccctactacgttcctaatcctgatattttaggattttagttgaaaaaaatgctacgacaattctattttctttccctaacaatcggcattcccttcttcattctcgctctccacaagttaaaaatcattctcgctctcaattttcgtctcttgagcaagactgccgcatgacaaaagggacgagcgggagagtggccgtaaatgtatgatagcaagaccggatggcatgatctgataaggcctgggtggagaggcccacctttttatttttggaagttaattagtaaagggagatcgagaaagatggtggagaaggtggatggtggtgattggcaaagtggtgagagtgttgttcgagttgtaagaagatggcgagtgacaaagagatgcattgactggagagaagttagcaacttactatcttcgttaaaaaaatataaggaattatagctagaatcaatctcttatactccctccttccctaaatgtttgatgccgttgacttttttaaacaagtttgaccgttcgtcttattcaaaaacttttatgaaatatgtaaaactatatgtatgtatcaaagtatatttaacaatgaatcaaatgataggaaaagaattaataattactttaattttttggattaagatgaacggtcaaacatgtttaaaaaagtcaacggcgtcaaacattttgggatggagggagtattttgaaacaattttagaacagaggtagtagtttggatggcggcaagtaaaatactccaatgaaatgattgcgtgaaagatgaaattagtttaatacaaaggagatggtgcataaatttgttttatatggatagatttaaaaaaaaagaaggtatgcaagacaatggcgtcatggcgatgaaagatgtggggtggacatagcgaggatttatatgaagggagggagccaatttgatacttccaaaattttgaatgcttttcatgctaaataaacaggtcgataactgttcccttccacgactgcttgcttaacggtttcatgtccaatatctagctctcatactccctctgtcccatgaaaaataaatctagaatcggatgtgacatattctattaatttatatccattaatattcagtattagattagttttttttatagaacggaaggagtatatacttgtactgattacgatgtacgcatgcaagttggataggcgacagcacagtgagtgagccggcgtcaatcatgcataagagtcagtgtgcgtcagacatgcatgacacttgtattaaccacagaccgtaacagaagcgagtgatctacagtcgcctgtggatttgctgctttgatttggacaaaagcaaagtggatgcttcatggacgtacatccaaatttggccgccctggaggaatgtctcagataattgagcagatgagcatagatacatggggatccacgaacatggcaggtccccacaggccacatcgccaggacctgatttcatgctccttcatcagcagtaaattacttaagtacatcacaaatttcaaccaagcgagcctctcgagtccgcaggttccaacgtatatagcacatcaaaatcaaatcaaaccaaacaggatgacgagcaattatcatctgagcaaaagtgaaagcattcgggtgaattccacgtgtggttattttacacagaataccgcgaaacacttgggatgagatgtcgaatttatgtaattgcctagctaggattttacaggtattacacaatattaattcaagaccgagttactccccaaaaaaatgaagccaacttatagagatcccaatagcctctatgctaaagagccagctaaagaaatggtttgtgtacaggtacaacaaaaaacaagcattctcctccctagccctggatctttaaaacctgcagggctcgttgccattgtttccatgcatcaatataagttcattggatgtgattgatcagaaaccttccctggagctattttttaatgtcgatgtggttttctgcatcccataccacaatcttaccatccaatcctgcaataacggagtacagaatgttaacatagactgcctgaacataaagctggagaatttaggccgtcaacatagaaatgttttaaacctgacgtgctgaaccgtttgacaatactgtcgtttccttttctcaatggcacgatgcaactgtgaaatttacgaaattattagtctatatgcaactgataagagtccgcttttgaactgcaaaatggaagtagagggtagtacgttatgcaattctcatgaacaccaccacgaggctttgatggttcaacagtatcactgcttgccacttgctttgattggccatatagctttccgaaggcttcagatagctgatacataaattttattctgatgttagttcttgtggaatcgcaagttattcaaataaccatggaccacctgttctgattattgtattcacaactgaaggcaaagatcaataggatacttgtgttaatgctactgcctcagctaaaaagaactgagcagatactctatatagacttgaggttgcactgataataaagggtgaatagttcaggtttaaaatgctgaagacaagaatgtttttcttttccaaccaaggataattccatttcaattactgaaaccagagatgtaaatatctttttgtaaactgaaaatccacttttttttatataaccaatagactgtacttccaaccatgggctgcgctatatagtgttcgcctaaatacacatgacgatagaaccttgtgaacatagtaaatagtagatagcagctgcatataacagcacaacagcaaggaatgacacgatgaaatcctgcactaacatgaagtaatgagagggagggagaaaggaaacctgtgaagctcttgaagttgatgtagttacttttctttcatccaagtatctgacaaagctcctatgagagacaaacatatatattaacctaaaataatggtcatggaactcttaggaaacaagatgttttttaagaaaaaaaggttaaagtgccttaactattaaggtgaagctaggcagctagaaatcagatgtttttaacaggaagaagcaagtgctcataacaatgcattgtcggaataaaaaggaaaatgcaaccactttaacaagttgctaatttgctatctacatctttgcttaccaaagtccagtctcatctgcagaaaagatcataggattgcaatcaaatccaacaccaatcaccgtcctttcagaaagaaaaagaatctgaaattttgtggagttcacccaatattatgaaacatggaattatagcatgcaaataaatactagcagaagggaaaatgctgacccacatcacggagaggcagatcacgcagtgctaaattctgtgcagcaggagacgtttcaacatcatcaatgaaataaatcatggaattgtgccctagcaatcagacaataacaaacaagtcaatatatgtaaataattgaaaattatcttatctgtggatatatcagagggtatagtgtcccatctgtgggaaataaaaattgaagaaacaagtcataatctcaacggagctcaaaatactggagatgacaaaagatgaactacgcagaggccttggctagtgtttttattaattgaagttcaactagattatgtcagtcaaggtgccacagtatatcgacaatgaagagaacctttcacatgtaaaagtataagttggtaggaggctatgatgcatgcgagatgatgtggtaaacaaaagcaaaatagagagttaaacacacacttaggatgaagaaacaagtaggagggagaacctgcataggctagtgtctttccacttggcgaccaccttacaccaaatgcccacatagatgataggtcaagctgagcaatttgctgcaaccacatagcagaaaaaatgttacaaggatgatcagcactttgacaggaaacaaaaaatgctatagcagctaatataaggatagtatgccttgccaagggttgtgaatcataatgagttctcaagttcttagttaatggagtatttaataaaaaaaacactgatgctgatgctaaaatgtataattagcctaagaagttgtgtggtgacaaaatggagaggcatatttgaaaatcgcaaagggatatatcgtaagacattttcattccaacagaaggaacagtggaacactatgcattaatggtctaagaaatggcaaatacctctccaaatttccaatcagtagaagtgctcgcatgtgatcccctggtcaagaaaaagctatgagataaacaaaatatttagaagatcctgataggcataagaacagcaaggtccaccttgtatcgacacccttgatgaaagtggataacactctgcatttaccatcagttgatgttgttgcaagaagtatctgaagaaacgcgaaagcaagcaaaataaaatattgcctccaaagaaaaacaggtcccgcatatacatagatgttgcgtgtataaaccaagcagaattgcatagtggtgggattgggagatatgcatctcacaagtacaagaaaaaaaagcaaaacgaaagaaaaacacagctgtaatgaaagcacaatataaagagagacgcttacattgtttggatgccatgcaacactagtgacagaagattcatgcttcttcctaacaaccttgctaatccacctataggtgaaggatccaggcagttaagaaaaatacatatcaagagtggcacatcaacctacctacttgcatgaactatatcagtagaaaacatacaacccagttgtaatgtttgacgtagctaatgtaaaactaaggaaatccaaaagtagcagtcaactaatacaggtagcagacacaattaccagttgttgtcttgttcatagtagcaaatgcacacagacttagcaccacttcctacggcaaacttgttttctgcaaacaatataaaatgaacttcaaaaacttgttttcttcatgatactgcacttcaggttataagcatccgtttttcacacattttgttgccaacaaatatggcagcacggttgagacaatctgacaaactaatgcatctgaacatctcatctaaagcataattagggctaaggaacttacaagttatgacttgtgcagttgtaattattcatgagtagtgtagtggcagtttttaagtaagggtaaggaaagaagagagggaaagtgcttagaggttctaagatgactaatatttgggaaagagtttattaggcttgcacgatttatatttgtatctgagagagtaaagaactataaagcatatacactggttataaagagaatatattgattcagcaacgggagtagaaaaatccaatgcgccagtaagcatcaaggcaggttataaagagaaccttttgggctccactggacacataaagctgcacgatttagcttgagaataacaagggtaggaacccaatcatggccctcttgtgtccaaacatatctgcagttcatataaggaaaaaaggagaccaacatgtatttatacccttgtggaataggaaggtgattcataataagaaaattgagacttgatgtgtacttacgaatttctatcatgtgagaccgttacgatcttgttggaagatctactccaatctattccagatactatttgatcatgctgcaagatatagcaatagcgaaaataataagataatgaatcaactatcgattatacagtactgcattgtaaaaagatgatgagagagagagagagagaggtgctcaagatcatcgcacttgtaaaatataaataagaacatttacctttgaaagaacatgaagtttctcccacttgtcagtaaaaaacttatagatatgtacttcattgttgtttggacaaaaggcaatcactgaaagagagaaaaggttacatgtcaagttaaaaataagatggcatgggatgtgcatcataaaaaggggaaatggcatcattctagagggatgtaacagtgtctcatattacaaggcaagaaatgctgtattcttaaattacagtaggtgttttgccatataagcagataatatatcatctatggtcagtatgaacagaaatctaatgtattgctcacccctccaatgggactagcacacatcaagcgagcacgaaagagtatagccctctgttcaagtctacattatgcagagttcagtagtttcatctatccctctatcagcagcagacaagcaacctgggcttacactagaggagaactgaagaacattatatataattgcaggaagcctacttcattttccataacaatcatgtgggtgccatgtataatgtactggttgttaccatggatgagagcattcatttaccagtgcatgacagaacaagagctagcgctatgtagcaagaaattcccattcagatatggtgcagggaatggagtggcaggtaaaattcacaggaaacatggaattattcaggtcataattcaaagaaccaagtcagtaaatttcaaattacatatagcgccccacctacgaggggaaatccatgatgtaaacttgtgttacggacgcgatccatgtctcctagtatcaccctaataccgaaaccaccttagcaaggcatttgttctacagaaacccatacatcagcaggaaacgccaccgctggcaccaaaaccagcaacaccacggatcgaagatagagagggacatccctcatctccacgaaatgagcagcaacgacaaccgattcctaccggggggattcgaaacggagctcaatcacatttgcaggcggaaaccctagaaaaacgtggtcgcgaatcccacccgtaccgaccgcacgcactcgtagccagcgtcgtacgccatggccggcgatccagaatcgaatcaaacgggaacaccgcggagggcgcgagatctagagaagagaggggggaaggagaggaggagcaggaggaggggtgattactcgagtggtcggggctccacgcgtggcaggtgatgcactcggcgaactggtggatcgccgccgcggccatcgcgggcggcggcggaggggagcggcgcggcgcggctgtggcggaggcggaggtggagggtggtgatggtggtggaaatggttggaacttggaggcgaagcgaaatacactactactagtgcaccactcgtccgcactacggacggggccgttaggcacgcccactaccgcggcccacatcttcgccactacaactagtactttttttttccttcagttatgtatatataaaaaatgtacatttttcatcaaattttgaatgagcaaaatatattcttgccattgttaccctgtaaaatttggtaattgaagaggtttctctactttaagattctgccaaaatatgatagttaagactttaaactaggggtctatttggttctctaccctaccaattcaatggtaaattttggcactaccgtagagtaaagttcatataatatatgtgtttgtttgctatcatttgctattaatatgcttttatagtgaagaaaagttatagagtagtaccaaattagatatgggcattgccaatgctttgactctaatccaaaccaatcaaactattatttaaattgctaaacaattggtagggcatattttagcatcaatccaaaatggccccaaatgcaaccaacgctaccaaaatttagtaacatcaaactacatggaaattgagtattattgatttgttgtaaggttaataataataataaattgaacaagcacttaaaaatcattgttttggattactttaataaatatacgtcatgtttttattttttcttttggtgaaagggaaggaatgagaataagaatctcatcatttcgtatggtgatctccgccaatcaatgtgctcgagaatatgttggctgcagtcattttctactgcacactgattatagtagccccttcctgcgttaatgatcatcacgtctatcattattccccgcacgctgttgtaccaaccaaagatggccagagaaaaaggaaaggcagaagaaaaaagggagaagaagatgtgagacaaattaagattggcccgtttggggcccatctatgaggcccacgcccttcaaagcctggtccaactcaactcaatgccctcgcaaacactgttcctttcaactttcaactttcaagcgtgaagtgcttttatttattttttttagataatgaaatataatatcccggcatttactcaaaagagctacagccaattattacatagtagttttcatgaacatagtgtaaatctaaatgaatagaaacataccgaagatcactattattgaaaccagcctaatgtaaggagatcacaattattgaagtctatttgtaaatctccaaccataattggcaaatagttgcataaccgtggtctccaactttcggcatgcaactttcagaaactcttcatcttcatcacacctttgtagttgtgcccaaaaccggagccaatgagttgccctgaaaataacctgcatataggaaaatgatggtgatttgtcaaaaaccatatcgttcctactcagccatattgcccaacaaatggcagaagctccaacaagtatcagtttactcattttcttatcaactcccaaaagccacccattaaaaatatgagatatgctaactggaagattaaaaccaaaagagaactgaactgctctccatagaaatttcgcaaaatgacaatccataaagagatgttgaatagactcattcttcaaacaaaaagaacacctcaagctgccattccagttacgccttgccaaattatccttagttaacacaacccctttaagcaggtaccacatgaaaattttaatcttaagtggcaacttaagcttccaaatacacttgtttctctcgatatagccattattaattaaagctaggtacatagacctcaccgagaacaagccattctgatggaaattccatctaaaactatcagacaaatcattcaactgaatatgtactatagaggtacacaactgatgccaacaaacaagattctgaccaattaaagctctcctgaaagaaacattaagcggaacatatcccataacagtggcaatagaagatgttttcctccgaacaattgcgtacaaagatggatatttatccttaaaagccaagttaccaatccatctatcttcccaaaatctgatttgttccccattattgacaatccaagaacccatatttaagaaagtacttttgacattcataagaccagaccaaaaatgggaatcaccttgtttcctgtcaacttgggttatagatttattataaagatatttcctcttcaataaatcatgccaaaccccatcctcattaattaacttaaacaaccatttacttaaaagatatttattttgtatctccaaattatgaatcccaagacccccctggtccttgggttgacaaacaacatcccacctagtgagcctgtattttttcttatggtcatccccttgccaaaaaaaccgcgatctataataatcaattttacgaagaacccctttcggcacctaaaaaaagatatcataaatagggctaaacttgaaagaacagaattaatcaacaccagtctaccaccaacagataaatgcttgtctttccaactactaagctttttctcaattctctcttcaataagtttccaatctttattagaaagcttcctaaaatgcatcggaattccaaggt

SEQ ID NO: 12035 - DNA, 19027 bp, Oryza sativa
ccccccctccgatctcgcggttccgcgtcggcgattcggcccccccgccggtgattggatctcgccggcggccgagtcgtcgcggctaaccccgcccgtcgtcctcgaggtctcgcgcggcggacgacatcttgacgtcgtcgtcgtcgtcgtgttcatcattccctcgggctaagtctggaggagtagcgtggagcggagatccgcccggacctggattgatttccttcgatggtaaggaagccctagctttgctgttccgttgctctagagtctagactagacgcgggtgatattaccctactgggtactgacgctgatagcacctttttgatttcccacactattttttgagttctaactatgccccacgttaggtccgcgcccttggatagttaggctgtttcagatgggaaatgaggacgatgttctttttgtcccgataaattattattgtgatattattccttttgatgaaaaaaattattgtgctatggacgttgacctgtgtgttgctacccttaagatcaagtgaccaatatgccacgctcttgttcgcgccagaaaacggtttgctatacaactgctgtaatgaatgtgggatgcatgggtttcgttgacattttaggtataacgctatttttcccgcgtcgagcaatatgcagctagcgtttgatggcataaatttattcctgcaggcggctcaagctaccattgtggtgggatcccaggtttgggttgaggatcctggtgttgcctggatcgatggggaggttataaaagtccatggtgacacggttattgtcaagtgttccaatgaaaagacggtaagttgttcataagtaattaggttttgctatagtatgaccagctggctactatattattgctagatttgtaacagctaggcagctaggagagaccatgtaaagatgagctgaactgaccttccataatagcggtatttacacttaagttcaaatttggtcgttttgttcaggttactgttaaaggttccaatgtccacgcaaaggatccagaggaatcaccatgtggagttgatgacatgacgaagcttgcttatcttcatgaacctggggttcttcagaatttgaaatctagatatgacatgaatgaaatatatgtaagtcttttacactgacataatgtgactacgcttctctatatgtttttaccaatgctaccattttaagtgcagccatcattcttctctaacgcatgttttcaacttatttgtgttgaaaccagacatatactggaaatatcttgattgctgtaaatccttttcgaagactgcctcacctgtatgatactcagatgatggaacaatataaaggggcagattttggtgaattaagtccccatccttttgctgttgcagatgttgcatacaggtaggctcattatgatatatatgttgataactacaaggtggtctacgatttaaatgggttagcttccataaagaacttcttttctcctttgagctctactgtgagaagaatgtctttgattactggtgtagattgatgcttaatgaaggaataagccagtcaattcttgttagtggagaaagtggtgctggcaaaacagaaagcactaaaatgataatgcgttatcttgcgtacatgggtgggaaggctgccgctgaagggcgaactgttgagaagcaagttcttcaggtgataatttctgagagccacctaattccagaaagctatttccataaccatctgttgttcctcttcaactgattacttcatattcatattcctctcagtctaatcctgtccttgaagcatttggaaatgcaaagactgtcagaaacaataattcaaggtaggaagcattcttcatacgatcattatgattcaatatctgtcactcaaccaaatcttcttttctctgcttttattgcagtcgttttggtaagtttgttgagatccagtttgatcagaatgggagaatatcaggagctgctgtcagaacttatctcctcgagagatctcgtgtctgccaaatatctgatccagagagaaattatcattgtttctacatgctttgtgctgccccacccgaggtgctgccccttgattattcatgtccttctttgattagacaaatttatgtaaatagcatcactatttttacatgctgcttacactatatgagctgttatatatagtccatttttcagtttgacatgacaatagcaccatcctaaatgttaccacccaagataacctatctagaggcttatctgtattatttgggaccaatagattgacagtttgatatactctttaaatcgattgattcccaattataccacaacttacatgtcggtcagcatgaaggaataccgtttcatatggcacacactgtggtgtgaataaaatgctttattaagcttaaaatttccagtttcccttgctgaagttctctcttcacgttgtatcctgttctctgttagattgataacagttatgaatctaattttggttcatgaaaaccttccgtcgacatgttcctctagaggttcttctccactttgtagcttcacaaaatactaaatgctgtaagcctgtagcagcttctgcagcctaaaatactgtgtttcatatactagtgctgaatgattcagtgttccatctacaggagcttaagagatacaaactgggagatcccagaacatttcactatcttaatcagtccaactgctacaagcttgaaggtctagatgaatctaaagagtaccttgaaactagaaaggctatggatattattggaatcagttctgaagagcaggtatgcacttggttctataattattaacacataccattttttaattacttgaagcttatttacccttctcaaactttacctcatgtttttcatgatgcttcaggaagcaattttccgggttgttgctgccatcctccacttgggaaatgttgagtttgctgaaggggatgatggagagtcatcaaaacctaaggatgaaaaatcactgtttcatttaaagactgccgctgagctcttcatgtatgcggtctttggattccttttagaaactcttgaatgcatacacttatctcacaagagcctcaaatttggtcttgtaggtgtgacgagaaagcacttgaagattcattgtgcaaacgtattattgtgactcgtgatgagaacatagtaaaaactttggatcctgaggctgctaaggggagtagagatgcacttgctaagactgtgtactcacggttgtttgattggtgagtcagttttgaagttttgcactggctgctaatggttgtttccacacatattttcaccttatgctcatgtgtcaaatgacctttaatcttaggcttgtggataagataaacaaatctattggccaagatccaaattcaaaatgcttaattggagtgctggatatctacggttttgaaagcttcaagacaaacaggtgcttcactggtacgcttttgatgattgattgcatgttagttgtaatcttgtcaacttattggccagcgagaggaaagctgttgggttagccccaatttagttcttggtaataaatggtgggaatttggcttcacgccttactatgtgctgttcagggcatggcttctagaaacttttcgtcaccgaaacacttggtcccagttgtactagaactaaagctatggacgcatggaagatgctacactcctgggcttttcctttgatataggattacatgttaaagattcaggatggctgtattttatggaaaatcttaaatattgcctgcaatatttgccttgaatgcagcactttctctgaaacatttcctgaagaagtgcaaaatgttggatccagagtattgctttttcatgtttagtgtgatcttactgtttcaaaaagttaagataggtagtagtgaagtagattctcagaactattgttattttaggttttatacactatgttcttctacaatccaagatattaccacattttatcgtgatgcatgggattttttgttgcttgttactccctccattccaaaatataaggcacaaccacccttaatccaaagaccaagaaataattattatcatcttgtagtttggatcatgctaataaatacaatgcatgcatccaatagaattagaggatgtgagagtgaaggatttaaagaattaataatttaatggagaagatgtcatagttaattgcatgcatgcttgcatgtatgccttatattatggaacatataaaaaaagtggttgtgtcttatattatggaatggagggagtaattgtttcttgatttttatttatctgttttttctattatttctctctaattttatgaatttattgtagttctcatatctaatgcatatttctcttgatattgatagtttcgaacagttttgtatcaacttgacaaatgaaaaactgcaacagcacttcaaccaggcaagttttctgttttttgttgttatcacctacgcgttcatttctgctgacttatattttttttaaaaagatatttccaactttgaatttcttcttttctgcagcatgtctttaagatggagcaggaagagtacactaaagaagaaattaattggagttacattgagttcatcgacaatcaggatgttctcgatctcattgagaaggttgctttcttggccttgaatatatatatttctcgaaccttgtgatatggttacgctaagacaaacctcgatgaaaacaagattgctctctctctctctctctctctctctgatgaatttatgtggtctcgttcaaaatcttccttgcataattttaccaaatataatcgtagatgcaacagaccttgcaagtagcaagcaaatgtaagtgctgttgctactataccttagctccaattcttggatatgcaggctgctactcgtatgtttttttttttcgtgttactgaaactcgctggtgatgtcatgcttttatattctgcttttttttttccactcccgtctaagtatttgattattcgttcacagaaacccggtggaattattgcccttctagatgaggcctggtatgtataactgataataaatcattttgttgtttatgctggtcttcaagcatacagcatttcagctttacaagaaattgatctataaacatgtgattttgtgttacagtatgctgccaagatcaacacacgagacatttgctcagaaattgtaccaaactttcaaaaataataagcgctttactaagccaaaattatcgcgatcagacttcaccatatgccattatgctggagatgtaagtatgaatacctttactttctttagttttcatagttcttttgatcaaatctaagttggccaccttttaatttgtaggtcacctaccaaacagaattatttttggacaagaacaaagattatgtagttgctgaacatcaggcccttttgagtgcttcacaatgttcatttgtctcgggccttttccctctcctctctgaggattcctcaaaatcgtccaagttttcatccatcggttccaggttcaaggtgcataacaagtcacataaaattcttcatttggatgtctattgcttacgattgttcatacttttaatacatatataatgcaatacagcaacaactgcaatctctcttagagacattgagtgcaactgagccccactatatccgctgtgtaaagccgaataatatactcaagccatcaatattcgagaaccagaatgttcttcagcagctaagatgcggagtaagatttcctgtttcacatatttttttgcttccaagttccaacttcaatatttacattattggcttgtcctcagggagtaatggaagcaatcaggataagctgtgctgggtatccaactagaagaactttctatgagttcatagatcgctttggtattcttgcgcctgatgttttgagtggaaggtattaccagtgttaacctgtttctttgttcagtttgttgagcctacttaccgatgtgagtttgtgttcattttactagctctgatgagattgctgctgtaaggaggctgttagagaaggtagatctgcaaggttatcaggtaatggatgttacacagaaagtagcttttgcattgggtgttattgatctgtgataattgatgctcagtaagtagtatgctctgttgccatattgttgattactccttccatccacaaatgcatagctttttggacaaacaattacttaaggcatcctcattctggtacacttatataataaactctaactgctgttgttgaaacagcagtgtctagcatctcagaagcgttggtccattgtggttgaggtgctaaacaaactgtactgaaccagaactactgtctgagtgtctgtattaagtatttggagccacatagtgtcgtgttagttataagacattaccacccgttgatcattataattcttaacattttttataaaaataatgcctcgaagtgcaagaattgttctctcctatagaaatatctacttgtgtagagcataggctgcagcagagctgaattgtttagaacaggatgtaacatatgcattgtaagtgaatatttggaggtctatctttaccagtattgatatgtggactaaactgcatgccttttttcaaatggattatgtagattggcaagacaaaagtatttcttcgtgctggtcaaatggctgagcttgatgcacgtagaaacgaagtgttaggacgttccgccaacatgattcaaaggaaagtccgctcatttctggcacagaaaaatttcattaaactgcagagatcagctgtacaactgcagacgatttgtcgcggtgagattttcatttgttattccaaattgaagcctctatgtccccagttaatttaaattttgttcatgtcataaaaatttctgacatggcttccctttcatatttaaaggggaacttgcaagaaaaatttaccagaatctccgcagagaagctgcttctctcaggatacagacttgctatcgcatgcatgctgccagaaaagcatacaatgaactttctgcttcggctgttactatccaatcagctttacgcgggatggttgcacgtaaagagctccatttcagacaacaaacaaaagcagctattgttatccaggtaaaactgagaaataaataagcttgtttcatgtgtgtgtgagcacatgcaaatcgatagtagcatggaatagtaatcaatataagtattatgattttctctccttatatttaaggttgatatttgattgacagtcatcgatagctctgaaactgcagggaacatgcttaggttgcatagattttttcttctagtcttagacttaagttgtaatgctattactgcctggacaacttcctcagataggggctagataaactgataaaaaaatatgaaatctaagtttcattgggaggtatagtttatgaaatctgtggtttagtaaatagtaattaagactagaacatacttccattcacctttgttagtttcatccttgaattcaatagctgaaagcctgtttgctatgcagagtttgccttttagactacaaacagtactccccgttgaatctttctccaaaatatgactaactgtacatatagtgcacatatagtccacaatactaacatgcagacaatctgcaataatccttatcagatcctatcgacgcttttttcttaaactttgtacttgttcaaatttctatttcagagtcgctgccgtcagttcttggcaaggttgtattattcaagaacgaagaaagctgccattactacacaatgtgcctggagaggaaaggttgctaggaaggagcttcgaaagctcaaaatggtaaactcaagcacaccagtcatttgttatgttctatctatgctatttcgatgaaaccatgttaaggtgtcccttagaaattttggtcaagaaaaagtttcaactggcccatttttttgcaacttctggaacctttatattgtatgtaggatagtgtacaatattgcacttgcagttacagatgttttgctatactgctgtgtacatttctcagtacatggtatgtttttataggccttagtactttgcctattacagttctctattgctactagtgcgaaagccccctagtgatagtgggatatatcaaggaccagcttttcttatccattttcattgcttatcaggctgcacgggaaactggtgctttgcaagctgccaaaaataaattggaaaagcaagttgaagagcttacatggcgactgcaattggagaaacgcatgcgagtgagtttatttctataaattctcttgttaatgtaacttgaagaatactggatggcattgttacattgttttctggggttgaaacaccaatctgtactctacgtgctatttaacatacacaattacacaaatatgatctcatggttcatggttgaactggctgtttggttaccttctacaaaaggactcagcccataactaattcactatattggtttaagcactcaagcacacagctgactgtccatgaatatcaatatatatatctttctgtccatgatatgagtgacctatgcggtatattcaccatatgacctaatagacatctgggaaatggcaagggagatcttgttcttccctggtagtaaaatgaaaaaaaaaatgtatagttaacttgtgataccttattattacttatgcatgggtctttgttgtaggctgatcttgaggaagctaaatcacaagagaatgcaaagttgcaagctaccttgcaagaggtgcaacaacaatacaaagaaacacaggaaatgctagtcaaggagagagaggctgccaagaaggctgcagaggtggcaccagttgttaaagaggttcctgtcatagatactgaactgatgaataagcttagagatgaaaacgacaaacttaaggtgagacctgatcatattctagattctcttttttgtctgccccattgacaaggaaatgcattttcttatttcttaggacttatactataaaataaatctaatcattcttaaagagatttgtttcctgctgccattctagctccatgcgatactacctctgctatggatataacacttgacattccattactgcagactctggtcagttctcttgaaaagaaaattgatgatactgagaagaaatatgaagaaacaaacaaaatcagcgaagagaggctacaaaaggcaatggacgctgagacaaaaattgtcgatttgaacatggcgatgctaaggttgttccattttctgaactcaactttattgtagaagtacagtggttgacatttctttttgttattctgcttcaggcttcaagagaaattatccaacatggaatctgaggagaaggtgcagagacaagcactgttgagctcgccagtcaagagcatgtctgaacatctgtcaattccaattgttccaaaggtacatgtaatggcttgcacattggttaacttttgttccctctggctgaaatgagaatgttcctttactcacatctcccgctttcttttctattaatcagaacttggaaaatggcttccatgaggttgaagatccaaaggtttgaagttttccaccttaaatattccttttgttttgaaacttaaattttctgtctatggtctcacaagtcacaacaatctgtcattttcaggaaccccaaagtgcacctcctgctattaaagattatgggaatggtgatccaaagttgaggaaatcttgtgtcgacaggcaacttgtaggtcaacatatttattgtttaaattgctcatacaaaaatggttacttgactcttatctttctgtaggaaaatgtcgatgcacttattgactgtgtgtcaaaaaaccttggctattgtggggggaaaccagttgctgcttttaccatatataaatgtcttcttcactggaaatcttttgaggcagagaagacaagtgtttttgaccgccttattcagttaataggatctgcaatagaggtaatctggaacctgtattgtggtctttcagcgttacttgagccagaagtacaattagacttcttttatatatatatatatatataaatataataagtggttattatttgaaaatttaatctgagatcctaccagcatcaaaacatctctaggctttatctttatgttatataaaagtagagctgctctcttaacaagtttccaatttcttttacaccctacattttccactctactactctagttgtctagaagttattctgcgcttgctccattttcctcaaggtattggagcatcagctgaagtagcaatatgccacttctacccttgaatgaaggcaaagccatttttgctaataaatcaaacaaaaaactcaacctgtagatgcgtgaaaactggcatggttttggaaatattacaagcatggagatctaggccacttcttagtacatggaagaacatgctacttatttggtccaacattttcgttttttccaataaagtagaagaaaaactaaaaccctttcagattcttgaaaactgggatggtacaggaaagacttgaaaacatggagagagaatcaacttcttattacaccaatctaattggtttttgttttctaaatttgtattcctcagaaatcaataatgacgtcactctgttctctggcatttcatttattccaatccacagtttatttcagtgatactgttttgaccttaaattgtaatctgattgaattttggaagttggcaagtttctttggcccccagtcagcttacgttgtgaagcccttgatgcagaatgaagaagataacgataatcttgcttactggctctcaaatacatctagcttgctgttcctacttcagagaagtctcaaagctgctggtgcacctgggagtgtttcacgaaagaaacctcctcagccaacatcattgtttggcagaatggctcaagtatgttactttcttttccatgcatgaaaagtggaaggaaataaaatggaaaatgtggtacgggctctgataatgtaaattcacttgtctagggcttgcgatctgcatcttttgtcaacatgcatgttgaggcaactgatgtcgtccgtcaagttgaggccaagtatcctgccttgcttttcaagcagcagttaactgcttatgtggagaagatttacggtatcatccgtgacaatattaaaaaggaattatcatctttgatttctctgtgtatccaggtatattttccttttggatctttgctgtttgttgataactggctgtaaatggattcattgtttaccattcattttgatctttgttaaccactaggctccgagaacaatgaaagctagcatgctgcgaatgtctggacggttatctggtcaagctcagagcaaccattgcagagaatcatcgagagcttggatatccttttgaagaaactgcaagataaccatgtatgtgtatttctttgtttctatgcgattcacttctgttggatgtatgcgctaactgctgctttgtttatcctcaggtacccccagttttagctcagaaagtttttacccagatattctcatacattaatgtacaactgttcaacaggtgaacctatatttcaagttttgtttcttgtatgccgggaaacttgcgcagtacatgagtacatgaatgttttttgttctgcagtttactccttcgtcgtgaatgttgctccttcagcaatggagagtatgtcaaagctggtctagccgagttggaattatggtgtgcaaaggcaacaactgaggtgatctgtctgtgtttgaacgctagctttccctcctacatgattcagtttactgaagctccttcatttttttttcatacagtatgctgcagcatcctgggatgagctcaagcatatcaggcaggctgttggctttctggtatgatgtccattctgcttgtgtatatttgtgttgaggtttggcaccaataaaatgttgtagttttgagaatgttatctgattgtccgattaatcacgattaatcgtcctgatcgctcccctacctccgatcaggcacaggtaagtcgatcagccgatcagaaagctgatcatccgattaatcgatgattagtcgcaattaatcgtccgatcagggtggaaaacgatcagttcatgggctacctccctgagaaaatataattttgggcctgccagcccagcccatgttccattttgggcagatgacgggcagcaaatgatgctgcttcttcttctttgaccaaatgatccttgctttttaccatatactacagactatagagtatttagtatataatatatagcatatttggcctgctggacactcttgctatactaaccgatcagcctcgattaatcgccctgatcgtcctggtcggtgcctaggcgatcagggctgatcgcccgatcagataacactggtacttttgacatcctatgtgcatgagtggcatcctagaaccttgctttatttatctttggctttaataagcttcatagctttccatgaataaagcaaatgataattagtgttaatccagactgatgttgccctgtgctgtgtgtaattggcaactattaatacattttcaatactcttttcaggtcatattccaaaaattcagaatatcttatgatgagattgtcaatgacctatgtccggtaaaatcacattaaccgcacttttcaattttgtcgagcatcttttctgtttttgttccttaagcaaattggtgctaattcatgctttattgttgatatctgtagatcttgagcgttcagcagctgtacagaatctgtacacagtactgggatgacaagtacaatacccagagcgtatcatcagatgtgagttccattcgttaaaaaaaatcaatatacaattatgcatgtggcaatgaaaatctttccatttgttgactgctaaagtacattttcttttcccccttttaaaagaatgttgtatatggaattgaaataacgtacatacacattactgcttaattttaattcctggtcaatgtagtatactgtgcaggatatcaaaagtgaaaagaaaacttaaggtcatctaatgtttcaggttcttagtaacatgcgggtgctgatgacagaggactctaataacgctgaaagcagttcatttctgttggatgataattcaaggtaacataagtaccatttgatttaattgtgtggatgtatctactgtttatattagtccctggacaaacattaacacacccctcaatttattgttgtgtttgcaatgcagcatcccgttctcagtcgatgacatcaccaactcaattcaggagaaggacttcaccgatgtcaaaccagctgaggagctactcgagaatcccgccttccagtttttacaggattagggctgtgaaatctcagagctttataccgttagataccttgtcagaatattccttgatttgttgtaaatttttttcaatcctttacgctggatggtgtaccctttcttttgttatatttccttttcttttccagctagttttttgtaaaatccttataggtagtcaatagggttgggatgggattcctcccttacatctaggaaaagcaatatcttttaaagcaaggcaggcaaatcattcttttgtagggcaaattcaaatcagtcttataatatccatgggttgtaggaagaggcaatgtcttggtggcctctcccagttatagattgtacaaagttacaatgtatatcaacagtgcaagaaaaggaaattcatataccaaatggcattatgctcatacatcatatcttggaggtgttgtcttgtttaccagatgcgctgcaatctgcagtgactttttgttactctttttgagagaactaaactgcaaatacagaggatgtttcgtaatttcttctgcgtctttttctggcttgtggtgtctaaggtgccatcgcatggaaggaagttgtgtagtttctctatgggtaacttcggtttgaaagtagtctgagcaatttgaatgtagccttgtgtaaactttgagtcgattctcatcctccatgctcgagcaggtacgtccgtcttctttcgatccgccgtgccttttccttccattcgttttgaatttttctggaagagttcttcatttggatttgaaggaaagttacttcaactggaggggagcacgggaaacccgcgaactttgctgcacagtcccaaatgcccacctgacacccctggcccacagctctaaagcgtccaacatcactagccaattccctaaactaccctccctcagaaattcctccatgcatggtttctcgggggtatttccgtccatccacacactgaacgagagagaagaagcaacaacaataaaccgatggcaggtaggcacaccgcactcccccattcccttccaccctctcccaccctttaaaaaaataatacaaaaataagaaaaagaaggagaagaagggagattctctctctctctcctcctcccgctcccgaattccttctagattatcccaaattcttcgctgccaagccgccatcccgcggaatcgaggtaatggttatcttccccccaagtttgttcgttcgttcgttctagctcgattccttgagcggattgtttcgtttgatttggtttggtttcttctagcgaggggaaagggtaggaggagcctgacttgctgtggaaggtggttagtttggggggggggggggagtggttgcatgtgtttcttttgcatggaaattttgctcatgcctggtgaaagctgtggcgctgatttggagctcggagtttgtatgtagaattgtgaggattgattatgcttcgtgggatggttgcaaggaggagatgttgtactatttttggagtagcaatgctctctagtgtatctaaacaagggaaagtgggatgggggaataccacgcatccggctcaaaatgtatgaggggttatctatttagggtaatgataatgcttgattgatgggtggggtactgggttaaattttcctaatgtagatatgtgcgtcactttctgaatggggttgtcttagctatctacttcttcacaaggtgttgatctgtatttgaatggaaaaagattgaggttcttgttcgatcactcaagtttaattcactgatagagataagcagctctacttttgtaattctagaaagttgaaagagaatgttttcaccaccatcttattccctgatgtaggctttcgcttaagtacacttgtcattgttgattattatcctgctcagggatctaaataatgaaatttcattcttgcataggtgctgttccccttgcctttgcttcacctcttttgtatcactaccggaactttactcacagctgctcagttgtttctttgctgtcagcatgggggaacataccttgtacattatatacagcttgatttttgttttatcacattggctctttcagggatgagcagcaagttcatgataacctacaagaggaagcgtgttacatcacatgtctatacagctgatggcaccaatctcaagtcttctggtgcttccagtagtgttcctgtcagcagtttatccccaaaatatggggttggtgccgataataacatgttagaggaagataattttgtgaggaaccttgacttgtcacccttactatctattttagcatttgatgttactctgttacattcctaaagagggtgtacaatacataactactactgatatgcaccacttccacaaggagcgcatgaaactgccatgtcaaacagtacaacatgatgtagatattcatatctagaaatgtcactagtcatgttttttcaggaatctaatctatcgtgctttataataaaaaatcgtttaatgaaaccatgatatatgtttatgttttaaaactgctgtgtgataaagttccatgccatactaaaagtttgttctgtatcactgtggtgtgttaatgttcaatgctggagtatatactaaaattttgtatttttgtattcataagttgatctaactttattcatatctgatacttattctcatctataaaattggcagtcgacctctacaaagcaacaggatgtatttgattcaagggagcaagtcatcaaggaagaatcacctaaacaaagtgcaaatgcaccaggcaaagaacgagcggaacttaagtcacgtgaatcattatctcaaaaggaacagcctgagatatgttctactcatactgcaataggagacgcatgtgagaataaattagaatgcatagatggcacacataatcaaagtcttgtttccagttgtgtgcatgctgacaggacaactaatcaggcagaagattctagtgcctctgtttctgtgggagtaaattctcatcagcagccgaataattctaccaggcctagccaatctaagagtagatttagtcctatgcttacatttcataggcgagttaaaaacaaaataggtttggaagagcctgcagcaggaagttgttcaagagataatgacaaacattgctcaaaactaagttgcaacccaccaagttcgccactggatgctatacccttgtgtagacaaactgctggcagttctttggatgttgaagataaggtatgtttctctctcatgacctcatcttcatgtactcgtacttgtacaataacagtactgctaacttgacaaaatttttgttaagcctatccatttgttttacttgttcattctatgcgactatgtgcaatactattgcaaggggacataccagtgtcaggaaataatgcatgttgtgactgcaatggctagaggcatccaacattgtccgtgtaacttcaactgaaagcttctatgtgattcacttatgcaccatattctagattcatgtcttttcttttataaattcttcaaataaaatccaatgtgtgtgtcattgcgactgcattctctctactgcttgcattgtctatacacaatgaggctacactcctgatagtttatgtgttcattgactatgtgcttttgcattttaccacgtagagcattcagaataactacagcttctatttaatactgaggaaaaggaatttatttacaggttactatagcgggaacaagcactggacaatctgtaattgttgaccacttgcttgaacaaaaaaggtaagacggtactatttgttttgttgatcagtacatgaacccggaactcattaatgctccttttctagttcacacattccgaaatcgtcggtacatcatatggttccctcgcagcctgctaaagatgcaaaccaaagttcaatcccagaagaaggtacaccagtatctgagttcactagggtgctagaaaccagtgagtcagatgcaagagtggaggactcaaacagaacaccagtagacgctattgaagtaccaaaagttattgaagtgaagagggatgaacatggtaatggacagactaattgtctacagtcaccaaggaaaaatataaatgttaatcttctgaaaccaacaaatagatctgaggcagctgatcttctggagtctcaagattcaacaaaaaatattccaattattgtcttggacgatgatagtgatgagaggggcaaagagcaggaaaaatcagaggtccttgatcaattaatccaggagaaaaataaaggtagattttctttggggcagatcaacctaaatctaaattgtgctgaattaccacaagagaggcttctcagtttggatgagacatcggtgtacaaactaaaagatcaggtcagaatgataatattagtctatatttcatgaagtattaccttacattttggctttagtccataatccacattcctcatcttatttaaagagagaacttctttctgcagtgaagtggtttgtacataatacattctgtaccgttcattttagtaggattgggtgttctgtttctttatacttgctctaggtgttcagtaaactgtatcctatgtgctctttatttgaaccactatctagtttacaagctattgttttgctgatacatgtgttataaaaaagtgcttacatatgctttattggataagtccttgatatttgtgctttgtattatctcaagcattttatttgcactatttacaggatcaatgtgttcatgaacgaaagcaaatgtcccatccagttgaaaggttgttttttacaaaggagaaggatgccatgcacggtaaaaaacatcatgaagaaacctcaaccatgcatagctcgtactcaaatttatttgatccagccccatcatcgtcgtggattactgggaatttcaaggaaccaagtgtcatgccatcagaactgaagttcagaatattggataaggctcctgaattcaatttagatctcaaattggatagtttcccagacagtagtgtattagcccttaggcacgataagttatttcgtggaggcacctccagtggatcccattttctgacagaaaggcttgggacatactcctacaaaaggcactcttccccgtggtcagaagaagaattggattttctttggattggagttaggaggtatgggacaaataactggaatgcaatgttgagggatagacggttacggttttctaactcaagaaatgccgaggatcttgctaagcaatgggacaaggaacaaagaaatcttctaggtgtggatttccttcaatcactcagatcctctgctcgaggtcctccaccgccttcacatataccagaagattacgttggaagcagttcttggactggatgctcaaaatctccatttctttttgctccaacagacctttcattgggtgacatgtacctttgaagcggccgtacttcagagagaaggcagcatccttta

SEQ ID NO: 12036 - DNA, 18000 bp, Oryza sativa
cttgttgtttatgaggtctgatatgagatgagagatgaaaccaccagcaacagacagcaattgcacgatccgtgtggcgacggccctcgggcgcttcccccagtatgcagaaatgatctcaggactgtacacgagaggcagcgcctcattgttgttcatggatgaaacctagagccaagaaaagggggaaatgaaaattttgttcttctattagaccttagttgaaataaactgttaattaacgtgatgattgaattgtgtggttggtggggcggacctcgacgaggcggaggcggacgttgtcgtcggcgaattgggagtcgcggaggttctggccgcggaggccgcgcatgagcgtggcgagctgctcgtcctcctccatctgcttccgcactcgctggatctccttggacacctccccgaaccgcttcaatcgcaaacacacaaaccacaccaacacaatctccacaatctcagcgagatgaaacaggtgtaagaacacggaagatctgactgattgagcagagaggcgatcggtcttacggtggaggagatgtcattaggggtcctcgtcctcgacctggagcgaggcgccggggcggaggcggagggcttgggctccgtggcgacggcgaggacgcggcgggatgggcgccggcgccgacggcccggcagcgacgccgcgagaccaggcagacggccgaagccaccgcagtgcagcaggtgcggcgccgccgacgccgccgccgccgcggcctccatgggcaagaagaagaaggaagaagcttagcttcttcggcgaagaccccgaggcggaggaggaggatgaatttgccgcgcaataatcttcccttgcagtgcagtgctctagttgtagcagtaaacgcgggaggcgccggagcccggagtggacctgaatgtggagtgagatggctggctggcccccggccacttggcgtcaccgcgggcacacaaggttcgtgtgcccgggaggcgcggacccatgggcggcgcgagagcggccacccccaccaaaaccggtgaggagaggacgaagcgcgatgtgtccgctttggattcgaccaccagattcccaccacctcaggtaaaatgccaatgcacccaataatgctagcacagctctagtgattagtgattcctatctccggcccattccataaaaaatgaatttagcatagaatattatcggagagtgaactcctccaccaagaaaccgtgaggcccccatttgtgagttcggtcaggggcagcgggtgagatttgagggcttggtgagcggaactttgtgatcttgagggtgttaggcccctccaagacgatgagacaaaagaggtttatacaggttcgggccgctgagaagcgtaataccctactcctatgcatgattgattgaatgtagaacacaagtgcttggagttgcgagacccaagcgccagttcgctcggaagtcccccccccccccaactaggcctggacctccttttatacctcaaggggttaccacatgggcccaacaacctaacctaactccggtggagaagtattataatctttgcattaaatgcatgtcttgtctcttgacttgggaagccaagcacacgtcgtcttgatgatggggcctgtcaaatcttgccgcctgacacgcaagcagcgcacaggcgcactacccagtcccatcggtcattcgaccggtcacagactggttgagtatactgcacgccgcatttggcgcgaccgctcgggtcgccataaatgcgggtaggtgggcacctgtaggcggacacctaacccaccgtatgcggtgacctagagagggggtcggggggagcccaacccctagtcacgggagggggtcgccgctgcccgaccttgggcccgatccccccttgggggagggccacgtggcgcttggggcagccttctccttctagtctcggccagggagtggccgccgccctacctcgggcccgacccccctcgggggagggccacgtggcattggagggcagcctcctccatttagtctctgggaaggagtggccaccgtcctacctcgggcctgactcccctcgggggagggccacgtggcatcggggggcagcctcctccgactagtctttggggaaggagtggccgccaccccacctcgggcctgactcccctcaggggagggccacgtggcatcggggggcagcctcctccgactagtctttggggaaggagtggccgccaccccacctcgggcctgactcccctcgggggagggccacgtggcatcggggggcagcctcctccgactagtctttagggaaggagtggccgccaccccacctcgggcctaactcccctcgggggagggccacgtggcatcgggggaggaggcctccctctaaacctgatacccccgggcccatatcatcgacaaatgtgatacattacagtattatgaatctagacagatatatatccgaattcataaactatgatatgtcatatcctgtagaaggttgattttctatgggacggagagagtagtgcgcaatgcaatcatcttttcacgcttatactgatggtaagatgtggagtaacggcttattactagcaacttaaaaatttgataatttacaaatataatttttatatgtgttcttaataataatgtaaattataataaaaaaaaccattaaaattaactctaaatttaagttttcatatttaaattttagcttttagcttataagcttgaggtaaacaatgggagtgcaattctttaccgcaaatggttcaacggacagatatcacaagtcacaatagtaagcacgaaaacaagaaagagtggtcgaaaaagatgagctttaatttttttttctacccagttggtcttttactagagaaacagaagaataaaaaatggatctagacaacaacaacaacacgatgtacaagaaattttacagacaccaggagaccaccccacgtacagcagcagctccaggacacccccaaaggtgatgtgcagcaatagctacctcccaattcatcgcgttttcgcagctgatgaggtcccgttcttttcaatcgcccgctgcctcgcacgctccatcttccgtttgcgccattcctcaagagctgcagatgtttacacaaaatggtaaaagaaaaaaattagcatcagcttctacatattaccgagggaggtagaagagcaaaacgctgctccagcaagcatgcaaaataaaccgttgtgtacagaccaaatcacactgctattgcataatggtatattaccaattgctagcatatgtatatatatgtacacctgatgacttcaggatatgatttgctatgatcattttgtgtctctgcatcaactggcaggatagaatggaatggtggtgaaatcacaatagcttggtattgcaagcagttgtttcattctttcagcttttcttttcagccctgtcctgaagctctctgatctatagcccatccaactgtattattgaactgttcggtttaactgtgcaactggtcttttttttctttccatgaaatatatactgtcaaatactcgcagcacaagccacaactaaagggccacatattgacagcaatatgatggtagtactacaaagatgtaactgtcacaagactcacaaccatgtttgcaagcatctaacttcattttgttcacatcatatgctcctcggatccgaacagacatagtacagaagataaactgaaagaacaatgcagccccaaaatatgaggagtggtaagaaaccaagaatgaatttacgaacctttttggctgctaccatcattccctgcccttaaatcttgcaacctttttgatgcatcaacagcagctgtctgcttggcatcttcttgtgtcatcatgccatgctcaccataagcttcttgttcgatttccttcacctatgtagcagaaatagcgaagttctaactttgattagcatcccaatgaattctctttcaaccaaatcacgagaaacacaatatacaatatacagtgacttactctcctgatcaaatccacaggctccatagcacgacgtaactcttccgactcccatataaaccgtagctgagctgcggaattgtagcacgggatctttcactgaattgagtatataacaggactgatctcacatgatataaaggaaaaactagaatttgtactaaacgaagaatggttgatcccattctataggttttgagcgcagcttatagtgctgttctctacatttggggtttccccatatgctcagagctcatgaggtatttcgattggaaaaaaaaagagtgatttttgtcagctgctcggattcgtaaagaaattccctgcatttcctgtggcgtggtgttagcagaagcccttgtccacatttaatcagaagaaaagacctgaactttgctagtcagtctagatccaattcactaaccagtttatcgtactatcatttgggtaccaaatcgaacaaatttctaggcccaaatcatctaacgagagatagattgttcaatgagagtgaaatgaacaagagtacaatgagttcgtaccagaatcgaactggtggtcgccggcgatgcgcggccaggacgagtagtagttgcggaagaggagagcgcacgcgaggaggttgattgcgcacaccgcgacggtggcgttcttgtacgatatcctggaggaagcagaagccccacccctccacgccccctgcccgtccatcccgtcgactgcggccatgcggcggcgcggcccgtcgagctcgccggagaagaagacgaggaagagaaaagcggacgcgtccaccaaccaacacaactcccttcctcacgtagaatggtaaatgggcctacggcccattaattagcccataaagaataggcccattaatgagcccataaagaattgggcccaactacctcgcgactaattgggcctccactaacacctagattccaaccctacctcgcttttcaccagtcaccaccacttggccttcctcgtctccggccttcctccaccgcgagctccgaccaccaccgacggcgacaatgcaggcggcggcggcgtggaggcgtcacctcctcgacggcaacatctcccccaccaccgcggcggcgatctccgccttcagatccgcctcccagccggcgctcgcaccccaaggtatggaggaggcgcccttccgggcgtccgggaccagccctgaacatcgcccgcgggtgccccccgagggtagatcttagaggtggtttgggttttcgatgcaggattgggtggagcggatggcgcgaggtacatgtccgcgagggcgccggcggtcaaggggacggggcatctcgtccgcaagggaaccggagggaggtcgtctgtgaggtgaggagctcaggctggttccgttcctccgattgattctatcgggcattcccgttgtcacgagtctgcgtctaggtttggccttcccaatgatttggtttaggttcattaggttgtgataatgttctgatccatccgtactgtcatagcagatatgtgttccttagaatggtcttcctgatgcttagatcgtcagatttgtgcagttcgtatggttgcatttgcgatggacctgttcttgtatacttgtgcatctcgtggaatttggagttacctgtaacacagctaggccttggaaattctgtgccctgaaaaaacagagagtcgattttagttattatgagctgaattggagctctggttgacagatatgtgatgttgttctaccaaatgtatttgatcctacttcccacatttttttgctaggtttgagaaaattcatttgccatttgcatagggtgttgagtgtacgaattgtggtactaatatttatcttaaagagtgttacttgcacatttgctggtgtttgttgcatcttgggagcaatgacgatcaaattaggttaatgatactcttaacctgcaaattttcctttgaatttataacaagaaatttcgtgacagtggaatcatagctacggtgtttggagctactggatttcttggccgctaccttgtccaacaacttggtgagatgataaggctttagacctatagtactacgttgtaatgaataatatcttactgagttatattaccataaaaacaaagtgaaatagtatggtaactcaattatttatttctattcagcaaagatggggtctcaagtgcttgtaccattcagaggttctgaggattgtcaccgacacctgaagttgatgggtgacctgggtcaggtactgtatttttgtagttcacaaattacaagtagtgaagtcattaactcatttttcctttttttttcccttttatgtattctacttttttctcttggcagattgttcctatgaaatacaatccaagagatgtggattcaattaaggctgtcatggccaaatccaatgtggtcattaacctaataggtatgtctaacttggtacagcatcgtattcagagtcaaatcccttcctgactatgtcaactcaatttcaacaggacgcgagtatgaaacaagaaactatggatttgacgaagtaaatcatcatatggctgaacaacttgcaatggtatgcattgtgcgcacatccgcttttcttccaactatatagataattcctaatacaatctttgagaattaggattgaatgaaattcaaagtagcaaccagcttgatttctcagtgcactggcttgcttgtgctcatcccaagattgcagcagcattgacaagcaaccatttggctggtttatttcaccagctataacttcagagggtcacataatccatggttgtgattagatttcaaacttttgcctgcttaggtgaccttggctaggtttcatctgacacaatacaaagcacaatatatttaagcacactgctctgccatcggtatataatccgtctagctgtccttttggttaacattaatccttctttttcttgtttcagaagccagtgttacttagctcctagatctggaaatggaaatatcttacttttacattttgcatgaaaagtatctttttctactgagctgttagtcttttaattcagcatcacagttactgccttcaatgtggaattactattctctttcctctaatttgtgctgtcctgggtaataaccatgctctataatttcattcaattggatacctgtacaaaggggaaaaaaattcactatcatttgtaactttctttttgctgcatcatgacaatataattcccatcaagacttcttttgtggctggctattaactgtgttatggactatgcacagatttcaaaggagcatgggggtatcatgagatttatccaggtttcttccctaggagcatcggcctcttctccttctagaatgctgagggccaaggctgctggggaggaatctgtgttgaaagaatttcctgaggtgatcatctacattaggcaatactgaactcctgtttctacattaccgaaagttagaagcaaacatgtcccatttatgttggcagttactttaaccaaaattttgtttgcatggatcaacaggctacaattatgaggcctgcaactatgattggcacagaagatcggattttgaatagatgggcacagtttgccaaaaattggggtttcctccctcttgttgattctgggtctacaaagtaattgaactttcctgttggctgctgttgtaatgccttgacttaaaatttagtctagaacattaattgatcagagaatacgggcctcatcatttgccctatggcttataagccattgccaaaatttgaattttaaaacttgattttgaagttgattttgatgctaattcaacgtagtttctttttcatcattagcttttaagtcgctaaagacacatgtaaaagtattactcataaattactttttatcagtaataagccgttacggcttataatcagtcgtaggcaaccgatggggacctacataaacttccacagcaggtgagataacatgaatgcaaccttttggtttttgcaggattcagcctgtttatgttgtggatgttgctgctgctattgtcaactccctcaaggatgacggcaccagcatgggaaagacctacgaacttggtggaccagagatttatactgttcatgagctggtaattatcatgcacaacattttgttatgcagcaatgaacgaatcttcaagttggttggtcgagtttttttatataaaaatgttctggatgttacaggctgagctgatgtatgagacaatacgtgaatggccacggtacatcgatgttcctcttcctattgcaagggtatgaacttaaataatatcttgtgttggtcaaggcaacctgagtattggattgtctcgtcttttaacagttatgcttcgggttgtgcaggctatcgcatctccaagggaaatgctgctaaacaaagtgccctttccgttgccaaccccatcaattttcaacaaagatcagattaatgcattttctgtagacaccctagtgtctgataatggtaagcatgatatcttatgattgatctgtaacctattgtttgcacaagctcacatttgtttctggggacataatacagctctcaccttttcggacctcggaatcgtgcctcacaaattgaagggttacccggttgagtttcttgtgtgctaccggaagggcggtccagcttttggttctactgtcagtgagaagatacgaagttctgagctgtagtcttccactcctgaagacactgtagaattaatcttttagttgcagaaacgttgttgtgtttgttttcttactatctgctgctgctgctgccagccgcccaacagcgagcaggaccatattcgatgcatatgttggttcctgctcatgtttttcaccaataagacgcacaaaatctttgtcaattttttgagttgcaaatgcaagtgaggcgaatcgttgcagtcctacgacacaataacaaagatatgtttctttctttaccctatacatatatgctcgctggtttgcattgcttgcaatgatgctacggtgtgataatgtgataataatttgtttagtgtctaatttagtattaggttactatgttgtaggagtagttgattagcacatgtacaaattcactgtataccattttgcttgtgatgccctgtccataggccacacagcccatcaaagctgcaaacacctctctctgcttcctggctgttaggcctccacaattctgctactcctggcccaaaacgcttgtacactgatcagatcgattgattgattggtcttctaatttcccagaagaaaacaaaagggagagattgattactgtgttcactggcactgtcatgagaaatggatgtgccagccaccagctgagctgacagccgaggacaagcgagccaagcaaagcaaatgcatggaccagcaactcgattacaacggcattaccggtaatcaagcaatcaaccacgcgtgcatgcagctaccgctttgccacatcactcaattcacaactactacctctaccagactaccagtcgtactgaattcgaacttgtggggtttaattccagagtggtgattttgatcaatctgaattcgatcaatgacggggacgcgtgacgacgtcgcccttttggcccgccgattaagccgctggctgagcttgcattgcatgcatgatgcatatatatggacacccagatgtgcagccctggacggacggaccgacgcatatattgctgcttggaatttctgacgacttgatgcatcaaccaacgagctcaagtaccaccgagatgcaagaggccgtcgtgctgcatgccatgcatgcacgcacgtttcatctgtcataatcactccggctaattataagagagaaattaatttgtatgctcccaccatttcatattataaatcatttggctttttggtacaactgataaattttcatatgaaaattgtttatttgatcacctcatggcagccatttatatatactccctccgtttcgaaatgtttgacaccgttgactttttagcacatgtttgaccgttcgtcttattcaaaaacttttatgaaatatgtaaaattatatgcctatataaaaatatatttaccaatgaatcaaatgataggaaaagaattaataattacttaaattttttgaataagacgaacgggcaaacatgtgctaaaaagtcaaccgcgtcaaatattttgaaaccggggggagtgggtccaaccaagagtcagtacaactgaaacaggtatataaatgaccgtatcgtattcatacccgcgctcctacagcaacagcactaacaactcatgttctctctcaaaaaaaaaaaatcatatagtatcaacttggttggtactcggagagattaacgtttcaactcgagcacaaacaagggggaaaatgggcaaatgagagagatgtgattggaattagttgactagcttgctctagggtgtgtttagttcacaccaaaattagaagtttggttgaaattgaaacgatgtgatggaaagttggaagtttatgtgtaggaaaattttgatgtgatgaaaaagttgaaagttcgaaaaaaaagtttagaactaaacaaggccctaattaaatggagtgaatgaatggaaaatgagtggctggtttgcataaaagcagatgcactaacagacagctgctagttttgatgacacatagggtgtgctatccagctatcctatgaatgctagacaagaatggcatcctggacactgttaaactagtatcaatgaaatctcagaaatcatcttcataagtcataaagtagaaagatttgcaattttcagaggatgtactccgctgagaactattacttgcaaaatctgagaaagtttatgatcaaaatatgtatgtctataatttgtagggattttttttacggtgcccctttcaaaacatgacacactaaattaagaaaagtgattacaaacatgttattaatttacttgcgcctacacacatgttactcgtaagtcgtaacaggagtaataaaaaaaactggtatatagtctccactcctagtagagttcaatctagacctatcttctttcaatggatcatatttatttttactatcatcttaactactatctctatccgacatttttctcagtcctttgaaactagataccatccaaattcttatattttgataccgaggtagtactaattaataacctcaactgtttagaactcctaaatattaacgatcgagattatttccacttctaatgatgagggagtactgtagtgtgctgataccagccggcttaagacaaactgcagatcaaggcaggaagagagatactgtagagctacatctatcattgttattgtgtgccttgggagttagacaaaaggcagccgcatgctttgatgccctaatttttggtctgatgtgttcgtgtggcgattgttttcttttccctttttttttcttttttgcctcccaggtagatctttcaggttaagaaaagatgatcagacaagccattgattggaggttttgactctttccttctcccaacgcgtttacttctcttgcttgctcgcttccatatttgttttctctgcattctgattctgatgctgttgtacctcttgccaactttttaattgacacaagtgcgccttctttacgagtaggactaacaccgtccattttaaattactggtatttctttatatctttgcaataagtcaaacatattttagccatcaatttctacaagaaattcatatattttaacattataaattttatgtttttaagattcatcgaaagaaatactttcatagcatatatataatctaagtattgaataaagtgcagttctctcctttgtggagcaagataagcagaaagaaagcagatagttaaagtatatagtgcacttacttttgagctctaacttttgaccactgcaatttacttgcgtttgtagcttcctaatgcaaaggatcagtgatggctttctgcgatcctaccctatatatgcaatcagtttgggttcacccattggaaatgtacaaaacgattggatacattatacagtagtattgctgtccatttacagatttcactgttcagtatatttaatttggagctgtaccagtcgctggagattactgtacgtacaagggattaattttctgtactggctacgaaagaaggattgaagctaccttgtttttactgaaggtgactcttgtgtcctactaccagatcgtacaagacggtaagacggttaatgtcaatcaaaccgaactccgaaccatgtgtgcttggttaatgtcaataaggtgattgcaggccgtagtactgcttaaatatccttggcctgataattaatttctctaatagtaaatatatgatgttgttgatttttcagcattcatcttatttcaaaatctacgtcaatagtatttatttatgttattcttttttatcagtaaatgtattttaagcatactttattatttatttttacgtttgcactgtttttttaataaaaccaataatcaaacactatgtttaataataaacaacatcctgtacttaaaaaacaattggtaatactccctccatttcatgctataatactatttaactttttttaattcaaactttcttatatttaaccatacttatagaaaaatgtagcaacatctataatactaaatagtttaactaaatatagcattgaatgtatgttgatgctatattttgttctatgttaaaaacattgctataattttttgtaactttaattattaaggtggtgtttggatctagggactaaattttagtccgacactaattagaggcattaaatatagactaataataaaactaattgtataaatgagaggtaattcgcaagacaaaatttttaagcctaattaatccataactagcacatatttactgtagcatcacatagactaatcgtggattgattaggcttaatagattcatctcgcgaataagttcaggttatgaaataggtttatcattagtatacgattaatatttttaattaatatctaaatatcggatgtgacagtttagtcccttatctaaatagtacctaaataaatgatttagaaaaaaaaaggttaaagcatcggagggagtagcagttttggtatataaagctgggccccgcattaacgcgcttgattatttccatgcccaactttttcttagataatgatctccatgtccagcctaggaggtaatcaattgatccggccatgaaattctgctcactttgatgcttgaaataataataaaaaaatagcagatgcatagagttcgattgatccccaccaagagcaggtaaagtaatatactataaatcggttataagcttatacggataagataaaagagaagagagaagacaagtgagttacatatctgtatatgtgggactaattattaataatatagtatatatttatagttaattattgtataaattagctattaatttaactatggatggtattaaacttgctccaagtagtgctacaggataatttggcgaggtaggtgctgcagcattacatctgagtacactcattgttgagctaaaaaaaaggggctcccgtgaatggcggttacttgtctccacgttgttaggcacgaaatcatcatccaaattcacaagcaaaattgctccctaccctttgcagttgcagtgtttcatcattcgagcgcttttaattcacatcacatgcttgcatatgcgtatgagatgaagaggatacagtgctcgtttgtacgcgatgttgttggatgagagacatcggtcgagcacatttatgtcgcattctctactcatcaacatcatacaacctactactaactccagcttaaaacatgtagagctgtttacttttaaaacataatgctattccattcctttcatgatatatccattttgatgtgatttgtacgattattaaagatatttcaggtatgagttatatttttaaatacttccactaaatttttagataaaataatccaacagtatcccatggtgactttatcaatctcaagatacgccagctcagtttttttagagatgcttatagagatagggtgtgcgtgtatatatttatagaggtgagtgtacgcgcgttgtgagcgtcttgcatttgtactgtgttttttaaaaaaaatatttaaaaatcgagaaaatagaagcattctccgccgttgataaattcttccttggaaagacctcgtaacacttccttggaagcgttggcacacaaggtaggtaagcttagctttgagtctttgacaacccaagatcgatcacgaggcaaccgtccaacgtccagtcgtgggggccaacttcttctgatcgaccgtgtggctattttcgtcatttttctaatccgccgttggcctaatttgacaaggaattaaaaaatggatctcacactagagaatgaaataaatgaaattaaaggaggagaaacctcacagatacgccaccgaccaagcatcacaggctggaattccccgaaatgccccctccctcctcttctctgctgccatccacgagttggatgagttgtgaaaccgtgtaccagcacggaatcacgaggccataagctgccattaattaatactatattccaaattaaaactagcccctcgtatataagagcgagtttaatattatagccaactactaactttaaatcatttatatttaatttaatagccgatttatacaataattactacaaatatataatacactattaatacttgatcccatctgtcatacacatatcgtgtcttaagatccgtaatagagctagttataaatttttttaaaatatatttatagctgtcttatcgtttgcaattatgagtacttctctaatgccacagccacaaacgctgctgctctttccttctacaccgggtgttattctaccccaccgctcaccgacatggtggggcccacctaatgatccaagcctggtggggcccgcctatgatctaagcctaacggcgccctgggtcgttgggggcggtgacggtgaccgcgcgtttccagttttccgtggggtgtcgcgggccccaccgcgggtgcgtacccacgaacagcgggtgtaccactagaaaacaaaataaaagaaaaacggcaaatggttttatatttttcttttctccctctaccttatgacctgctaaatctggtttacccaatgagttggcgccacgttggatgcaaaaataaaatctacaggtgtcttagcggatccgggtttttgcgtggcttcgcgggtccaggctccgaactttctttctacagccacacaacacacagcacctactcctagcttgtccccaagaagtaagcttacccaccacatacaaggacaaacggtgtatacatgaattctgaattctgtactctgtatttcgtaaaggggaaaagttacatctttttatactttttgcacgcttaatactaatctttataaaaaaatatgttacgaagtgccgtaccttaaaccaagcgatcgtcgattaaataattatagatcaaacaatggtacgaagtgatgctccctcttggctatccaaatggtatatattatcagtaagctaagattatggtacagctataattcgattataaagttgtaggaatccagaatgacaagctgtgtattttaactttttaagaagttagtttagccatgaagcatcatccttgcgtgagggaatgtaagggaattcaactagctatacatagtgaggcacacgagtgacaaaaacatagtgttacttaagtttgagactgcccgaggactgaggttcacgtcaaacaaaaccgattacacgggagccacacagtacctactcctagcttgcctccaacaagtacatcttacccaccatgtacgaggacatacgatacggtgtatgcatgaattttgttctatatgtttcgtaaaggggaaagtttcatctttttatactttttgcacgtataatactaatctttataaaaatatgttacaaaattctataccttaaaccagatgattatcgattaaataattatagatcatacgatgataggatttaggaagtaatgctccctcttggctatccagatggtatatatgatcggtaagctatggtgtggctataattcaactataaagtagtaggaatacaaaaggataaaaaggatgcattttaagaagttagttcatcatgaagtgccatcttctcgtggtagtgatgagggattgtgaaggaataacaactagctatactaagcaaataagtcaatactatagtgtcacttaagtttgaaattgcctaaggttcgagtcaaacaaaaactgatcataagagcaaggtcaatagtatagtctacggttggctccaaaaacatccacatcagcaatacaattaactagtaaagataacatacacagtaatgagctattagctcttctatccataaatttgcatgtattacttttcaatattttaatctactttttcagttactgacagacctctgtttctgcatggtttcacttggaccccacctcacaaccgtgtggccagtagaagcttatctagagctgctttgcatgcgttggagcccttgtgtcgtcggcgataaattagtcgcccactttcactctctctccacttatttcttctccagatcatcacttttgccaccgtgtatagattatcacccgcttaaacaacctattgtacctgctctaagagtgttgcacgtatatgtgcatatcgttataatcgatcaataaatatttttttatatatattctcatttgtcactctatacgtgcaacaaatgtaaatttatagatcagtagtaaaacaacatgaatagattacatattaataaatggctccataccacattttaaatggctggcggtttttataaggtcatgacgtcatcaagctgtcaacatgatttcattttcccgcgcatttgtagtaaactaaccctctttttccacgttcgacatatagtcatatacaccttataactacgtgtgctataccattgctacttttccacatgtatgtcttgaatgtctcttatttatcatagttatcatcgtacactccaaactttagataccattttttccgtgctctcttcttagaatcattagtcgcgcaagagaaccatctaaccattttttctacatggtgtacagtcacattagtgatcacgcgccattatatatatatgtatatatacaagaaaactatatataaagttgtttcgtgtacacataacctattcggagcatacagaaacccaaaacccgctaagcaaatgagaagggaaggaaaggatgaaccgaaagacccggaaggagaaaaaatgcctcagactacaagcaagtagtactagtagtagtaaacgaaaacccgaagaaacccaagagaacaaaaaaaaaaaaaaaagcgcaggcggcagctgttcctcctcctcctcctccccgctcccctctcccctcgccattcacattccctttctccacgagagcgaggccaaaacatccggagaagagagaggagagggagggggtttggactttggagaggcgccgccgcgaaacccccgcggcgcaatcgcggagagctctcctcctcctcgtcgtcgtcgttgttgccggcggcggcggcgctctgtaaggcggacgcggtgcatttcgtcggggttgaacggcgggggcgggttcggaggcagtcggggggcggtgggagatacgagcagctgttgctgctttcgtgggtggaggggttcgggg

SEQ ID NO: 12037 - DNA, 985 bp, Oryza sativa
ataggggataaaggatccccttgcctaagtcctttgtaagtttgaaaacaattaccaatttgatcgttaacttttataccaacatgaccaccttgaacaaaagaagctatccattcacaccatctaggagaaaagcctttcattctcaaagtttgttgtacaaaaggccatttaactttatcataagctttctcaaaatcaatcttaaaaattacaccacttttatctttgcgatgtaattcatgtaaagtctcatgtaaaataaccaccccttccataatatttctcccaggaataaacgcagtttgagtaggactaattaccttttgagcgacatccattattctatttgtagcaactttggtaaaaatcttaaagctaacattaagtaggcatataggtctatactgttgaatctttaaagcctcagcatacttaggcaaaagaatgatagttccaaagttaagcgaatataaaggcaaactcccagaatgaaagtccttaaataactctaaaaggtcaaatttaatgacattccagaaaacttggtaaaactcagcaggaaatccatctgggcccggagctttgttatgttccatttggaaaatagcatccttaacctcattttcagaaaattccttagttaaggcttcattctctaaatatgaaacttgaggaatgtcagcaacataattctcatcaaactgaaggttatactcatcaggagggccaaaaagacctttataataagtggtaatatgcgactttaaattggcatcaccacttattaaatgatcactctcctgtaattgataaattctagttttcctatgttttccatttgccactaaatgaaaatactttgtattagagtcaccctctaaaatatccttagtcttagcccgctgataccatttaatttcttttctcttagaatgacagataacctactcctgaaaaaccatctaatatcaacttcctcttg

SEQ ID NO: 12038 - DNA, 7757 bp, Oryza sativa
aaaaaaagtgtagcttgctaattaaggtatggccaaaaatttgattgtcttaacttagataaacatagcattatttatccgcaaatgatgataaagtatggttgcaaaccacttcctctgagtctcatttgtacctttatcttattacttttccttttttattcatttcatttgtttgattattttctagtattctttttcgattatggaatatatggaaaacatatgtgcaccgtctgctagtatccatcaaaacactacccgtgttaccgtgtaatatctttttaacacgcttaaaaaagctatagaggatgaataagagggataaattcgtgaaactcactaagttctcgagtgaaagtaaatataccttatgtgtttggacctcatacaaagatcgtgttttttccacgtctctaaaatactttttaactttaaaagaaatattttactgtattgcttattatatcgtttggttaaactatgccaaacaataattgttgttgcatcccggccatgcatgatgggcttgaattaaaaccattatcctctctaccattagtcatatcttcccgtcgtcatcaacaggtagattaattggatctctaaaccttctgaatgttcatctccacacctaaatgatactactatgatagaagtagtctttatattctggaaggtgatttgtactccctccgtcctaaaataaacacagccatgagtttttgtgtctaactttaatcgtccgtcttatttgtttttttcttgaaaaactaaaaaatataagtcatgcataaaatactattcatattttataatctaataacaataaaaatactaatcataaaaaaaaattatataaaacggccgattaaaattggacacgaaaattcatggttgtgtttattttgggacggaggtagtaggtttttactaggtatgtatatgttgcttcagctacacccccttgctgttctctttcacggtacctgattgatatacagagatgatggctggaattaattgtggtggtcatgctcaagcctgtgcttttcactatttgtgatagggaaaacaaacagagaaaatcattactgatccgtgaagaggaaaaaaagtattatttaggctaaaaaaagtaggctcacagatcataatcatgatgacttggatgagatgcttgtgcaattaggcacctccaaaagctggacattcggatggtagatagattgagtgaccccagcaaaatgatcataaatataaagcttccaaatataagtcgaactcacttgcgcacacaccacactcatgtttataaagagattgggcttatccttaccattaaatgcacccacgtgtatatgaaatacttttgaggttaaatctaaaaaaaatacgagcatcagtagaaagtctagaacttcaattaagtagaaaagtttcattacatgaagcttaaaaagatattcactgttgttcatgtcaattcatctgaaagcttatgttcagaaagggaagataagtatatacgagaaagaaacatccaacatgacgactgggttttttacaatgtgaaaaaagaacttttcagaacataacaaaactagtgatgcttggacggttttaacttttacacaggaaaatgattccaagtatatatgacaaaaccgaaaggaaaaactgaaagggtcatgaatggtgtcacatccttggccttgataggcgatgatgccaccatcttcagatagaaacaggttggaaaattcaggagttatgaactcttcttcccatgaaaatctacagtcgtttgattttcaaccgatgaaacaatatcagattttcagtaattcatccttgtgacagcaagttaattctactttcagtcttttcctaactgggttcgcaagctgtataaatcaatggagattctgaatccagctagctaaaacagtgagactggtacaagcagcagcacaaaatacacagatgggagatgggcgtgttgttgcttcagaatgcaggcagacttcgccatcagctgcaactggcaaataccaggcgatggaatggagtggatgtgtgtgaagaggacaaggcaaaccatgtgccctgcaccgcatctcaggcagaatttctaggccagaaacatgcatgtgtttgcttgcttccctggaaatcaaacacaccagaagaatattttttttggaaacacgatacaaacacaaacgctcacatacgtgcgtacacacatcctattcccatgaacacatccaagagattgaaccagtgtgtcttgagatcgatgaagttagcacagatacctcgctccgcctctaatcactaaaagaaaaataagccgtgaatataaacattaatatcaagtctagagtttaaaccgggataggtaaggtctaccataagggacctaactaaatgagctacacttggtaccagaagaatatttttgctagacagtagtacagttgagaactttgctgcactgtcaatttagggtgaaaaagatggcatctttgctgctgtaacaatggggacacgatcacaaggttgatagccacacaccatgtgcagatctctgaagatgatagtgaacagggagaaagaaatcctccccttttttcccctctgcatcaacgtgggaattaagcctgaactcttgttagccaggagttgtagcagcaacttagcaagcactttcgtttcggcacgcgaaccgagacggatcggttttttgtcaaaattgaaaggtgcccaacaatggcatgcctaccaccaaaatctgccgaaatttctgctcggttatatcatatcacgaaaaagttgagaagatgacgtttcatggaatggaagaaagtctgaagaattcctttgcttccagtcactcacagtgcttttctacagaagccacaagaaggtgaccaccacaaccagaaaagtattcagagaaatttgtcaccacaccaggatgctctctgcacagaatcttcaccatgaattgaaccatcttggataggaaaccatcatgcagcctgcctgttggacttggatcctggacagacaaattgacttgtattttcagtttctgaagctcaaattgtgcaaaatctgcatatttagttttcccaattggaagaagggtctctttcaatctgcgccgccgagtcttatcttaatcaaaagaatggctagcatgtaacgccggccatcggatcgttctgaaatcgaggttgagataagctacaatattccgattggccggcggcaaatccatcattcaggccacatcttgcctcaatctgaatcatccccagcaatccaatccccttttctttcatacaagaaagctcatctttttttttctttcatattgcacaaacaagatctatattacatgatgaggaaagccacagggattatactgaaaacacatggaatctacaccctcaagatgcatcacacagaaccctataagataaaaagcttcacactgcaactcaagtactcaactgtgtgcccgaaatgggatcagatcaccccaaggacaggaagcatacagaggaagaagagctttatccctatgaacaacttagctatatacttacaggcaggaagctactgtattctctcagcaagtctttatgatctcaggcttccagctccgccatacaatctgccggcaaccgaatttgaattcttggaaccttctcttcagtgaccccttctttggccgctttgagcccggttcagaaaccgacccatggtagtgcagaggaggctgtggtgtgccggtctcaatgctggccacaatcttctgaaccatctcatacacctcactcatctttgggcgcgactttggtagccggacgagacagcggttcgccacactagccagctttgtcatggacttgaggttgtagtgcccctctagccgtgggtctatgatgatggggaaccgcttgatatcagatatgtatggtttcacccaatccaggagcttctgctcaccctttgggcggttccggtcaatgggacggcggccggtgatgagctcataaaggagcacaccatagccccatatgtcactcttggcagtgaggcgtccggtctgcatgtactccggagctgcatacccaagagttcccacgacctgtgaatttcagatgttagttcagtgaaagaacaaagaagtgaggctttgaaatttagtacagggagaatctacttggaaatttagtgcagggagaatctacttggaaatttagtgcagggagaatctatatattatatcatttgtaatattataaagcatgcttagcatcaacactttaaactgaactttcactacatggtgttggctttttgtaaacgagtgatgggtccattttcccttttattttggttaaatatatgaatgctgcattcctagatgctagtgctttttgactgcttcagaaactatgatacataaatcagagatcaattatgtgtccaaggcaattctacaattggttgtggagcaactgagtgtccaacttcgttggtataaaaaatggatcctgttatagatgtgaaacagaaccaacttactaaatgcacatacaccatcaattatcatcgagattttctttatcttaatttctcttaggtcatcatgcatttttttttcccaatacaccaagttaaagactctgggggcagaaaatccagtcacaatacaaaagtgcaaaatggttctctatttttttaaaaaaaatgtgggcagtgtaaaatggttcttggtatatcaatgcacataccgctgtagagacatgggtcaggccttctgatggtccatgcctagccaatccaaagtcagacaactttgcattccagttctcatctaacagaatgttagatgtttttaggtcacggaagataacctgcatgtatatattaagtttagcaccatagatatagcagacaaaaaaacctaaagaagtgcatctttcaacatttcattgcagataggaagtgatgcaacattgcacaactgtttcaggtacaactggtagcagttttcatcatcagagagcaaaagagttacctgaaattccatctcttcatgcagatacttcagtccccgagcagcgtccagagctacttttagtctcattggccatgatagagttgaatttgacctacttgacaagtgatcatccacgcttccattaggcatgtattcgtatactaggagacgctgtacgcccctttcatcatcttcagcgcagtagccaattagtttgacgaggtttggatgctctacaatcccaagcacattcagttctgttaaccattctttctgcccctgaaaaacatgataatttattagaacccaaattagaggataaggctagattcctgcataagtgacttaaaaaggattcatcaagcaaggtgcacttgagaggaatttcttatgccatgcttgactgtaaattgtcgtgcgggtttcctgaataaagtaatggtttcttttctgaagaaaatagaactggtgactagaaaatgctggtttattttcgctccttttaaatgtgggaaaaaaaacataatgtaagatatgcagtacaagtagaaggaagttgctatgtgcattgaaagcttgtaatcggtacagttcagacgagaaataacttgcctgaagtcctttgcgattcagctgtttaacagcaatctcggtgcgctcagttggttcatcggaattcttgatgacacccctatacacacatccaaacccaccctcaccaaccataagagaccggctaaaattgcgagtggcattcttcagctcagagaaagagaacaccctgaggttactgggccgatcagtgaagctgggatactgtgtcctccgtattgattcggcactcatgtcagagacattcaaggagttgaagtcggagccggaccggacatcccgctccgtcgatgttgtgctcaacgaccggacagaagccgacttgttgacgggatcctcctctttggaatctccatgcaagaaaggcaggcacctcattgctgcaatgcagtgggaacaaattaggagctaattcatgcttcctccatgcaacacaaacacaaatagagaattggaccgagaagatccattaggaatggctgctaactactgtgaattagaacaggtataaaactatcaattactttcttaagtttcctgactaggaaatgctttcccttgcttcaagcaataattttagtactgaaataaggacagaaaaaactttggagcctgaattatgcaaaatgacaccagctaacatgtgtgaagggaagatcttatcatgaactgacaagtatatcaaatctaaaaaaacaagcatttttactgttccaggatccaattacagcaacaatcaacaggaagtaggacaaaaactgggcctttacaccccagggacagaaattgagtgctgagagaattctgtaaatgcaaacatgcctaagctcaagattggggaaaacagcatgacgagggcgaaatagcaccaggcctgatgaaaccatacagtcatacataccgcaactagcgttaattaaaccgaatcatcaaccaaccttaatcctaccaaaactaccgctattcctgacaacaaatcaggaaggaaaaaacatggcaagatgtacgattccaaagtcaaaacactctcgaacgcaaaacgcaacaagaacaagtacagttatcacctaccctagttagcatacatacacaacatctcaaccaaaaaaaaaaagaaaagagatggaaaagaaaagatgataccttgccaatcttgcagaggcgaagatgatccgagaggggaagcaccactccgcctgcgagggatctctttgtgtgtgcgatccaggcaggaagcgacggggaaaggggagagaagaaggcagatgagcacggagatggagatggggggaggtcggaggaggaagaaagacttggacttgggctaagcagcagtcaaagttgggagctttgcctcatattgatttgttttatccctctccctctcatcagtctcaggttctcccctttctctctcacagtcacacacacctactgatatttttttaatatttttttaattttaacttacttatcgttttagtttattagtattagtctaaacctaaggtggtgtttgaatctcctgaatatgaagatgaaaacgtatatgaagattaagtgtttcacgcaaaacgaggtactaataacatgtgattaattgagttttaattattacaaacttgaaaaatggattaatctgatattttggaataacttttatatataaatttttcgcacgaaatacaccgtttagcggtttaaaaagcatgccacgaaaatccaaaatttcatctgtagtggaaacgatcaggacctgtcacacacacctactgaacatttttaaatatatttttaattttaacttacttatcgttttaattagtttattataagtctaaacctaagtcaagtataatttttaactgttaatatttttaaatccactaaaagaaaatagttttattataatttatatgttgttaaactctacggaattttaaaaattaatggacaaaaatagttatgtttgacttaggagaaacttagaatgacaagaaatctaaaacgaaatatcactattaagcagtttgcactcttattctagaaggaataatactag

SEQ ID NO: 12039 - DNA, 16133 bp, Oryza sativa
gagccatgggacgccggtcaaagctgcggcgcggcggccgggccatcaccgccataccggggggattcctccacctctccctcctcgcctccctccgccgccgcccctcgctccaggcgcacgcgcagctgctcctcgtcggcctcccgctcccggcgccgaccgcctcccgcctcctctgcccgcacctccgctccgggaacccctccgccaccctccgcctcttcctccgcgtcctgcgcgaccgcgaccggcggccgtgtcccgtcgactcccaagaggatgtccccgactcaagctccttctccgccgccctcgccgcctgctcccaccatgcctcgccgtcgcccggattctctatccatgccttcctcctcaagtccggattcgcctccgacgtctttgctgccaattcactcctccacttctatggttccttcggtctccactccctcgcgcgcaacctgttcgatgaaatgccggctagggacaccgtctcgttcaacactctgatcagttcatatgtgcattcctgttgtagtagcgatgcattcgaggtattcaggattatggtggacagcgggttacggccggatgggtggaccgtcacggcgttgattggtgcatgcgctgagctgcaggacttaagggcagcaaaagcagtgcatggggttgccaggaggatgctagagccacgagtgtttcattcaggagaggtggcaaccagtttggtggatgcatatgtgaagtgcagaagcatggagcttgccaggcaggtgtttgatttggcaggggataatgcaaggaatgcgaggttatggacaaccatggtgtcagggtatgcaagagctcaggagtttgacatagctcaaagattatttcatgagatgcctgagaaggatacggtcgcgtggactgctttgataggtggctttgtccgggcagggaggtacaaggaggcagtggtgttgtttgaggagatggaagaggcagggtttgaggcagatgaagccacaatagttacagtgctttcagcttgtgttggttatggtaacatcgatctggcaaagaggcttcattgtcttgtggggcgtgatggtctgattaacagaaatgcaaagcttgctactacttttgtggacatgtatgcaaagcatgggtgcatacagacagctcagaaagtgttttctggtgttgatgatgattttaagacattggagttgttcaatgctatgataaatggacttgctcggtgtaaatttggcgagaaagccattgcactttttgatgaaatggggtcacttgggctccatcctgataagataacgtttgtgtgcgtcttgtctgcatgcagacacagcggcttggtatctcaagggtttcatatatttgattcaatggaggagaagtatggtgtcaaaccagagattgagcactacacttgcatggctgatcttcttgcaagggatggacaacttgacgatgcgtacatttttatccagaacatgcctttcaaagcaaattctgttgtgtggtcatctcttgtgagagcatgtatgctccacggaaatattaagatcagaaagcttgcagaggagcaacttctttggcttgatcccaactacaagcctgaaaatctccccttgtcaaacttattttctgagggaaaaagaaaagagcgaactgcaagggtgagaaagtttctgaaccacaagcctgtgtgtaagcataccaaataatagaacatagctaagactggaatatctgtaagtgctactcatacttcccaccctcagaccaagctgattaatttgatgcttgtcgggcagctgatctttacaggacgcggtatgagtggggataatactgttcaccacatagagatggttgccgtagcatttgggttcgtaagttcagcccctgaatcccctgtctaaccttgggattcatgacaaattttagtaatcatcaatcagtgttcaagaatctgttaaagattttcaacaaagatatatggctgaataacagggcaacctccatgaaatggaaacaagaggcatgcccttgcatggacaatggtgatgcatttgcagatcttgtgaacactggcagtgcgttctctagctgtggtttgccttttgtatacatggtgcacgcggaaactaagtttgtgctcagttcagtaaaaagatccagaagtccccaggttaatctgataacagaagtcatggcttctgaaattactgcacagcagcccagaagaaaaaaaaaggtcgcaggagaattttcagggctatgttcttccgtaagtattctattcacagtttagaagttttgcgagttttgcgagtgccctttctccatggtacctaagatatagtaattctgatgctgaatgtttaaaacccagcaccttgtcatggaaattagttagtagcttattgagatatgaggtcatcaaaatactgtgttctgttgacatgtatctagcctaattgagtttatcaaaaccaacaactcaccattgaatggagattgacagctgacctaactttgtcaagataaatgtctgaacattccacagtgtatgtgtagttgaattgctaaaataaaagcatagaagggagcttacagttgtagttgcaatgacaaactccagacttatctttcaaacccacgctatcagatctcttcttatcatcactttcctccagtactgattcactttttcacactggttttttccagttagattaagcatgagtcactcagtttatttattggaagctcttttcacccataagaatgtcaatgaggtgatggccaaccacagcaaaatctaactgttttgtttgttgctgtagcttttgctcagtataattatataagcatactcttcctgaagaattagagtatcataccaagcttaagcaacctatgagtgagcatgggaaaaatatgccctttccaatcatttaaattatacccattcatagtatcataatgcagttatttcttcgcacatgtgattgtgtgatgagtgcattcagtggcaagaacgttgcaaggctaatgggttaaagacttctgtattcagcgttgacatacactgcaagtgcaatggctgcatcaagaagatcaatgatggtatgaaaaggatcagcctttcagaaggtacatgaacttccataagcatctccttgtgatgttcttgtgtgtagtggtgcatatcttctgcttgcatttcattgatgagttatctaagtttagaccttggtatcacttattcactgatgaaggggtggagtgggctgatctgatgatggataaaagcagaggtggaagtggtcgggactacggatccagagaagctatgctgtctgttgcgtgaagtgacaaagaagcagacagaaaaacgtacagaaagcaccgtatctgaaggcggcactgcaacatctcagcaaaccaaaggcctactagttggccaggtaccaagggactgacttactggcaatttcagtcaaataagccgtttttcatcagaaggatccatgatacggattacggagtactaacatatcaccatttgtcgattcgaacgttattgaaacgtttttgtccaattcacgactgcgattctgaactggatagtatttcagggtcctttatgacttattttctctggagagctcaagtcgagtgacaccaagcgccccgctattggcagaaacatggaggcagcgggaccgtgccttcagagcgatgtgcatacgtttggcatatgtggatggcatctgacattactgggacattagcgatgtatgagctctaatctaagcagactgcatatgcttcaggagttcaggtcatctccgaatacataccgcgtattgattttcctttttctggtgaattttggagcatatgccatgccatccccgatcactggttgtctaggtttttgtgtaggtttatagccaaaaatatattttttagacggagatagtggtacttttgctatagtttgccatacgatgtgctgctaccagcttgaggtgtgtgctgaactttaggtttagtttgaatcagcttttcggtctgactactactttttacaaaaaaaaatctacatagaatttctcttaataaataaataaatacattttttaaaaaaaatgtaataattagtaataaattaacaatgtgttaatggttcttttcattttatgtgccacaaaaagtcccaacggaaatgctgtatcgaactgagttcactgttgcgcacttgcaggcttacttgagccaggcccgttcgaacctgatggatgaagattaattacgtgcaagtaaacgagaaaattattagcaaaattaataaggttttaattattttaaacttgaaaatggatttatcaaatagtttaaagcaattttaatatattaagttttcgtacaaaatacactgtctagtaatttgtaaaatgtagagtagtagtatatagaatgggccatagtactactataatatatattagtactccctcggtccgatagaacgctatgtccatattcgtctctaggattttgttttttattggatagaggaagttactatagtaccaaaattttagtaaaatagtaaaccaaacacttgaacattacctttgttacaaatttggttttacccataaacttatctcttagtagggtgtgtttaattcacgtcaaaattagaagtttgattgaaatgagaacgatgtaatgtaaaagttgaaagtatgtgtgtataaaagttttgatataatggaaaagttggaagtttgaaactaaaccaggcctagtatattttggtttcactttaaatcaacaaatttaattctaccctaccaaagtttagattagatagtgtgaaaagtgaaaactggctctaaatactcgtagtagatagactcgtagaataatacagtactccgtaggccgtagtagtactactacgagtactagtagtagtatctgcatttggaagttgttgattgcacaaatcaactcccagtcagatgaagtctgaatagccgtggcctgtgaagtgaagtaaatagccgtgacctgaggagtgaggaaggaggtaggaaaggggcgaaatgacgaggaaggatgagaggaaggttggtctagccctagcccgtgaaccacgcaacgacttggaacgacgccagcaccaacaccaacaccagcgtcaatgtgcacatggttgcactgctaccataatattggctcttggagcgtcaacgaacgctcacccgtatcttaatgttaactcctccaactgatatgtactctactcgtatatgttcacgcggtgcttaattatagtcaatgcctcgcaagtccctttttgtactgctattcttggcgcggttcgttaaggtgtatttttggcccctctctctgacagagcgaagtctccgtgtaaatcactgcacatgcattgctgatgctctactattgattcctactatcagcatccacatctcaatatattggatcatctacatctatcgtgaaatataatttattctagtattaccaacctactccctccgtctcattttaaatgcaaccatgagtttccgtgttcaactttagtcgtccgtcttatttgaaaattttttataattagtatttttgttgttatgagatgataaaatatgaacagcactttatgtgtgacttatgtgttttaatttttcttaaataaatttcaaataagacggacgatcaaagttgggcacggatattcatgcttgcacttaaaatgagacaaagggagtactacgtacgaatagtaattttgtttaggccctgtttagatctcaccctaaaatttttcaccctgtcacatcgaacgtttgaacacctacatcaagtattaaatataggctaaaaaataactaattatacagattgcgactaatttgcgagattaatcttttaaacctaattgctctatggtttgataatatggtgctacaacaaacatttgctaatgatggattaattaggcttaataaatttgtctcgtagtttactgacggattttgtaattaattttttaagtgcccgaacaccctatgcgatactctatataatacttaatgtggtacgccaaaggatgtgatcggcagtgctcgctgctgcagccgctgcggctgcaagacagcaagagcaaaaaaacgactacagcggcagcagttgaaacacagcagcagccatagcggctgtagtagccagcagttccaatcagcgccaaaactctacatccctggatctagacatccccttgaaatggaattagtaagtggctacctgctgcttgggctgtgtttagatccaaagtttggatccaaacttcagttctatttcatcacatcaacatgtcatacacacgtaacttttcagtcacgtcatctctaattttaaccaaaattcaactttgcgcttacccttagttatggtttggtttcttcgattgcaaggtaatcgagcatgcacgccactgcgcagtctttcagtgaagtgatttgacgcgagctattagtagctgtactgctgctttatgtactctatagagtactacttactgcgttcaaatcctaatttccgtgtccaacgtttaaccgttcattttatttaaaaaaattaaaaagataagtcacgcataaaatattaatcattttttatcatctaataacaataaaaatactaattataaaaaaatttcatataaaacggacagtcaaacgttggcacggaaacccagggtttgccttttttttagacggagggagcagtccatactccatactgccttcggataaaaataagtttatttttcacctattattatacacgtatcaatataaaaatagaaaaaactagaataactctatattatcaaattctaatataactattcatccatttatctatttctaacaaaactatttccaatgaaataaataataggagctaaaaataaacttgggacggatgaagtattatgatctgtttagtagatctttaactcttaaatctagcttcaaaagttgggttcggaatggagttgtggagcaggctaaacctaacttcacctctatagcttattttctaagaaagttcgtcctattttaaaataggaggtaaaattgtttacaagctgtgcagacatatcaatagggtgtgtttagttcccacacaaaaaaattacacactgcatcgtcgtattaaatgcatgctaaaaaataaatagattacgactaatttgcgagatgaattttttgagcctaattgctctatgatttaacatcgtggtactaatgatatattaattagacttaataaatttgtctcgcagtttacatgtggattctataatttttttttggttattagactacgtttaatattttaaatatgtgtagtataccttatctgagacggcaaaaatttttattcctatctgaacacagcctaatcactgagctcgcctagtgtgatggagtcgatctctttcacatcaatcgggttggagcagagagcatcaactccagtttgtcgggcctgccgttgactgacccgttgacacggccacacgcagtctccaacccaacccttgcagatcaaggagccgcgtcgtggcccccgcccaagcccagcttctcccttcccctcctctctataaaaagggctccccgtgtgctaagctagtagtcatctcacatctcatccattctttttctcatcttcttcttgcttccatcgcaacagcagcagagcagctactactagttgatctcacttgagagaaagggatccatccatccatccatcaagatggggaagaagagcaagaacggcggcggaggaggaggcgagaagaaggcgacgacgacggaggtggtgctgacggtggccatgcactgcaaatgcaatggctgcaaggacaagatccgtaatggcgtcaaggaactcgccctcgtcccaggtactacactactccactagcttagctgcctggatcgatcgatcgattgattgattgattgatcgggcggtgaagtgatggtgatgagtgattgattgatacaatgcaggggtggaggcggtggacaagtcggcggtggaaagcaaaggggaggtgaggctggtggtggcggccgcgacggcgaagcccgagaagctcaaggaccgcctccacagggtcaccggcaagaaagtcgacctcctcgtcatcgcgccgcccaagcctgccgccgccgccgacgacgacgacaaggccgccgccgccgaagcggttgccgcgctgatcaggcaggcgcaggcgcaggcgggcgtccacgtcgtcccgggcgcgtgggcgggcggcggcgcggtggcgtacccggcgtggggaatgcagcagccggagggcgggtactactactcgccgtcgacttaccctgcaggcggcttggtctacccctacgcggcggcgtatccacctcccggtcagcagctgctcggcaatggcggcggcgtggtgtcgccatggtacactcatggctactagcttagtagtacattaattcgtagtattagcgatgtttgttttgtaattagtgatacagtacgagctagtacttgtatccagatgagtatcagtagtggatcgagcaggagagtactccagttagtaatggtggttgtcatctatagttaattttggtggggtgatgaggctcatgtgtgtgcacatgtagtggtggttataacaagtgtgttaaatctctgtctcatcggaactgatggtattatacgtagaatcgcgatcgtattcggctggcagttgccaccttccccctgtttgaaatcatcatcatacaatgtgctagtatgctatacgacgaagcaaaaaaggcttttggattcggttcatggggttgcattggcaggcagtgtggcatgtacagtacactggccggagcggaagtagagcccaaaaagttgtttgatttggcctcctctgggaaacaattttaatcacctaggtgtacatccacctattcgttacatatcaactaaattggtataaaatatttaaaaaaatttgacaactaaattggtataaaagtattaaaaaaatttgacaggatagattcatatgtaatatatcaccccccacaaacatacaagttcaaattcaatttttacaagttataacaaaaacaacaaatcaaactctgattagtatacatatattcatagttaaatttgttatttttgttataacttataatagtgaattttaactgtgttacattatatatcattctatcttctatttttttaaaaaaaaaacttataattatttaattgacatgtattaaacaaatggacatccactcgagggattagaagcctatctccaggctcctctctctggtctggctggtttggcccggccagcttctttctacaggagtatcatcatctttgtgttctggctcctgtgttgtgctgcagcagcagcagcaggcaggggaattgaggccagatgaatcaaattgaccatggtggtggttgtggttgggttggtgtctgtcttttgtacttgaggctgatctcgctggtgccaatccgtccgtcgccacgatctcacgcaccgtatgttgccctacgtgctactactagtagttgtagaatcgtgcgtgattcacaacaccagcagcagcagcagcattaatttgttgatgatcgttgcggtgcctttactggagtgagtacgtacggaaggaaggaagggtcggtggggccccggtgtcagtctccacaccccaccactatcatcgtgcctgcatctgcatgtgtgtacgtactacgcgagaggaacggacggctccgatcgattcgcccgcctctcccccgaaaaacgaatcacccacacacgacttgcgtttttgtctctctgctctctgctgctgctgctgggtcccacactcccaccaccaccaccctggccgcaaaaaggcaaccaaaaccccatcacaattcacaagcctaaacccccccccccccaccccctctctctctcgccgtctcgccgccgcacacaacaccacacctcgccatcggagcagaggtcgaggaggaggcggaggagaagccgccatggcaaaggtaatctcctagctctaccctcccctctccctctcatcgcatcgcgctactcaccatctcagttgcagaagaagaagcgcaccggcggcggcgagcagccgaagcctgcgtccgacgtcgcggaggacaagcccgccgaggacacctcgcccgatgtgcagcagccgcacctcaacgccgccaccaccacggcggcgccggggacggacgacaaggacgcctccaccaaggccgacgaccccaagaaggacgccaaggagaaggagaagaagccggcggcgcttcccgtggtcaccgccgtgctcaatgtcgacatgcactgcgacggctgcgccaaacgcatccgcgcctccatccgccactacccaggtgagctctccctccatccatcatcctctgcttcgactccatctcttctaatcctcctctgctccatctccgtcgatcgaacaggtgtggagggcgtggcgatgaaggtggacaagggcaccatgacggtggtcggccgcttcgacgccaagaagctccgcgatcgcgtcgccaacaagaccaagaagaaggtcgacctcctccccaacaacaaaaaggctggagacgacaacgacaacaagaacaacaaggccaacgaatgcgacggcaagccggcggacaagaagcagcagcagcaggaggacgacggcgacgaggcggggaaggaagacaagaagaagaagaaggagaaggaggagcaagacgatcagaagaagaagaaggccaaggacaacaagaaacccgtcgtggtgcgtatgatactaataaccttcccttccgttcatgttcatcgtctaaattcgattctattcgatttgactgaattgttccccgttgttcgcgtgaatttcgttggagtttgtttcgatctgttccagcgaattttctgtgccacctatagtcctactagtaccatattctgccttgcttgcagaattccattgtgtcgtgttgctggttcatgtgttgctgcattctgatatgattctccacaaaaagctagcgtgagatgcagcggggagagagagagagagcgtccgtgtgttgcatgagcctttgctctcctttttcctccctgaaaagaaagaaagaaagctgtagtacgcagcagcagcagcagaatggttgcctgccttgtttgagcttttgccaccatgcaaaggaacagtaaaccacaccctctctacatgccaatgccatgcatgcatctgcatgtctcttccacactacagtacagtacaacccctgcaccatttttctttgtcttcttccttcttcttctctgctgctaccttcctttttcatctcaaagaaaaaaaacacacacagatacagtagatacattgtgtttggatgtttgactgcatctgcattgatctgcaacatgaatttgcacgtaccgtacgccaatgcagccggtgcctgggacggtggtgctcaagatcggcgccgtcggcctccactgcgacggctgcatgaaccgcatccgcaccaagctcttccacatccaaggtaaacaacctctcaattacttgtccatgatttcattattcagtttcagctaattaaactccagtgtgatctctgtgtggttttgcaggagtggagcaggtggccatggagatggccaagaaccaggtgacggtgaccgggaccatggacatcaaggccctgccggagaagctccgcaagaagctgcgccgccccgtcgacgtcgtgccgccgggcaagcagaaggacaaggacggcggcaaggacaaggacaaggagaagcaggacggtggcaaggacggcggcggcggcggcaaggacgcggcggcgaaggcgctgacggcggagaaggaggcgtggaaggcggcgttctacgaccagcaggcgctgctcgccaccgagttcatgctcagcgacgagaaccccaatgcctgctccatcgcctgatctcttttgctggtgattaacaaggcaaagcagtgcgagaaatctaatcagtgttctggtgatctgttggttggtagtgtttttttggtggcaagattaagatcatctttgacatgtgaaagactatttagattagcatctagggaactgaaagagagactgaaagataggaaggagtactagatatgatatgaaaagagaggaattgaatagggagggatgatagacagaaaagagagattcagaaaggaatctgtaactgcagttggccaagctgcttttttcttgggagctaatcgttgaggcattagcaatgctgatgctaagtactctttttttgttactgccacttgttaggagtaccaatgattaacacaaacacactagtgctactagtgtattatctgtttgtcatgtgttatctatgcagtgctgctgattctgcttgtgtgattgtgtgtcactgtggtgttgtgtgtgggctgtgacaaatggaacaagagaaggctgcaacacaacacaactatacacaagagaaagcagcagcgttttctttggctgtctgcactgcacttcactgcagtggagtagaagtaggagtatgtgcaaatttcatatactagagcagtgttggtagtggtccacggaaagcagctgccaccgcttgttttggccttcaccggagaggaaacccaaaacaaaacaaaaccagaaagcgagacctccgacctgctttcttcctgcacaaagtgcagatatgcagcagcagcagcagcctctgctgctctgtggctcagagcaggaggcactcaggcacaggaagctggttgccaatgcctttttccgtttggccctcctcttctcgtctgcatctcggaaaacatgcagagaagggaagtgagaggaaatcatcaggacagggcacgacgttcagggcaattaaactgggagatttcttttttcttcttactagtagatgaaattgtttgatctagacaagtgctcatactccagcacgaaaatccttcaatttgaagttgaaagttttgttagagctagcagtccacttcaaattcaaggtggtagtggtactcctcctagtatcactccctccgtatttcaatgtatgacgctgttgactttttgacaaatgtttgacctttcgtcttattcaaaaaatttatgtaattataattaattttattgtgacttgatttatcatcaaatgttctttaagcatgacataagtatttttatatttgcataaaatttttgaataagacgagttgtcaaacgttggttaaaaagtcaatagcgtcatacattaaaatatggagggagtactttttttacaagaacctaaaaccagacagggaagaaataggaaacacagatcatctgaaagaaaaaaatagagggtacgtggaaacagatttatggtccatgagctgctcgtgtcctctgtgtggttgttgggcttatgttgtgggcctagtgggctgggttagccatatctttttgggccccttatgtatgctcacttctgatccaatcacattccagagtttaacttcccagtatttttattttttcgcttccagcgatggagcaggaagaaatcaactactgtatcaattgaaggagttgtggtatcttcccctctctaataaataaataaataatgtatgtatgtatcttagagtattctttatagtgagatactgtacagtagtagtgtgcgtgtgtgaagaaggtaagtactacatacgtatatataaaaacgtgcgtgtgcgtttatgtatggaaattttttttcgccatctatctatgtaaaaggggttgaagtttaatatattccctcagtcttaaaatataataattttataacgagattagatatagggtatatctatattcgtagtaacgagtctaattatgttactaaattttgggactgaggtaatagtttatttagctccatttgagttttttttcttggatccgctcgtgcgcccatagtgtaatggtttcatttagaagtaattgattgtgagattgtggatgaatggatgggatcgcgaagaagcagcagcgagcagggtttcccaaaccgccggggccggggttaccgcgctctggcggtaagcatggttaccacgcggcaaccgtgaaaaatcgtacgaaaccgtgcaaaatttatcaaaaatctaattttttaaaaaattatttaaatttaaggaggttaccacagtatttctattaccgtaccctcatggtaaagacggtaaccgtgataaccaagcggttaccgacggtaatgtaaaccttggcagctagaggcctgcaagagggagggagaggaggcaggcaaacgagcggcggggggccacgggccatttgcactgcgccatcacatgcgcttgcagcagccactacttgcttaattgcactctcttactggggtcgatccatctgctcattaattactcatcacgctagctagcttctttcattttctgcctagctatatattggatcggagtaaattaaatattttcacgtacgcacggtacggccggcaagccggtaaaccgtttggacctggtcgatcgatctttggagcactgcatttgcatttgcatttgattttgcatgcggcgtagagatgacgaacgagatcgatcgatcagatcagagtgggtgccgtacctacatgcacgcgcgcgaccaattggacagaggcattaattaattattttttattatttatttgtctctttgtggatgcatggcgataccgaatactccctcgttccaatatgtagcaatctaatcctattctatgttcagattcgtagtttgttacatattggaacggaggaagtatataattaaggaagctagctagggagtgcgcggttgatcccaaaaccgatattcatctgcatttaattacatgtgtgtgtgtatagttaggttatgttgtaagtgtgttaattaacagacgatcaatctagattgggattttttttacggagggagtacgctctaatataagatgacatgggtgagctagcgagtggtggatctatgcagtttctaaagacacacaacatacaagtggagggaggggtgcatgagagagatcaagacaaacgaggatccggcctcccttgatatatatgttcatttaaaaaaaatcaagactacaaattataggtaggagaacggcattgtagcacgttggtagaggagctatatggtgttcttagtggtcaaagtttgagtttcctcaactttgattttctcaccattattttcttctctcttaataatctatgctaagtatcctacttttctctttttcaaaaacaaattatgaccatcaacttcttttctcttaataattgatgctaagtttcctacttttctcttttcaaaaacaaattatgggtaacctatatttaggacgaatcataggtaattaatgcatgtcaattagagttgagttgtgttgattgtataggttttctcgccatttcttctctcttaataattgataataattgatgctaagttcctatggatccacgaggatcctatcggtgaatcattggtaatgcatgtaggttagcactatcagagttgagttgtgtcttaataattgctataattaatgcttagttcctatggatccatgcatgaggatcctattgatcaatttctacaatgaaattcttggtcgccgtgtgatagcaagctgctaacttcgaaatccccagcgtttgtgatgatcctgcttgtctaggtaaacatatcttatgaccaagacctccggtcgtcagtagaaataggctaagggtggattttacaatgatttttttgggtgaattcgtcatatatcaatgccggattcattaagaatttaaagtctagatctgttgtagtac

SEQ ID NO: 12040 - DNA, 1180 bp, Oryza sativa
ttgcttaatgtactataccgatcttttgattgatagccagatattatccagctttttaggtgttttgtcgcttaatgatccggttatcgactcgaacagaggtttaccacatacttcctaatgaatcatgtgattcagtatttccgactatatgtttgctcatagaaagcttatactccgtgaggcagacgatggttatatctagatttctcagtggttcagtacaactgaaccataccgactatatttgctgattgaaagctgctattttgtgaggcgatttgttgatagaaagatcaaagatagactttcaagctgctactaggaaacttttgaccgctatagtttatggtgaattgatcatacctgatacaatcacatttaatgtatctcaatatctggcggtctgggtacaccagcctgatattgcaagttttttctcatctcaaaaaagggagagagagagaagtcttcaattttttccccaggtttcttgctgggtcctgttgatagaaatatgccaatatctttaggttgtgttccattcaggattttgtgttagtatgaattaagaggaatctttgatcatagatgttaaggctgtattctttttcctcatggcatcttgccattatattccatgagaaacaatagttctcacaaatcaataacatttgagcaaaatgtggcagcagttgacattcattttttttatgaattccaatatttgttgtgagcaaaccttaagcagctttaataacacgtcatcaaatttattaatcttgcataatttcttctgatcaggtgatgttcatggacagtattctgatctcctgaggctgtttgattatggtgggtatccacctcagtccaactatctcttcttgggcgattatgtggaccggggaaagcaaagccttgagacgatatgccttcttttggcttataagatcaagtaccctgaaaacttcttcctactcagaggcaaccatgaatgtgcatcggtcaaccgcatctatggattttatgacgagtgcaagcgcagattcagtgtaaaactctggaagacttttactgactgttttaactgcttaccagtggcagcattgatagatgaaaagattctttgtatgcacggaggtctttctccagagttgaataagctggatcaaatactcaa

SEQ ID NO: 12041 - DNA, 3740 bp, Oryza sativa
gcccccgacgccgaggacccgcagcggcaggtctgagatgagatctatcttcttttaccgcttccttggattttaggattcttgtgttagactgtagcggcattcccaaccataagctaagctaacgtagattttttttccactccaaattatccaatcttatttggaatccatctaaccgtttagtttcttgattccatcatcacacaatgcttagttaggacttcgatgcatcggttggtagtttggagcattccaaaattttagttaccaaagcagttgatttgcaaccactgggatgctgcgagaatacccttcatggtagccttttttttttcttttgtttctgcagggattaaaatcgaggtattgcgataaatgctgcatgtacaaaccttctcgaactcaccattgcaaggtgtgcaaaaggtgtgttcttaaaatggtaagtgtggctaatgtttgtcggtataggttctgttggttgcaaaatgaagcttttgttagaaatacttggtaacaagttttaattataattgcaggaccatcactgtgtctggattaacaactgcgtgggctatgcaaactacaaatcatttatcatctgtgttctaaatgcaaccatcgggtctctttactcatttgtaagtgatatcagttggaataaaatttgggaaattcttcgccaagcatcattcacggtcattccatttttctccaggtggtatttctatttgatctcttccagacagaacatgaatacgatgttccttatgtgaaggtcatacatgtaagtgcactggcctttcttctgaattaatatttcactatacagtcaggaattctccaccctgctactgcgctgcataaataatgagtatatgtttactcttatttttagttatcaaccattactaacctttggcacacagcacactacattgtttttcccactgtgttgtcttaagagtcaataagaaattttttgaggaatccctgtttgttgtatcatgccagaagtagatagtttgttttagatctcttatgagttttgagtttggatttcaactcaattgaaagtgcttattatgtatttactgcagaaacatcaaagacatgatagatgggaataatccaaaattgcagataaaactcatggaataataatgaaaactgtgggttttcctttctgctggtctaacaagggagtttatagttaaaataatgattttgaattttaaaagatggaattcttggagaccttgcaataacgtggtggaatatttggctagaacgaaacagaaggattttctgtcactcttcacaaaacgagaaccaggtggcctccttaatcaaggaaaatataagccaaattaatttgtccagatgttaaatgttgttgttctttaagttgcttgtatcctgaggtttttgcctagttgacaagcctctccgttcgaccgctagacggtctctgcgtttctgtttatgtattctgaccttttattccctctaatatattcggcaagtcttttgccgcttttcgtttcaattttttttttttaaaaaagatggagtttcatgtatcgagtggtgtcactgagatattgtggataaacatgtcacgcagatatgcatttgctctcggttttagttttgtggtacttttccccccccaattttcctttgttccttcctataagaatcatgattctctcatcaaaatcctgtcatgcacttactcggtaatgtatttttttttgggtatagttcccccttttttctggtctaactactaacaaatgactaacgaatgaagaaatgcaggtcttggtcggtgttcttttgttcttcttaagcttgacaataggttctctgttatgctggcacatatatctcttatgtcataacatgacaacaatagaggtaaattactctttggacaaacacatttttttcttggtgggtttatgccatgtttgatttttactgtcacctttacttcagtaccgagaggcaactagagcgaaatggcttgcacagaagagtggacagaagtatcggcaccgctttgatcttggcacacgaaagaatattcaaatggtacgaaatcacgaatagtgcataagatcagatcttccttctccatcatcattcatgataactgctacactttcaagaacttcaacactgaagattctttatgttcaattttattccgttgtcactccatttagctgatacttttgggtccttttgtaacagatcatgggcccaaacatcctgtgctggctttgccctactgcaacggggcatctcaaggatggcactgagttccagatcacaaacaactgatcggatcaacaaggaagcaattgctgcacacgtacatacttcatacatacattgtagatttgcgagtttatttggcgaccaaagttcttggccgttccatttgcttgttgcagtagagagctccacatttgtcaccagaatctttgtatgacagcatgtgaaatgttccatttccctcctaatctccatgtattctcttgcttcaatttatttgtgtgcagagctgtagatagatcaagtgatttgagttttgagcattgtgtactgacatattgaacggcaaaactatcaatttgaccagaattttcatgtcaatttcgcttattcggggaataaacgaaacgacatatttgcaaacgaaatacaatttgtgaataaaatttttatatatgtgttcttagcgatttaaaagtaaatgctgaaaaataaacttcgatgaaaaaactctaaaaacaactttaaatttaaagttgaaaatttaaattttggctgataatcataagccgaaagaggaggccgttgatttggaaatggttcagtacactctctcggttttgcgtctctctggtggttgggccccacctgcagtgtcacgtgtccgccacaaagaacacaaacctgacgacttggtgtcagctagtattgcagacggcttccttcttcggttcttcctgccgccgccgccgcctctcgccgtcgccggcggcttctacctctcgtttgcccttctggtgcgcccgatctcttgcatagcctacgacaatggccacctccgcctacgcagccaccgtcgccggggaagcagcggcggcggcggcgtcgccgtcccgtcgtgtccttgccggtggccgacctcctccgccctgcatctccttcctctccaaatcgccgtcctggtgcgcctcgatctctctccctccagggccccgccgcgccgccgccgcggccgaggagagggtggaggaggaggagccgacctgggtggagctggagccgatcggcagcgagcagcagctggagcgtgccctcgcggaggcgcagcagctcggcctccccatcgtccttctctggtaatactaataccctcctctctttgattgtgatgagcagtaaattttgtttcatttgataaatgcatcgttgtagcaacaccaatcctggatcttggatgacatggttactgggtagtagtactactagtactatcctgcaagttcagtttgtttttttggatggaaattggtcagtttagagttgaatttggtagtgttctgaatgaaattcaggggctcgattaggtgattgttcattcggtgcatctgaccttattaggtgaagtgggctagatcatcatcttgcttgaaatgattgtttcgcctttcatt

SEQ ID NO: 12042 - DNA, 1196 bp, Oryza sativa
atcttcagacattatcttaataagatcaatcatcttcatcttcatttttccctcatccccatgctaacatgaaagttgattgcatgattgcaaacacacacactcattgcataataacataatcctatgttacctttcaagaaaaaggcaaaacatgagtagcaaagttaggacaccatcacacacgcaaccgacaaaaatgcatggttttagttagttgcaccaaaaagcaaggattgattactaaattaattggccattgttgcgagtagaaaggttgaaaagaaaaaactacaattaaagaaaactaccttaaaagttgcaaagtttaagcccctggattctgtggagttgtgtgatgagtccaaaagaattgtgatcctcgattccaacgcccacgggaatcaccatacatacagctcgatcgatcgatctccatccatagtgatttgatttaagtatactatatgattgtttgtttatttcaaggcaaaaagaaaggacagctagcctacctagtacgaggaggaagaaggaaacctcccaagagagcttaacctatcatgtggctggcttctgccctactactgtactacgttgtacgagtaatacattagcatgatcactttgcatctctatttgtgagctagctacaatacccacaaatggtaaaacctaggagaacatcttagcatcggactaaccatttctaggatgagtattctctccaatcagaacgtgtcttggtgattagtttctacgaatggttttacgggcttttaaattaaagttttcttagccaagttgaaaaggctataagaaggcaacaataacatgtgagacggtgtaccgccaaaaggagtgacgtggatcagtaatagtgcttgacataaattgtttgaaaattacagatctaatcgtacaagatattatagatgacaataacacgtgaccagtgtgatggcactactacagagatatcaatgctttgtaacagaaatatgtacgaacggcgaatatttggtgagatacctgctagttggatctaggtgtgtagttaacacttaataggtacactaacacttttcttaggagccactttagctcttgctcaaagagatattaaaagaagcttagcctattctacaatgtctcaattacaagttgcgtgacctttccggtcaatatccacagct

SEQ ID NO: 12043 - DNA, 614 bp, Oryza sativa
atgtctaatgtagataatgatataaagacaatcggctgatgataatataatataatataataacaatataaatccaatagaaaccaattggctaacaatgagatggtaaaacaagcactgatccgatggttaaagtatacatcagctggaggtccgatgtcataagatcaaatcgatttagataaacagtgaaacatttgttatcatcggctgaatccaacttatatgtgcaatccttataagccgatgtaacgtccagatacctcatcggctgaaaccccgatgaaacccttattataaccaaagacatgctagactttatgattctaagcacgacttaatagatcaaactcaactgatatagcactaagtatgcaaagaagcataaagtctaaacaatcaagcctttgactaattttcatggtggtggataccttagctaatctaatctagcaagataatttagccgacaccagcataaaccctaaaacaaatctcagctgatacaagtaaattaagattctaaactagattaactaagatatatgataaataggtaggtaaatatatcaaccaaaccagagaaatccaagaggtcgaatgtactgatgcag

SEQ ID NO: 12044 - DNA, 624 bp, Oryza sativa
gaaaccatactttttacaggatttttgcatggcacaatagcggtagcgtcgatgaggcgacggtgtggtcgacctcatgcgcgacactagaacactgtcacaccctgaagttctctccccaagcctaaattgaatttataaatcaccttgagaaaatatcggtgtcaaagcaagagaaaccctaataaattaatgcaaataataatcggaattggtgtgtgggatttttcttgagttctacatgtcgaaatatgctaacaagatttttagtggaattttcagagctctagaaataattttaaccaattaaaattgagcacaagcaatatttaattccctggaaattcttttcctcctttttctttctttttccctcctttttcttttcaggatgggccgccggcccattctctcttcccccccattccatccgctgggccggccgacaggtcgcagcccagctgagccggcacccctcctctcactcccggggtcgccgacaggtggggcccacctgtcgggtccgtccccaacctccagtcacccgcaccgcgcccgcaaccggcaccgtgtccacaccccgactccaccgggccacgttggccacgcctgcgcatgcgcccg

SEQ ID NO: 12045 - DNA, 550 bp, Oryza sativa
actcttgccaggatgttcaattgaggggaatttcttcacttcgtaagagctcccagggtttctttcctcgataacaccaagcaggcgtggcaaattgtcatacgaggcttcgtaagttccaaatctcatctctattattttctgtttggccctccaggccttggcatagctaatagtatacttgtatgtctcttcaatgtgtcagattattgaccttggttcatatgtgagattatcgatgacatgcacatacatctcagatgcaacaaatgcacatgtaatgttcctgtggtatttctgaacaccaggtagaaaacatgtatgcttggtaacaactgacactgtccaataatccttccatttccccttatacgcgtgcactctccagggacaaccatctttttccttaacacaccgaacttcatattgcggccggttcgacttggcaacccaaaactctctatgaagtgacactgcaaaatgttttaccgcctccttcatatcttctgctctactataaatcgctccctgaataacctcattttctttg

SEQ ID NO: 12046 - DNA, 689 bp, Oryza sativa
ctgcagccccagtgatccaggcgaagccgacagcaaggtctaaataactactggatgtttctacagctgggagtcgtagcgctgctgatgtcaagaagcattagctgagaatagaagcatacaatggtgactatttacttccatttttttttacatatgcacgcagtaaaaccaggacggaagtaattatcacaggcagatgccttgatggttaacttaatcacaaccaacatgatataatacaatgaataactgtcagatgttgaaatttgtttacatgtaatttaacctcacattcttgattcttccattagataaattctaggattcaaaaatgccgcaaaaaaatcaaaaaggcgatgggtaatagttgccaatatagccagtaatgtttaccaggaaattgaacagtcaaaatacttagaacatcaaagaaaactaaatatcaggcaaaacggatggtcctgctgccaaatgcagatcagagggatttttttttgcaagaaagaaaacaaattcataaaattaaagtatatagcaaaagaagcatctagtttattgttaccttctgcttgattctctgaccagcagcaggatcctttttatgaataatctcataagaaaccagaataacatctttcaaaggcctaggcgtctcttcaacttttccagccaagaacatgcaaact

SEQ ID NO: 12047 - DNA, 719 bp, Oryza sativa
cttgtacttccttgcattaattatgcatctccggtgtggcttgctgagtactgtggttgtactcattcttgctcaatcttttcccccttcagtaagagaagctttggagaagaagtcttacgtggagtcttggcttataccccagttgagcgcctgtgaagatggagccgtaggcccgctagtccgctgctgtttatttttgattgtcaggcctgaagcgcctttgtaataatgtaaatattatcggtataataaagatgtgtcttttatatcatgtttgtgtggtgtaccccggcttttcctgggacggggattaatacactagcgttcgggaaaaggcaattttcccggtcgcgacacgacccaatcccgcctacggccggaacctccgggacaggcaggcaggactgagccccaagcagcagggcaccaaccctctgccacgacatctcgactaccgggccgcagctcgtgtagccttcatttgccctggagaatgttcatcgacccccgacttcatccatccccaatccgtgtacttttgtttataaccagactgagccacaaactaagccttacccactagacatgtggaagtacggtagtgctttgcaacagaggccctaagaccggtccttatatggccgaggtgctactatcaaaaccatgcaccccgagcccagcctgaaaccattttggggattttgaatagaaggagc

SEQ ID NO: 12048 - DNA, 711 bp, Oryza sativa
ttttgaaattctttttaaacccggttagggttaagaaccgggactaaagattatagcactgcatatgattttcgcttacatatgtgtttataaaatagaagttaatgcattaacattatttaaagtacaaagattaatgacaattacttcgaaaaattatttttgtctgtaataaattaagtggataaatcgtaataagcaaatatatgacttataattaataaaaattccaatatatatatatacttagcatatatatgaatgatattattatattggtaaaaactctaattaagatatgtatgtacatactgcatgatttaaaattaataaaaattgtaatcatcatatatacttagcgtaggaattatattaaattaaatgctaaaaactctaattaacatatgtaaatgccacatgcatgatttaaaccttttaaaaattcgaatagtcatatataagtagcatatgaaagatagtaaattaaattgtgaaaaactctaatatatgaatgatagttttaaaaatatattaaatttaatacttttaaaaattctccagtcaattataattagcatatgaatgatagtaaattaaatgttaaaaactctaattaacatatgaaattgccacttgcgtgatttaaaacttttaaaaatcctctagtcaattataattagcatatgaatgctagtaaattaaatggttaaa

SEQ ID NO: 12049 - DNA, 666 bp, Oryza sativa
ggggagagaaagaagaccacaaccgttgcacaggctgccgaaattggaagataaagaagagacccttaaacagttacaatccaatccgactataagctgctacagcagatacatccagggcagctgctattttatcctatatgttatgagatcaattcgtgaacgagcccggcctctttcatctgcacatttcatcctggattaaactgaacaactgccaccatcattttcgctccactctaaagatgcgtgtttgtttattcctgactaaccatcacatcatcgaaagaaggcttcaatgatggggctttcttctgtcattgagccggactgcctgaggcttgcgtggcctattaccggtccttgaatttctgaatgtcattactgtgagctagtgaaagtaaaattgtgtgtgaagctgaatatccttttggtgttcaggcataagcttcgggggccaaatcacctgtagtgtctgcagatcaaggtttttgcttgtgattgtacatgtgtgctccctggaaattttatcgtactagatgcatatgctagtttgtccaccattttcctgatgcttcttattcataccactcttggatacacagtggaactcaatctattgttcacgccttctgtaatcgtattcagctccatcctttttctgtt

SEQ ID NO: 12050 - DNA, 1644 bp, Oryza sativa
tcaaacatttttaaaaaagtcaacggcgtcaaacattttgggatagagggagtatattgcaagaatgctttcaaaataagtttgcatggattttgcaggggagccaaatgtgcatcccgttaaatcaagggcagaatcgaaaggtatccatcccaaaggttcagcagcaggtgttctatttcacatcctactcagtaaattagtggtcacttctttcctgatgcctcatactcccacacatcctactctgatgcaacatatacagcttcaatctctatttgcttttccattatcatgttagttttatttcgcttgctagtcgctacaaaatgcgctatatatatatgcaccagaaactgcaatgtctctgacggctaaaaactgtcaggaaaaagcaaaataccgtcaggaaaataggtccttacgtgtcatcgtcaggaaaataccgtcacaactagcttgtcggggaaaaattaatttgcctgacgtgtgtccgtcaaggaaattattcctgacgtgaatgcacgtcagggttaattttcctgatgtgaatttcacagtcagtgatatttcccatatcactgataggtttgaccgtcaaagatatttttctaatttttctgacaggtacaaccgtcaggaaaattggtcatccgctattgtgataatttaccatatacagggatgatccatatatatacattatctaatagcaaaaatggtcattatgatattcatcacagataacatataaacagctcaaattccatatttcattcagaaaatagaaagatcaagtccatcatagaatagttctagttcactatttcaacataacacacaagttgaacaactagagtttgcatggcctaagacacctaatagcacgtactttcaaagtctcacactccatctatatggttagaaccatatagacaaaatatccaaaagcattagtatgccgcaactccacattggtatatcaaaaaccttagcccatcttgcatgacatgtgctgtagcagcatcaaggagaagcattcaaacaaccgatacaattgttggtcgatgttgttactgccaccattgcttgaagcaatatcacatccatcattgttgtggtagccattgcagtcaacttgctgtgagcctaaatgggaggaatcagttccctgtagcagtttgaaaagtttatgattaattattccaattctaactagtaataaaaatgcatgcccatgcagcaactaaaatagcaataatggtcatccaacccctgcagcaagttggactaattgtaactatctaaactatttccattttaagcaagattcatatcatgacaaaaagttctattttctactactgactctaagattacacataacagaaaaatacagctaatataaatcaatcactaattcacaatgattattacatgatgtcaacaaattattcattgcaatcacaaatttgcacgcatgattaatgtagcgcccattctgtcgtggcgcctagcgggaaaactatctcttaaaaactctatttgcgaaatccgtttctttgcttgttgtctagtgtccgtgccatctcagatctcaaatccccgatctatcgtcaagttccctccccaatccaaatcctt

SEQ ID NO: 12051 - DNA, 2584 bp, Oryza sativa
cttgcatgcagtacagcgaggcgatgatgagtcgcttcgctcgtacattcagcggttttgccaagtccgcaatactataccatgcatccctgcacacgcggtgatctacgcgttcagggggggtgtgcggcacaaccgcatgctcgaaaagattgcctccaaagagccccagactaccgcagagctttttcagctcgcggaccgagtggctcgtaaggaggaggcctggacctggaactcctccggttccggagtggcagcttcggccgcccccggatccgccgctcagacagggcggcgtgacaggaggaggaagaagaggccggaccgttccggcgacgagggtcatgtcctcgccgtcgagggcgctccgcgggccactcgaaaggggaggcctgcgagcgacaaaaagaacgaggctggtacacccagcagggagcgcctcgccggtaggtggtgctctgtccacaacacctccctccacgatctcgcggactgtcgtgcggtcaaaaacctggccgagcgaacgaggaaatgggaggaggacaggaggcaggaacgccgtgagggcaagtccccggcggttccttccggcaaacggcgaagtgaggccaagcagaaggcccccgctgttgacgtcgatgatggtgatgatgacctaggtttccaagaacctggggccaccattgccaccgtcgatggaggagcgtgtgctcacgtctctcgccggagcttcaaggctatgaagcgagagcttctggccatggcccctactcatgaggcgatgcgtcgggcgcggtggtcggaggttgctctcactttcgaccagaccgaccacccaccgtgcattgcccggggagggcaggttgcgatggtggtttcccccaccatctgcaacgtgaagttggggcgtgtcctcgtagatggaggagcggccctcaacatcctttcccccgcggcttttgatgccatcaaggccccggggatggtgctccgaccgtcccagccgattatcggtgtgacgccggggcacacgtggccattaggtcacatcgacctaccggtcaccttcggtggacccgccaacttccgcacggagcgggtgaacttcgatgtggcggacctcagtctgccctacaacgcggtcctggggaggcccgcgttggtgaagtttatggcggcggtccactacgcctacctccagatgaagataccgggccctggtggccccatctctgtccgtggcgaccttaaagtcgcgctcgcttgcatggagcagcgcgcggaccacctcgctgctgcgtccaagcccgagggtggtgatgagaggcttggcccctctgcccccaccgccccgaggcagcggattgccacatgcgacgaggtcccggtcaaggaggttgccttgggcgacggcccatccaagaccacacggatcggtggtcttctggatggcaaataggaagacgcgctcgtctccttcctgcgggcaaacgctgacgtcttcgcatggaaaccagcggacatgcccggggtccccagggaggtgattgagcaccgtctcgccgtgcggccgggcgcaaggccggtccggcagaaagtgcggcggcaggccccggaacgtcaagccttcatccgcgaggaggtggcaagacttctggaggccggattcatccgtgaagtcatccatccggagtggctggcaaacccggtggtcgttcccaaggcgaacggcaagcttcggatgtgcatcgactacaccgaccttaacaaggcatgtcctaaggatccttaccccctgcctcgcatagatcagatagtcgactccactgcggggtgcgaccttttgtgttttctagatgcatactctggttaccatcagattcgcatggctagggaggatgaggagaaaactgcgttcattacccccgtaggaacttattgttatacgtcaatgcccttcgggttaaagaatgcaggtcctacttttcagcgtactactcgaatttctttgggtagccaaataggacgtaatgttgaggcttatgtcgatgacttggttgtaaaaacgcgcgaccaagaaactttactttcagatttagcggaaacttttgagaacctccgctccgcccgcataaagctgaaccccgataagtgtgtgtttggtgtgcctgcgggcaagcttctcgggttcttggtctcagcccgaggcattgaggccaaccccgagaagattcgagctatcgagcggatgcgcccccccagcaaacttagggatgtgcaatgcgtcactggttgcatggccgccctaagtcgttttatatcaaggctgggagagaaggcgctacccttgtttaagctcctcaagcgctcggggccgttcacttggacggaggaagctgaacatgcccttactcagttaaaggcgtatcttagctctcccccggttctagtcgccccggagccaaatgagtccctgttactttacttagcagcgaccccccaagtagttagtgcagcgttggttgtggagcgcgatgaggacaatccccattctgcgcacccccactctatggggattggg

SEQ ID NO: 12052 - DNA, 1401 bp, Oryza sativa
ttgcgcctgtctccgccgggagtggaggtaggtgtgggctgtcccatcagaagggttcccggatggaaaccgtaccgatctccgcccattaaagagaaaaagaacagtccagtttggaaagagagagggcatgtggtatccccttgagatataaaaggaggaccttgcccatttagaagggggctctttttttgacttcttcccttttggaaggctgaggggaaagggagttaatcctttgtaactcgtccatacacaaatccacaaaaacacaggagtagggtattacgcttggcagcggcccgaacctgtatacatcgccggtgtctcacgtttcttgcgaggcgggtgatctttccacatacagagggagagcgagagcttgagatttcaccctaagcccccggccggactggcaaaggggggcctgcgcggtctcccggtgaggagccacgagctccgtcatctggcgcgccaggtagggggctcagcgtgtgttttctgagctctcgtactcttccgtgtgcgccaagtttcccttgttcagcctaatggccgagcaagcaaaggcgcacgacctctctccgagtgtgagcggcgacgatggggagccgaatccacgccgacgagctcgtactcccccacctcctccgcgccaaagccctaagcagggggaggcgcttgagagggtcgacaaatccgtggcatcaccagtcgcaggtgatgcaggagaacggcgagatggggagcgtcgcctcctcgtctacggcgacggcagcacgcctcagggtgcgcttcaggctgctggcgcgctcctacgacacccgcctgtcgtccatgacccggagtctccagcccaacgatggctggaagacgtggccaacttggtcatgacggcacagcagcgcctgggtgctggtggacggtccgccaccaccaagacctccggcgccgctaccaccggctccgtgtcatcaaggcggagggcgcggcgagcggcggcggctgcacgtcattcggctgccactccctcgtcgacaccgtcgactcgggaggatcagcatggggagccggatgcccgcctcaacatcgagcgccggcgtaatagccggcgtactccccgtgcaacggagggcgcctcctcgtccagagtgtcacctcgacacggacgtgaagatcagccctccgtgcccccggccggtggtgttggctgtagagcctttgtggcgagccttcggaatgtccgttggcccccaaggttccggcccaccatcaccgagaagtacgatgggagcgtcaaccccaccgagtttctccaggtctatacgaccgggatcgaggccgctgggggtgacgacagggtcatggcgaacttctttcccatggccctaaaaggacagg

SEQ ID NO: 12053 - DNA, 1100 bp, Oryza sativa
gggaggccgagcgcgggcgacgggtggactgggccgacggcccaagaagaggaaaaaaaggaggaaaaaggaaaaagaaaaagaagaaaggatttttcctgggatgaaaattgcactttggtgatttttaattggttaaaattatttccaaggctctgaaacttccattaaaaatcttgttaatgcattggagcatggggaactcgagaaaaattccaccacgccgaattcaattattaattgcatttattaattaaggaattagctctaggttaattaagataatttcttcggacaatttatttaaccaatttttttaaagcaagcaaaaggggaaacttccgggcgtgacaaacctaccccccttaaacggaatctcgaccccgagattcggaagagctggcgaagaggtgcgggtgagtggccttcaactcatcttctctttcccaagtggcctcttcctctgagtagtggctccactgaaccttgcagaatcttattactttgtttctggtccttctctcgctggtttcgaggatacgagtcggcttctccacatacgtcagatcttcctgaatttcgatgtgatccggacttgcctgttcctcaggaactcttaaacatttcttcaactgagagacgtggaacacgttgtggatgccaagcatgttggagggaaactcgagctggtaagcaacttcacctctacgttccaagatcctgtatggtcccacaaagcgtggtgccaactttcctttggtttggaagcgatgtactcccctaagcggagtgacacggagatacacataatcccctgtttcgaaagcgagctcccttcggcggttgtctacatagcttttctgccgagactgcgcgattctcaatctttccctaacagctctgactttctcttctgcctcatttaaaacttctgtaccaaacaattggcgttcccctgtgtcggtgatatgggaccgggagtatcgtgaccagaggcttgaggcagacgcaatcgcccacgtggcctggcaccttcggggacgtcgggcccgagggtgaggtgtccgccctcctcctgatttcccccgaggggggggggg

SEQ ID NO: 12054 - DNA, 1857 bp, Oryza sativa
catctccccctccctccccggctccctctctctctctctctctctccccgctctgcccgtgagccgcgtcgagctctccttctccactctcgcggccgttcccgccgatgccgcccaaatcgccgcgccgcccgcgcgcgcgcgcgccgtggtggccgaccggccagtcgccgccgccgtcagcgcctgccgcgccttgccccgcgtctgccgcccgtgtcgccgctccactccaaaccgccccgccgtcatcgccgtcgtcatcgactcggccccgcctctccccgcgcatgcctccaagggacggaggcagagctccccccctcttccgcgtcgccctctctccctcctccttttccccaaagcggcaaggaggcaagccctctttctctccccctttttcccttttcccttccgccggcgtcatcctccccccctcctgtcgccgttttggccgcgagcgccgagcgccagctcgctcccttgacgcccaaggtcggtttccaaaccgacatcgccgccctataaacccaagcgcctcccttcctctttcccctcccaatcttccccgtttcttgctcgcgccattgctgtctctcccgccggccaccgctgtcgcgtgtgccggaggagccgtgcgcgttaggacgcggaaggggactccgggcgcttgccttcttcctcttccccggcccgaggccggagagatcactcccgtgccgtcggcctcttgtcacagcgccccgcctcatctcggtagtgcttttccccgttctccctcctcgatccatctcctccccttagttttcagtagtagcatgtgtagccttcccgtagctagctggcgccgccccgaccgttgccgccgctcgctgtgtgctcgccgccgtcgccgcccgtgctccgtagcgcccgctcgtcgccggcctcgctcggcgtagctccgcccaatccgacgctagcaacggattcccgtagccgcgtagatgcactcaccgccgggaatcggcccctcgtgacctcatcgccgtttcccccttccctcgccgccggttgccgccgccgcaatccgccgccgtcgagctccctccggcgaatccgagccgttggctcgtctgccctcgtcctgtgcaacatcccggtgtgctcgccttcgcctgtatcgccatggatcgctccgccgctcgccgccgtcgtccgccgtccgttccggccggagtcgttgtctacctcccgccgggccgcgtggcagccacgtaggcgccacgtcggcgccacctcggccgcgactggattggctgacccggccagccgctccctccgttttccccctatgcgcatggtccgcggtgagccgtgaggctgcgcgtgggcccgccgcaccgcgtcctccgcgaaccgcgcgcatgcgccgcgcctccctccccaaaccctagcacgccccgcgtgcacctcgctcatggtgagccgagtcgccgacaagcgggtcccacccgggaccacgcgggatggacccggcccaccggctctctctcctccccgcccgcatgagcgccttgggccgccttcttgggccggccggcccattaagctcggccgagccgccccattctctcgggccgcgccctagccgcccgagggaagtctaatttccctccctccttcttttcttttcttttctttttcaaaaaggatttaaataaatccttttcctttagaccaaaaatccagtaatcttagaaattcaatatcttcccaaccgtaagtccgtttgactccgttcaacttccaaaattcctcaaatctcgagatctatctaatggcacgcttagaggtcaagggtaccgagctcgaatt

SEQ ID NO: 12055 - DNA, 722 bp, Oryza sativa
gaacccgcatcggtgtgttaagttcctctcttattaacccatgcatcccgacaaatttcttggagatgaaagaatgcgttgcaccagaatcacatagttctgttgcagggattgagttatcagcaatcgtatccagtaggtcctgtggtggtgcttgtgcctcttccccatatgagtggttgacgtcagcctgtataaaccttggtccggcacgcctatgtttcgggcatttgtcatcgaagtggccaagctcaccacagttgaagcaggactttggttttgctcccgtctccttattggcttgtgcggtctggcctgtctgtgccggtgccatcggtgagcgtggagctgtacagcggttcgtctgacttccatggtcattctagctgccactggagccatggtgcaagttggtgtggttgaatgtgcggtgttgaccaacactcatggtggtaggtccagccttctgacggtgagtcaagtctggcttatggttacctccttgatgggcagtaagttgcgcagcttgcctcttcgtagccgtcgtgttgcgttgatcctcgtggcggattgccgtgtcaaacagcctctcatagtcggtgtagtcttcacatatcagttgattggtgagctcgtcatcagaaaaagacatgaacgtttcttgtttatcggcgtcggtccggacatcctctggtgcattcgggggtaccgagctcgaattc

SEQ ID NO: 12056 - DNA, 635 bp, Oryza sativa
  unsure (1)..(635): unsure at all n locations
acgaccggaccggcgacggcgcaaggctgaacgaactgcgcaacggcggcgataggctacacggcgctagagctctaccggcggcgaaaaacgaaggcaagggtgncggcgggtaaaggagacaccgggggtccttttataggggctagggggccgcggcgaaggcccacggcggccggcggcggtgatggaaaggttagggttcggagagagagaggaatccgattcgagatcgaatccaccgatttccaaacgatttagccgacgattccaaaagtgaaaagatagaggagatctcggggatcatttcccctctattaatttcaccggaaaaggaaagggatgaacgaatttggaacgagacggcggcgcggctcggttagggttcgggcgtggcagctgcgcgaggaagacgaagactgacaggtgggccccacctgtcagcgagcggtacgcgcgcgcgcgggcggcgctcggctgcgggctgacctgggccggggaggagagagagaggtttgggccgactttcggcccaaagccaaaagagagatttttaaaactttttcatttaaattattcatgaagtgcaattccatttattaaaaatacttccttagctcaaataaatcccagaa

SEQ ID NO: 12057 - DNA, 603 bp, Oryza sativa
ccaactaaaacctgataatggtgggttgtgagcatatggttttgatggttgtgctcatgacaattaaggaccggttcacgattttcggttgtgaaacatttaccgtgccatccacaaaccagcgtgggcaacggctttactttctgtatagtatggttcatagtagagcaccagactgtgaagtggcggagataagcccaccggggtcgctggggagtccataccttgtttataagggggtgattatgatccgggaacggtgcactgctttgaattgcgttatgcaggacgtattgtcacaatctctattcgggtacttgttaagtatcgcgacgcatggatgacatgatgttgaggttgtgtcttgtgggtacagtggtacacctctggctagagtttaaactattcgaataggcgtacccgcggttatgggcgggtctaacaatgtctttcgtgattagtttcacacctctcaccgtaataaataatgttgtaattggtaataacttggttagctcctggctaggaatggtatattcctggtttggagatagaactgtgcagccgggattggttgttcagaacggtttagcctatgcaaca

SEQ ID NO: 12058 - DNA, 1104 bp, Oryza sativa
cgggggtcccttttataggggctaggggcccgcggcgaaggcccacgtcggccggcgccggtgatggaaaggttagggttcgaagagagagaggaatccgattcgagatcgaatccaccgatttccaaacgatttagccgacgattccaaaagtgaaaagatagaggagatctcggggatcatttcccctctattaatttcaccggaaaaggaaagggatgaacgaatttggaacgagacggcggcgcggctcggttagggttcgggcgtggcagctgcgcgaggaagacgaagactgacaggtgggccccacctgtcagcgagcgggacgcgcgcgcgcgggcggcgctcggctgcgggctgacctgggccggggaggagagagagaggtttgggccgactttcggcccaaagccaaaagagagatttttaaaactttttcatttaaattattcatgaagtgcaattccatttattaaaaatacttccttagctcaaataaatcccagaaaaatctaggaactatagaatcaagcaaagtatttaataaaattttatgaagcccaattttatattggaatttattatttaaaattagatcttctcttctaggcttttaaaattcatttctaataattctaattaaacaacaatttatatatttaagatttttatggtgcgacatgagtaaagtccagtgagaatattgtgttttcgctggcgggtggctcgtcgccagccaaaatcgagtttcgcaagtggatatgctaagacaaccgctagcaaaaataccatttttgcaagcggctagataaaatggacccgcagtgaaaacaattttgggtataaaaaaatttcaaaatcggtgccgccggccgccacagccggaagcaccgccggctgccgtcgcgacacctcaccatggccgccgcctaccgaagcccgcaccacggtattccaaaccgtagaagggagggggttggaatagccttgccatcgttatcgtggttgccgtcctcggcgcggtagacatcgatgtcattgggggaaggcgcgacggatccaccttcttcacgggtgtgaaggacagcccgagcaacgccg

SEQ ID NO: 12059 - DNA, 1099 bp, Oryza sativa
cattcatatattagagggtttcacaatttaatttactatctttcatatgctacttatatatgactattcgaatttttaaaaggtttaaatcatgcatgtggcatttacatatgttaattagagtttttagcatttaatttaatataattcctacgctaagtatatatgatgattacaatttttattaattttaaatcatgcagtatgtacatacatatcttaattagagtttttaccaatataataatatcattcatatatatgctaagtatatatatatattggaatttttattaattataagtcatatatttgcttattacgatttatccacttaatttattacagacaaaaataatttttcgaagtaattgtcattaatctttgtactttaaataatgttaatgcattaacttctattttataaacacatatgtaagcgaaaatcatatgcagtgctataatctttagtcccggttcttaaccctaaccgggtttaaaaagaatttcaaaatagcgggaaaagatatttactcccggttggtaataccaaccgggactaaagatcatctttagtcccggttgttctcaacaaccgggagtaaatatcttttctttactcccggttgttctcaacaaccgggactaaagatatctttagtcccggttgttctcaacaaccgggagtaaagatccgggggtatatatattcccggtgcgccctcgtcttcttcaccaacacttagacgttttcggccgatcgatctctctcggcctctctccttcgccgccactgcctagggcaaatccccgcgccgacgccgccgtatctcgccgtcgtctcgagctcgtcgtcctcgccgccgcctccgcctcctccgctgccgccgcatctctggggtgagagccgccgccgccagatctcccttcatctcgatctctccgatctcgatctctctccgtcgcgccgcccgccacgagacgccacgccacgacgacgacgcgccacgccgacgccgcgccaagccgccgccggcacgccacgccgccgtcttcgccgccgcgcgcgcaagggtaccgagctcgaattcgccctata

SEQ ID NO: 12060 - DNA, 698 bp, Oryza sativa
ctatagggcgaattcgagctcggtacccgttccggcgcgccgcaagcctaagcccgcggttaagccatccgatatcccgaccctgaaagactacaccgcccgcctggtggatcagaaatggctgcgactcgcggcgaggagaaaatctgcatgagcatgtatcaacgcattaatggcgctgactggcgcaatattttcgtcgtcggcgatctgcatgggtgctacacgctgctgatgaatgaactcgaaaaggtttcgttcgaccctgcgtgtgatttgctgatttcggttggagaccttgttgaccgcggcgcggaaaacgtcgagtgcctggagctgattactatgccttggttccgggctgtgcgaggtaaccatgagcagatgatgattgatgggctatcggagtatggaaacgttaaccactggctggaaaacggcggcgtgtggttcttcagtcttgattatgaaaaagaggtgctggctaaggctctggttcataaatcggccagcctgccattcgtcatcgagctggttaccgctgaacgtaaaatcgttatctgccacgctgactacccgcataacgaatatgcgttcgacaagccggtcccgaaagacatggtcatctggaatcgtgaacgggttagcgacgctcaggacggcattgctcgccgatagctggtgctgatctgtttatc

SEQ ID NO: 12061 - DNA, 664 bp, Oryza sativa
ctcttgtgtttgagtgcagtaccgaaactcctccaagatggaggtagttttgcaataatgcacccggccacaaatttgtcgggtaagacacacttaaggagttcgagttccttagccatggtttgtatctcatgagcctgttcgactacagaacggttgtcagccattttgtagtcatgaaactgctccatgatatacagatcattgctagcatcagtagcaccgaatttagtattcagtgcatcccacaactccttagcgtcggtcatatgcatatacacctcgaccagacgatcgccaagaacgctaagaatgcatcccacaaagagagtagtggcttcctcgaattgcttctgctgttcagcagtaagaactccttcaggtttgccagtactcacccagaagcatttcatagctgtcagccacagagtgaccctgatctgccatctcttaaaatgcacaccggtgaatttatccggcctcagtgcatcggcaaaaccagccatagtaaaatcacagtgcctataataaggtttttggattgttgagattatagacatataatgatttaatctattccataaataaatcatgacattatagatgaaaactagcatgaacgcatcattagatctacacatgtgaactacacagtttaacatga

SEQ ID NO: 12062 - DNA, 810 bp, Oryza sativa
cgacggtcgtcgacgtccacgctcgactacgagcgaaggtggcagccggcgtcatcacactgcgaggggaacagaggaggcggtgggcaaagccattggcaagctggaataaaggccggtatatatgactgggcaccgacgaggcaaaagtcatccgctttattatgatacctgatccacgtatggatgtggtgataatatattgtgaccaggtttcggcgaagcaaagccacccatatcacagttatcattaaatctacacaaacctcaaaaccctcggtgagcaaataattttgaagatgatgaccaaaagcgcagcttaatcagaggtgttccataggctcatcctatggatgattaaccgacagcctcattgctacgcgctgggtttcagcggactgcacgcaatctctagtcatcatatctttctattaagcattctcgcaaaggcaaaacgcaaactcctgtaggagccctcatgtatttgttaatattcatgttaatgaatcgtgattaataaaatatagggtttccctattttttgtgtgttcgttgttttgatttcatcaaacatggagggaggcggatcgggagaaaggttaatgcgaatgtacaattctaccctttcaccaccttatcacaattggtaccgcccctcatagagacacggtaccatgaggtaccaaccaatttcagtcgttggatcctcccagatcgacagctaggatatggtattgcatgccctcaacctcaattacggtaaaaaacctccttgtagttttcttctccaactctttttatatcacgtct

SEQ ID NO: 12063 - DNA, 566 bp, Oryza sativa
tcaacaaagcaatgcttgattaagccgataactgacacctatccaacaaagcgcgatgcaattcgcgcctggaatcggaggccatcatgaccagagacgagataacccgataccaggccgaaagcgttaagcgcgccagcatgccgccaatagtaaagcacagccagaccaaaacccaccagccacagaaggaagccgcataatgaacctcgaatcaatcgctaaatactttgcgcctaaatcaccgatgttcagtgactctcctcgcgcaaccgcatcagacagtctcaccggcactgacgttatggcggcgcttggccttgctggccacaagtgcgggtttggtttcgatctttacctctcgaaaatcggcattagcagcccagatatagcactggagagactctatgagcaggcacgtaagttatcaggtaaattcagagcactgtctgaactcgatgaatcagctcggtcaggcgtgcttaaggttctctgcgcttttgcataccaggattattcaagaagtgctgccagcactcgaaaatgtgattgctgtgatggtggcg

SEQ ID NO: 12064 - DNA, 5111 bp, Oryza sativa
cttgtatcagatgctacacaaaataaaaacacttgcactagttactgctcaatgtgctttcctcacaaacgatccagtgggaaagaacacatcaaggttgaaggtgcaaaggaatatgcaggaagtcaaatgatgacaacacgaagagaaaaatggcaagtaaaacgaatgtaaagaaagtgaatataagatgtcttttcttgggagctcttcccaattacgagccaagtgatatgttcaaggataatctacggaggtcagaccaaaatcatatcaatgtttagatccaacaaggaagcttcatctttggtaggttaacaatcaaactaatataagccgctcgtaaagttacatgacaagttaccaaagtatgacaagttttataacctggttatcttgagaaacattgtatgatgagagagttgttgatcctaaagcgattattgacgtgtaccccaacttttcttgggacggggatcaatgcacaagcaattgggaaaaggtagttttctgatcgcgacagcgcacatgtccggtcgcgtggagctcaggaacaccagatctggtcacctggagctcgcataccaccggatctagtggtggtgaccacggtgcggagagggaccctagcagcgacatcggcgtggagagggacccggcggcaggcggtgacctcgcgcagagagggaccctggcagattgacgacaggctggaactagggagttagtgcatctgattgttgttcatctgtgattggtgatggattggattaaggattattattgttgttgatgatgattagtgatggatttgatttgtgatatgtaaaagcatcggctcagcttgagccagcttttttttttgaatctgggatagcacaaaggtgccggttctatgaccggtgtcattggtgccgactgggaaactgtcacctattgccagttctcaactggcacctatagctgtttgtgtactagtgaaagtgatattgcgtgcagccccattaacagtcagtgaggcatataaaagttgctagattctaggctatgcaaatcaagtgagctgcataaaaagtcaagacaactagaatttcatactatcaaaacaaaaggaatgcatgcgtttatcattgtgattgtaatggttatatgtcttctccaaacccttcggttatatatatgtttcccttgtatcaccttagaggaaaatcccaaaacctcaaaagaaaagaaaggattagaaagtagcagctggctccatgctcatcatatcatgatgaaaagaaaaccacaatgacaatctgccataaattgctaacgttaggagtagagatcatgtagatgggtgaaatttgtagacaaaattgaatttattctatgctagaaggtttgcatgggtgcagaagttgtaaatattctcaatatgaaaatgttcgttctgcttccacgtggatcaacaaagtgagaaatcattgatcaaatttcctttacacggagagtgatcaaccaggaggaagaaaacaatagctagccaccgactccaagtcatgaaattagttcttgatgagtattagtagatcggctggattagctagcttgctcccctattataattagtaatatatcccaaagctatacatataaactgaagtagggctattatctatttcagaggcttgaaccaatataaaaatctttctctcctatctactttactgcaatctcgcgtataacttagtattaacgtcccccatgaaatacaaataccgttgtcgagtatagccatttgacacattcgtatcacataatcaaaatttatcagtttttacctcatcatatttatcctcggctccttcctttctgctgtggtattccaatctctacaacatactatgaggtgtagtgccataaatattataaaaaagatgctcccttttgaactagctagggaaatataagaagtgatattcaaagatggggtgatatatagaactgttgggaggagagctgtattgctttgtgcagtgcaaatcgtgggagagctctccttatctcattatgtttagacttacattattttcacttggtatggtgcatgaggctgttttgtagcatgcgcacacagcctcacaaggaatgatatggtctttgaaaggaaaaccgttcttctcgtgaagtgagcatatatcttaactgattaggtccccccccctgctggaaaggtccgcggtagcggcgaaggatgcagggtcgtggagctgacctagatatggagttcgtcagagggtggctgtcgccttggtcgagctcctcgtctcgtcttcgtgagctcatctattgtctgtggccgagaacaagacaacatgagcatgtgaggtcatctgttgtctgcagcgaaggagagagcatgtgaggttgcctcacgtgggcagtattttcgccgttcccggatcccacaacatgagcatatcttgccaatgtggcaaagtatgtgcacactcagagattgtactgctatatcctacttacaaaaatcgtttccgggaaacaacaagaaataattatttttaatcaaatcccgatctaagaatagtttgatgaatgtttatccacaagtttatttggtagagtatccatatacaaccttgtaattaactggctatttcctattttatggaactaatattttctcttatttttctattacatgcacttgctttgttctgtcatggtctcatggaggccgagacattcattgcctgcacaattacaatgagatttaagactactacgcccaaggaacactcaacctcaaggttaataatatacaagtgggggtcttgtgtacctacaagttcgtgggtatcagagctcaatatatatctctactggagctgaagttagagctttgggatacacatgccatacaacctagagtgtttgccaggcaaatcttttgcttgtggcaaagaattaaccttgatgttcttcgatgtaatctcattgaacttgactcatatgctggtatggccacccttttcctgatgcctcttattcatattgcgctcttgagaaaaacacaaaactctctggaattcttgcctctgttaatccccagcaccatcatttttagttgtggattgctcgtatgtttctaccaatacaaagctgaattgtgaggaagagtaaagagtggcacctctctgtctgcttttttttaccagcaaagtaatacttgttgaccaaaagactggtttatgtgtatatgaggataaggtatccattatttatttattctctctgcatgactgttgaaaacgtaagtgtttgatagtataggagaggaatactgcataacgtgggacgattgtatcctaatataactctaactaccatatactctaatagtaaggaaatgtggactacaatattttcaacagataaaaaaataatatatatcattaagcagcagaacaaataagatgtgtcacaatgagatgtatgaaaaaaaattcttttactcaggaaacttcttccatgctaaaatatgtatagagcatatgcctgaagaatctgcattttacttgaacttgtttagacattggtggttgtcagagcattcaaacataagtggaaaggggtgatagaaaaaaggggaaattattgatgatggtaccgaaggcgattattgtgatgtagtgtgaatgttcataattaaaataaaatctattattgcaaagtgcaaaaccgaagaaggaccccaaaggaaaagcagaggttctgctcaccatgcctgtagaatgaaacgatggatccagtccagcaaacaacctggtttcacccaaaaaaaatttaaaagcgaaacttgtacttgcaacttttcatggtagacagggtttccttaacttgtgatccaccggatattaattcatatgcttcatacactctgctatgcatttgtttttattttcattatgtcattcgcatctgcttgtattacgccaatagcacaaggaattgttaacatttcaaaactttagatagaacataaatttttttgagtaaattttacaaaagtacatgtattttgaccatactatcacaaaactacagatttagcccgaagtttatcagagaactatagatttaaggccatgtatagttttatgataattttgttactaaatatgtagttttttatactctatcttttatgaaagatttggtgctagatctgtagttatgtagcacctaactgcatgatcattcagctggggagattatgtaggagtagtcagggcagaaaagaagacatgtactcctgtgcatgatggttcgagaagttggtttctatcagttgttagcacctatggagaaacaacctgtgctgatttgggagactcttgaccagtttggtgcggtgcctcctaaaagatatctctgactctggcgataagattatttcatgacatattgcctgatgcctcctatccatattgcatatattctactttgttttagatatttatcaaaaacaacaactccatgcccctacaaccgagggtgtgtatcacagtctctttgatttctctcacattcttagatttctctcacaacctgaggtcttgttggatggcaattgctaattgcttcgttggaatgatgagtcgatgtggtggcaaagtactgttgcatgtttatatatactgaaagatgaggttgtatttgtactattaggagatggataggtgaattactgagactgccttgtaaatttggaaaaaagctgtttagggggcataagtatcatcaacctacagaatttctcatgccattagaatttgtatttcactttcagagagtctcatactctcgtctcaggtgacaattagtttgaagattccatctgtattatatatgcaaagtgagtaactgtttgtgtatttgtaatgacataccgaatttcttttgccttcaggacaagaaattgcccctccatgatccccacataattaaacaattctggggtatcagatttattttctgaaaggttggccaaccaattttattaagaatcaattttttttttgtgggggggggggggggggggg

SEQ ID NO: 12065 - DNA, 1055 bp, Oryza sativa
gagcttatgctttgcgatcgacttgcacgcatactctttcctggttgccttgtccacgcacaagtatgttgtgccaaacaggccatgcccaagcttgcgcccaaggttgtacctatccttgagattctccgccttttgttggagcactgactccacctgcaacccggcgctggagatgtgcttcttgacctgagactgatgcctctgctgtggctgggtgctcgatgacggcggcggtttggtcggttgtttcggcctgggatgtggttgagttggctttctcactggctcagagataacaattggtcttggaggggcagtagaggtgagctgctgctgtggcggtggcggctcggaggtcggtgaagagggggaagagggctggacgacggggacagagcgcgagatggtggggtgggatggggtggaggaagtggtggttgatccatttcgccagatggcgcaaagaaggccgttcttcgacaaactacaggttgtgccaacacagacgttgcccattagaatggtgctgttgtggtcatgctggtggttaaggttaccctcatcgatgtcctcttaagttttttttttcttgtgatcaagaaactttaaggagttgggtatatgcgtagttgcagttgatttcgtacaacttggctggtagtatagtcatcattttcttaatgccccttgttcacatcacattcttggaacatataactaagctctatggaattattggctactctgttaattaatcctagcaggaaagacttgcatccctttagggatgtcctctcatttttgcatcctatccaaattaacttgtatagaagggctgcgtttgacaaagtaagctagagtgacatactgtgtctatttttagcagtaaagtatccatcgtttgtttgcactctcagcatcatatacttaaaagtaatgacagatggtctaagatatttttcacacattaaatgtacattattaaacagcaggacagacaaagatttgtcacaaggaaggaaagaacaaggacatccaatttgaactttgtt

SEQ ID NO: 12066 - DNA, 591 bp, Oryza sativa
catctagtaagtctgtactttttcttatgatcatccccttgtcaaaagaagcgtaatttataataatctattttctgaagaacccctttgggaacctaaaaaaagaaatcataaacatagctaaacttgaaagtacataattaattaacactaatctacccctaacagacatatgcttacttttttaactactaagttttttctcaattctttcttcaataactttccagtctttgttactaagctttctaaaatgtataggaataccaagatattttacaggaaaagcacgccagcttacaaccaaagatactagagtattgatcataataattctttgcttgaccaaaacaaaataattcacttttgtgaaaatttattttcaagccagatagcttttcaaacacacataaaatcagtttcagattctttgcttgctgtaaatcatgctccagaaaaatgatagtatcatccctatattgcaaaatagataaaccatcatccactaaataaggaatcaccccatttataaaactagcatcctttagctctcttaattaacaatgcaagcatatcaacctactaaattaa

SEQ ID NO: 12067 - DNA, 1074 bp, Oryza sativa
gctctgaacaatgcttatcaagaacacactgcggaaaggctgattcacagccaacctggtaaaaagggcagttaataagcttcatagggcaaactgatgcacaatgcctgtccatctcacaccgcataacatgctgctcgcacaactgctcacatggtaggactttgaatgggcagacagagtcatgcttctcaatgtgattagcagaaaaggaagctaaacatccatcatttttgcagtttactatcctaaatctacacagattcctgtgttcagccagcttatcttgtgtgtcaaatctctcagggcaatggataatgcatttcatgtctatactcttaagaatagtccctgcagtagcctctctaacatctggtgcccagaagttctccatctccagcttctgtatgaagtctttaattttgttcaagcgggtttcgctagacaaaaacccagacacatggctcaacaagttccgttttgatgctacaaaaccatcgatcaagtctgagaggaactccgtcggcatggtggatgcttttattaattgttctgagtgatcctcgcctccgtcgacagcctcacgaacaagcgtcatggacccctgaatcaaatattctgctagctcgctcttcattccaacagctacagaagatgggctcttgaagatatcaccagtagtgctgtcaactgaggcagttgccaatccacgaagcaggatttctgccatggaatgcactacatctgaatcacacaggttgcactgaaaatttaagccatctttcccaactgtgcattcaaggttctccattgtaataccaagcagtagttcaaatcatcataacagtcttctgaaaaggtccaatgaagcaaaccatttatgtacttagtctagtatatgctcatgcattcttataaagaacatacataaaattttcaaagcaatgaagcctaaaacttatgcaggtaaggttctccaaagatgcgtcactgttcaaacaacacctaaatggcttctagacgtggctcacaattgggctgcacatcgcctagtcagaagcgtttcatatgaat

SEQ ID NO: 12068 - DNA, 1343 bp, Oryza sativa
atcgtcttcttgctctgcggctgcaggtggtgatgataaggcgagaggaggaggcttgcgcgccgccgccggcaggggagagacgccgccgcagatgtccatgtactcatcggcgacctcgccgtcctcgagtccgcggggcgacgtgcggcgaacggcggcctcgtcgtcgagcatcttcctcagctcgaacagcgcggcgtcttccgtggagccgagatcgatctccagctcgtcgtcgtcgccgtcaacgccgggaaccgcgcgccagctgcaccggcgccgcatgaagtcggcgacgtgcgacgggaggatccccgccggcagcgacgacaggaggccgaccagctgctccttctgggccatggtcatggcctccttgtccttgacgcggcgagggagcgggcggcgcgccgccgcccccgccgccgccttgcgcaccagcgcctccccttcttgaggaggcctcgcaccgcctccatctccgaccggcaccgcttcctgaggagggaaccggagccgccgtggccgcgcggggaggagcggccgatgatctcctccatcgccggggacggtggtggtgacgaagatctcgagagttctcgctcgctctcgcctggtggtggctgagcaagatgcccaagaacgtgtggccggaatgcaggatcgagacaggacaaaagggcgcgcgcgccgatcgttcccgcctttttatggccgatgggctgataccgtctcggagtaagattcgaatcggactctcccaaaaatccgagtaggattggttcggattcggactggacaccaagcctcgcgcgcttgcgtaggatcacaagctagatggcaatgcgagttggcgagttgaagcaaatggatagagtacaaaatgcagaggttgcgttaggagaaatatgcaccatcgctcacaatcttaggcctatgaacaatatccacagtattgagtgtgatcagcgccatgtgcccgggggaatggtccgggcaaccaaggacgagaaaatttcagatgtgacaactgatgaatagcaagcaccacagataagtttattgagcataaattagacggagaagtcctcgcttctatgcaaatgcttgttggatctccattatatgcaatctttatccagctctccaggcagaacaggcacaaaagacagaccatgcaatggtgaagagatggctcaaggccattcatagctaccatggtaagtctagaaccgactagtttcaatatgtaacaccagtgtgatagtacaaaagttccatataacaacagtaactcattgatacatttgcagtatacatatccagggaaaaaattgctt

SEQ ID NO: 12069 - DNA, 732 bp, Oryza sativa
cagtcaaagcatcgtgtgcataggataaatttcttactagaattattttcttcagaagttttgtattagaagcataaaaagagaaacaaacttgcagtagcatatgagcattgacaaggttcatttacaattataatttcaaactgctattactatagacaaaatgattgcaacaacaaatgcactagaatgtaagcaactaaagaaaatatacgctccttcttacaaagttctacaagcataatatgcggaaaaattttatgacacaaccagaaaacatgcacatactaaaagctctcaaatcagattgtaatattaagcatgggagttcaagaatcataattctaagaagcaaagttgcagtaaaacgaaccacgtggccttagacatattcttctggtagtgctggtagagcgcggtggcggtgtcgacatgccaaacggtgacattcttctcctgcggcgaggacgacttctggaggtctgcaggaacgtccccgcgggcgacagcgcggcggcgaggaggcccgggagctcgaacgacctgacgacggagagcgtccggcagtcgtagaccgtggccgaggccgaggccaccgtggcgaggaggcgggacccgtcgctcgagaagtaggtggcgctgcacgccgtcttcgggagcctcaccggcggggcggagcccgtcgggtaaggcgggcccgaccacacgctgaatccatccggctcgcgcact

SEQ ID NO: 12070 - DNA, 1390 bp, Oryza sativa
gtactaatgatttgctttgtatctgcagcccatcctagtgttcatgtcaaaggttgatgggaagtttcagttcagtcccatcagcgttaactttttgacggaggttacaaaagttgtctttgctatcgtgatgctaataatccaggtgtgtacttttgctgatgtttcttggtgtgcttgcattctgatgatgagtaatttaacccctataaaatgatatgtagagtacacttatagtttgtcttgatggctttggattggtaaaatactctgttagttcattagatcacttgtactcttacatgagcagcctactgaattcttctggtacaattcttctgcgtccaatttcttatagtacattcgtgtatcagaagtgattgcacatttaaaaaaaatggaaggagcagcaaatttgtgctaatcttccaaattgataagctcaactaatgcagaactaaagatcacaacaacagcctttcaagatgtgaaagcagtttcggttgatattctatgtgctacctgcacttcattatctttatgcgcaatttagcttgtcagcatgttcactgttccttgaaaatttgaagtcctacagattcgcaattgctatgctgcaacagatgtacattttatgccttctatatactttccattatgatcctacctcttacttgtttaccttctcgatgctgctttctgtgtggcagtctagaaagcaaaaggttggcgaaaaaccacttctggcacgttcaaccttcatccaggtgatttgttttctgctttcatgacttatatgaaccaccagtagaacttttttacatactcatttttaaataccttttttctttaccaataatttgtttccgctacctatgttctaacataatactgcttgttgcatgtctttttgtgacattgtctgatcatctgactctccatcattttcatatgtaggcagcccgtaataatgcactactagcggttccggcccttctgtatgccatcaacaattacctaaaatttatcatgcaggtgaatctgaagccatagttgtcgcccttctatatacccctctattgtcatcatccatgaatatatatttttatgttgtctgacatttttgagctgattatgcagctgtacttcaatccgtcaactgtgaaaatgctaagcaacctaaaggtacatattttatgcactactcaagtgttgtgcttttcttattagtgtgtatacgcatatatcataccttttgtaatccaaatttctctaggtgctggtcattgctgttcttctgaaatttataatgaaaaggagattctccgtaattcaggtaagcttgaggttgtgttgcagttatttctgactttatatatataggttgcat

SEQ ID NO: 12071 - DNA, 2780 bp, Oryza sativa
aacaatgcatgtatattgccttgttgcagccctttatggaatctttgaagaaggccatggatgatgccaaaaagccacggcctattcaagacttgctgaaagaacagatagctaagctgagagaacaaggatctggtggaggtggaggaaaccgaaatcgtcgtggaggcagtggtgattctggtggcccagaagatgaatcattcaaggaatcattggatgaactagtccaagttatcttagcaaccgttgcattcattcttgtggtaactaacgttacattcttgtttgtactctctttccgaatgttatttcttctgacactttcacttttaccccaatttgtagcatagtcctgctttccaagtatcttattatgattagcttaactattaacgacatactgtaatgtcgaaacaccttacctgtagatagctccatggtcaacgcactaaaagacttgctacatgcattgaaactgcatagaaactggagactgagagcaccatttcactgtaaagagcaatattatctgcgtattccataaaagtctcgggtgtagtcacagaaaaagtcggtgtaatgtagcttcaaaataaacaacaggcactaaatatatattaagaaactaattcgtatttgtgtaatattgcagtacatccatataatcagaggtgaggagctgtatcgcctcgccagggactacaccagatatcttgttactggcaagcgtactgcgcggttgaaacgtgccatgcaaaaatggcgcaatttctcagagagctttatgcaaagtgaaggctcacaagaagaccagtatgaaagagcagccacctccaaaccaacttggtggcaacagcctcaaaagtttgttcatcttatggaggaactctgccgaggaaattggcgcccgcatgcgcaggagtcttagttcaggtgctcccttgttcctttttggccttctgaagcacatggatgtggcgatgagcagtactgttttcatggctggtgcaatgacctggaatctggatagcgttccttgcccggggcagtgatttgttcttctttgttcgttaatgcgtattttctacgttttgttaagcactaaccaagtgagtaacttcctggcaattttgtagttgatgagatcgcatatataagctagccggcgtctcatgtcatatgcggcaaattgtagattatgttgaagttgaaccggtgtagcttggtttcactgcattttggtttggtttccttagcgttggaatgtaatgggtcacccttgacaacgtggctccaaatgtataatcttcaatggaaaacgagtagtaagtaccgaagcgcttcttcgctgaacacaacatatgaattcttgtcgcgtgtcggactactaggcatcaaaatgagatatccccccattctaaaataagctcacttttatatatgaatctaaacatagacatgtatatccaaaataagttcacttttatactacgtgaagaagattcctttatgcaattttcacatgataccatgcgtatttctctgttctccaattttcacatcgtcagtgaagctactattaatcatcagttactaacgaaatgaaaggagtagctttgatagtatcttttggttttgtcatacaaccatcagttcaaacttcaaaaactatcaaaatttcgagccgttcttgtatcaagaaacaacagatctaagaagcagggtgcattaatcgcgcggaatcaaggacagtttcccaggcagtgttactttgacagcatattcgcgtgattacatttcaaatggcaaaatgccatttttctggattgagacaccatttcactgagtagaagtggatttaattgtcatcagcagaggctccggatccttcagcagccttcttctccttctgtttctctctgcgcttcttatttctcagtgcatttttgctcatctctcctctgtcccagttgcaatgttagtgatcatgcatagaggtaaaaataattacataaaacaagacaagaaaactaatttatcgatcaagaaactaaccccgtagaagcaagcccaccaaaaagctgcaattcaccaaacaaatgtgttaagccaatagcaatattcaaatatttgagttctttaacaacttgaaatagagccaataaaacatcggggaaaaaaaggagccaaatatatttggcggagtgcgaccaacaaacaatactacttgtttttgcacaaaaccacagcagtttgcttggatagggattttgcagccttggatgtgtataaactataagtcagcaattgagccagcataacaaggatttactcagcacaacgatgcaacaaatagtaaacaagatttatgcacacttctttttgttgcaactctaacacggcttactaattgatctctaatatataccttatcctgaacatctgcagaattctttgaatgaggtggtcgatatgctgtaggtttcgctgctatatttgcaggggccttgcttgatggttgtgctgatttagaaccctgtgctgaaactatacagaaaatgaagtatgtaaatcaattgaccagaacttactaacatggaatataagaaagtgtaaagaaccttgttttttcgtttcttcaatttttatgctacccaacgatatcgtgaggtcggcaatgtcactaaatttttcaggcgcttctggcttccagtcagcctgtgtaattcaaaaaaaaagaaaaatcaaggatggagtgtgtgtgattatggaaatat

SEQ ID NO: 12072 - DNA, 830 bp, Oryza sativa
tctgttgaacaaaaggccatttaaccttatcataagcttttttaaagttaatcttaaaaattactccacttttattcttgcgatgcagttcgtgcatagttaacatactatatattgagcttattaacatactagaatactctcaaaaattgcaaatatgggtgatggccatcgtaaatagttaaacatatatatgacacaaaagtatctcaagtatttattgtacacgacttaagcttcttactagtcatacttactttccatcgtatacttgctgcacactctcggtgactcggttcaaacagattaagacagcttccccaacgaaaagatcttgcatggcggagaaatatccaaaaacacaacaaacaaacaaacaagtcacgtgaaaatattcaggagccacaaaatttgactgagacgacaaagaaaatctgtccacggaaatatatatactcctatgccgcaaacaacgttgacgtaatgcaatacgattttatttgattacttatgacaattattattcgtacaaaatcacatacatagcatatgtcaatccctgtaattagcaggtgaggttgctgccggggtcgacgccgaactgctggcagaactgctggtagtaggcgacgcggttgctgacggcggtggggttcttgccgtcgcactcgagcgcgccgttgatggcgcggatggtggcgccgaacccctggccggagacgaaggcgtcgtgcacgttgttggtccagtaccagagcgccgtctggaacgccagcacggggctcctcgccaccgcgtccgggtcgcccagcccgtcgaacccgatgctc

SEQ ID NO: 12073 - DNA, 1597 bp, Oryza sativa
ggctcatgccccagcacgtgcagcctcgccaggaagatcgccgacgccgccaccacggacggcaggtagcggtggaacccgtacgtcagcagcgacccgtcggtgaaccgatgcgccgcctccttcaacagctcctcttcttttccgtcgccgtagtaccttgtgaagtgctgcacgaacgtggacgccgtcgggccgctgaggttgtagtcgagcgcggcgaggatctcggtctccatgcacgacaccatcttgtgcctggtctcgctagtgtagccgcagcgagcggcgaccatgctggcgtcgatcttcctcagggtgtactggtcctcgtacttggccgccaggaacacggtcgttgctgcgacgaggcggagctgtagcggtccaggaagtaggcggcgcgctggagcgtgccgtcggcgagctcgtgcaaccggctgaactcgtccatgaaggcgatcatcgaggcgcgcaccagtgcggtcatccgcccaccttgtgtcgtctccaagaagtacggggagggccgctccacggggttcgtctccatggcacggagggtggcctcgatgtcgtcgtcgtagggcgcgcacagctgcggacgtgtcgtcgtcgctgagttgctggtgaccaccggctgatcggcgcgctcttgcagcagcgatgcgacctcgatcgtcttcttgggtgacaccgggtgatcgctgccttctggcagcggcaagggctcctggaggacggcgccagagagcggggaagatcaccgtagacagggaggaggctgccgtaggtgtgaggggtacggggcgagtccggtggcgccggtgcgagcggagctgccggtggcggtgcaagcggaggcagtgcgccgatggcgcggaggaaggtgtcggtatccaccatctgcggagtggcgccgccggagtaaggatggaacactgggagagctgtttgatcagcaagaagttcggcgaggcagggatgatccatgatcgcgtcctccatgtagggatccaagatcaaatcccccatggtcgccggagcccggaagcgagatcgagggagagcgagaggagtcaagaggcggtggcgggaagaaacttggacggtcgcgtggtggtggccgaggaaggatggtgccgcactctcgccttttatcctcgtgccacgatccgactctgatcaggctgcgcacgcgtgaaggaatccatcaaattcaaagttcgcgcggttttccgaatcaggatcgaactaatgatgtttgattagagaggactaagcgcgtgcgtttctttcctttgtttgcatctccgactcgatctctgtcatgatgaaattcaccgatcatacgatactattatacatacactgacacacacacgcgaaaaaaaaagagcacatcatcacgctaaagaagtccaagcactcaaattcttaaaatccactagaatggtagattaagcatggaagatgacataccatactattatggattcatgcacattgctagagaagttaccttacagtgagcatatgctaacactctatcaaaatcttcaggatttctaagcagctgagcagaacaaaaacatgg

SEQ ID NO: 12074 - DNA, 10021 bp, Oryza sativa
ccgctatagttcggggggggggggtaattcgtactttttccttttcttaattattttttatagagggttctcctttggttatccaacatgtttttctatcgtaacagaggataagggagtattttctccatcccataaaaacaaaattagtatgacacgtgatgcatgctagtactataactctggacatgtgcatgtaaatgtttatatttaaagcataccccaaatttcagatattgtacattatatttgtgcttggattccaatttttcttgatcaatgtgtggatctctagttctttggagcgaatatgatcgcttctttttccacaaatttattaagttaataatagatatatgggaaaaaaaggcatgctctcgtatatttgtttttgaagaaaaggcaaaagctttgccttatgtatattaatagagcaggagaaaaataaacataagcaagtgtatatacagggttagtcgaggaaaaagactagcccgcaaaaaaggaatcgagctaagtgatatctcctaggattccaaactcctgcagagttgttgccccttctttgacccatgctctcagatattgacacgttgatttgctctataacgttccggtttcttcagaaaacatgcttgggtgcagtactgaattcgacttcagaaaatgaatagcggttctattccacacttgtgacttcagaaaatctgaaaatgaatacaagaagtttggccaaaatatagatatcattgcacgttcagttgtactgtgccacacgatgaattgctccttgcaatttgggaagcacgttcctagctccttgaccagttgacgacggaccacactcccgtctctgtacgtacgtacgtacgttcctctttggtctgctgttccctaggaacgcggtgggtgacaccgtcggtgcgaccgtgcgggtgcgacactgcgacggaacaaggaacattagtcaatatatattgaagtataggcttcagcaatcatagttatgcatagcagaataaaatttaaaaatatattgttcattaatctttctttcagaaatatactggatgtggtttgattagcataaatataccatcaaaatcgcagttagaaagcgtgataccgaggttcgctacgggaaagcacgatatcaccacggtatcgcattaccaatacgcgagagcgtgacggtcttgcgcgtcaaatgggcgaggagatttgagctagcggtgtcgcttcttggttatacgatatcgacgcggtatcgcgtttccactgagcgagagcgccacgtcgtaccgatttgggagtaacagctggagtggtgccatcggtctcgcttattggcagcgcgagaatgggatcgctaccaggtttagacgcgcgagagcgcgggcccgcggtctcgcacggccgaatcgcaagagcacactcggtatcgctctttcaaagcacgatagcggctgtggagtgggtcccactgggttttttttagttgggagatcgggcagccgcggtttcgcacagtgggagcgcaatatcgctcggagggggggtgttctcgcgcgttggtttcgcgagaccgaagctgacatgacactgacaccctcccggccgtcaagcatgcactcacgcattatcaatacgcattatcacactagcaaaataatggaacaagtcaatagtaaactgcatccgaaaaagtttttcaattaagcagtgtacgaagattgtcgtgaaataagctgcacaccccttaattactaattgctcacgcgtgattaatttattttttatacgaagtttcctatgtaattaacttaggctgtgtttagttgagggagaagtttggattttggttgaaattgaagatgatgtgactgaaaaattgtgtgtatgacaggttgatgtgatggaaaaggactgaagtttggatccaaaatttggatctaaacacagcattaaccttaacaccattaggcgcgcagtgaggctcacctaaccgctctcgcgttcctctagcgcgagaccgcgccgtcgcagtcagggggcccaccgctctcgtgttcctgtagcgtgagaccgcgtgggtcgcggtcgcaacagttgtggggcccactggctcgctctcgcacttttagagtgcgacaccgtgcgctctcgctattcggcaaagcgatatcgttgcaccgcctaggccaccgcgtgcgctccgtcctcgctgactgaacgagcggtaccggcagtatatttttgcaaatcttcacgcgttcggtattttcttgcaaattctacagaaatacgtatatttctaaaaaaatttcatgcatagcaaagctaatgaactgtcatgcttttggttgggtcttgcaaccatgcaattataccgccgtttagacagaaaatgactaataaaacgttaataacggaatttatgtcctcgtaaacaactaatgtagacaacatagctctgcttctgtgtgtctggaggttgaaggaggaggaattttttttatttataattttttttattaaaagttttacaaaaaataattttccattttaaaaatcgccctctcagagggcggcgaaaatgacgtggcagacggccgttcgctctcgggcgacggccgtcaacgaaatttgcaggcggcccccttgccgccctccgctagggcgattttatactgtgcggggggccgcctgcaaatgggcggcaagggggggcatggaattttgcaggcggcccccttgccgccctccgctagggcgattttgtactgtgggggggccgcctgcaaatgggcggcgagggggcatggaattttgcaggcggcccccttgccgccctggggaagggcgatttttgcctctcccctataaagcccagtccctcctctgtgaaatttcattatattcactaaaaatccaaaaaaaacgaaagagagagaggggagggcagcagaaggggagcggcgaagccctgctggttcgctcaattcatcacaggtatgctcccatacatcttttgcatttgtactaatatgttatgtttgagtatatatgttgcgttttagttttagttccatatattttagcacatctgtagcacacagcacatatgtgtagatccagagcatagaatataatagtatgaattgagacatagacagtagtgttaattgtaagatgtagtttagtttgatctggagaatgtaacgtaattttagaaatttagagaacaatattgtagagaatgtaacttagggcgtagtacagaaatgcgaggttaacgcagttattgttttcatcaggcacaatgtcaagtaaggtcacatttcagatagttctcggtgaaggaaatattagatttggtccagatggtgttgatctgtcagattttgtaatgacatctaagggcatcgataggcctgcggagagaacatttcagtcaatttatagttggttgttgagaggatttagaatagaccaagaagtctacacaatgtcagtgtcagttgtagtgagtcgtgcaacagaaggttatttttgggaactaatgccgatggacagcactgatgcttggagacggtatgtggaaatggcttttgaacggtcatggcccctcgttatatttgtgtcggtacaagagaaagatataaatgtttcaatgcaaaccgaagatgtagagggtcctatcaatgcaggggatgttgttggaccatcgatgcaaaatgaggaaaatcaaccaagggaggagcaggctatgggcatggcggatgagggggagagagtcggtataattgttgatgaaatggagaaggaagattcggataatgaggaagcggacgacgatgcatcatccgatgaggaaggtgatgtaatggccactgattgggcaaatgaggacttctctggacttgttatatcagagggtgatcatgtaccctgggagtataaggagaacgaggtaattgagggtgcaaggtatgctcataaggatgagatgaaggaggcggtgaagcattgggcagtttccttgcagagagagtttagggtggtcaagtcaacaaattatgtgtatgaagtgaggtgcatgaaggaagattgtccgtggcgtgtccatgcatataagggtaaatggaatgattattggaaagttagcattgtgaccgagcacaagtgctacttacaaggggtggagaagtatcaccgaaacatcacttcagcttttgtggcaagtgagatgtacagcagtgttgttggtaacattggctttgaaccaaaatcaattattaggcacatcgagaacaaattcaagtacaccataagctatgcaaaggcctggagagccaaacaaaagatcattgagatgaggtatggcacatttgaagcttcttatgataatttgcctcgtttgttagccaccattgcccagaggaataataatacgtactatgacctacatacatttacatcggttgatgatcgaacaaagagtgtgctgcaaagagcctttttctcattgggtgcttgcatcaatgcttttgtgcattgtcgacctgttctatgcatagatggaacttttatgacaggtaaataccgaggtcagatattgacagcaattgggtgtgatgggaacaaccaggttctacctatggcttttgcatttgtagagagtgagaacactgaaagctggtactggttcctagagagagtgcacattgcagtggtgcgtatgaggcccaacgtttgccttatacatgatcgtcatgcgggtatgttgcgggctattgactacttgcagaacggttgggatgagaagggacttccagctaagtggcctgatgttcggagtcggtggtgcatgcgtcacatgggtgcaaatttctacaagcaattcatgaacaagcatcttatggagctctttaagaggctctgtgcacagaaccaagagaagaaatttaatgagttgtgggacaagttggatgagttgacaacgaagcaaacagatgagcaatctcgcagaccactagttgaaggtgacgagcctcccatacctcttggtgcattacatgatgacccaccaacaatgagaaggaggtcagggtcgtccatcagaaatttcactcagtggattgagaatgagcctaaggagaagtggtctctattgtcgacaccgatggatctcggtatggcataatgacaaccaatttggcagaggtatacaactgggtaatgcgaggagttcgggtacttccattggttgctattgttgaattcatccttcacggcacgcaagcgtactttagggatcgatacaagaaaattggtccgtccatggccgataacaacatagtgtttggcaacgtagtgacaaagtacatggaagataaaatcaaaaaggcacggagacatcgagttgttgctcaaggcacacaagtgcatcggtatgaaataatgtgtgttgataggagcaggcgtggtatatatcgcaagcaagccgtgcaggaatgtgtcttgaaggcggatggtggatgtacctgcagttgtatgaagccgaagcttcatcaccttccttgctcatacgttcttgctgctgccggtgattgtggcatatctcccaatgtgtacgtctcaaattatttcaggaaagaagcaatctttcatacatggagtgaggagatatatgggttcgggatctcaggatcttacacaacgctgagtgcccaagttttttatattccagatccatctaagttaagggtgaaaaagggtcgacgccaaactagacgcatcagaaatgatatggatgagtcagaagcaggtgggaggactttacgctgcagcaagtgtgatctgcgcggccatacttacaagaaatgcccgaagaatgcagaagttccaagcggcgcagatgctagtccatctggccaggcaagtgatggtaggcgaccacctggtgaaggaacaacaagcagcgcgcaaggccaaggcgtcgtcgcgcagcaggcgattccatggtgtaacaatgctttcgatttaggaaataaaatactgttgtgatgtaatgagtgttcggactaaatacttctatcgtgtaatttcaattcaatgttgttgtaatgagtacctccgactattgttgtactagtagtattgcgaactattcggtgttgtatcataatgttatcgtgatgagtgttcggactaaacacttttgtttgtttgtactcttgtttaatatgtgttagtaattcgcttatgaacatttattacttatgttgaactaattatttatatgtttctgatcaacctatttgatgcaggtatggcgtacgacacaccggcgctgttgaaccgggggattgacaggaaccaccgctcgttcctgtcagcagtcgagggtgcacagctcggcaccttccgtccacgcacgtcgcgcgagtggttgcgtgtcgacctccgtcacgttccttggtacgcgtatgttcacatttcaactcaactttgctttgtgttgtacttatgtttgaagtttgctctatacaggttgcgtgcggcaggccttctaccactttgtaggcttgttgaggcggcggcggatgaccgtgacccagcgaagcggtgggatgcagaccggtcactccttgccgctcttgtagaccgctggagacctgagacgcacacgttccaccttccctgtggggagatggctccgacactgcaggacgtgtcgtacctgctcgggctaccgctggcgggagcaccagttggtcccgtggacggtgtttttgggtggaaggaggatatcactgcgcgcttcgagcaggtgatgcgccttccacacctaggaccggccaacacccttcctccgtactctacagtcgggcctagcaaggcttggttgctccagttcactgtaagtaaataagttgttattatcatacatgcttatttgcgaccggatgagtgttttgtactaacatttcattcttaattgtaggcggaccttctgcaccctgacgctgatgattactcggtccgacgctcccttgaggcgtacctgttgtggttgttcgggtgggtgatgttcactagcacccacgggcacgctgtggacttctggctggtccactacgcacggtccatcgcggatgctcagccacaggacgtgccgcagtggagctggggttctgccgtgctagcagccacgtaccgtgccctctgtgaggcgtgcacgaagactgacgcgggagcgatcatcgctggctgccctatgttgcttcagctttgggcagccgagaggtttgccataggtcaaccagtggtggacagcgcaccctacggggttggtcgcagcgcgcagtggccagaggacggtcccacgatggggacttactggtgtcgacgtggggttagtgcaacttcgctgcgttataagtttatcagtcgtcttctttttttttcttcacataacatgtctaattccgatcatgtttattgcagcgtcgttacgctcacgtccaggtgagacgtggttacccggacttcgtgttcgagtttgaccgtctccagccgagcgacgtcatctgggagccgtacacagaagaggccgtcgctgcgagagcaccgctaggactttcgtccttgtgcacacgcgaccaggcttactggctcaccatcctgccgatggtgttcgacattttcgttgagcctcactgcccgcagcgtgtgatgagacagttcggacttaggcaggtgtttccgggcaacgtgcagccgaccgtcctccctgccgaccactcgtgagttcggattgttcatttctaaatttttatgataattacttcatcgagccatataatttacctctcttcacaggttgactcgacggggacagctagcaggcgcactttgggctccacgtgtacagcagtacgttgacgactgggtgttagctacagaggaggtgatcaacgagctcttcccacacacggaggagaactaccgtgactaccttcgctggtaccttcctcgcactcgtgcgcgtgtgaccttcactccagacgccccagagccgcacgttgccgctgtcacggacgcgtatcccacgcaccgtgaccgagactacttcgtggcggtacgtccaatttgtattacttcttacaattatttcatttatcttgcataatataggacaactactgaattttttatttccatcttgcataggctgatgccgcacgggatatcagtgccgatatcaccgcagtccaagtgaggttgaacagaggtttgcacttgactgacgttgagcagagggtgaccttcgaccggatgcaggagaagatgcgtgcggtcatgcgcgtcttctcctgtcgcagcgccgtggacgtcgtacctccagctggtccaatacaaccacggcctcgcgcgcctaccgtcggagcaggacctcgacctacggcacctgtttcgcacggtactgctcagcccagaggtttcttaagttttgtttctgtttttctacgaaaacatcaccccgtcgtaacttgatgttccatcctcgcaggacctcgtttgccttcgagcgcccctagcttcggagcagtgcgacctacaacaccggtttcgcacggtacagttcagcccacatattagttcatttttgtttcagcttttgcacgaatatgtcaccatgttttaactgcacgtttcctcatcgcaggacctcgtctgccttcgagcgcgttcgcaggcacgaccggcgcttccgcgagctccgcaggggcgttcgccacctcttcgggcgcgttcgccagctcttcctctcacggagcgtcgatccctcgtccacacggtactttactttttattactactgttaaatacttgtacgaaactgatggtccttgtccagcaggatttgcagccgggatcttcggtactggggcctcttcgtctcacgccggtaggactggtcctactagccagttctacgacgacgacttgcacggtgcacaccaccacgacgtactaggctcctctcagcttggaggaactccagaggcgcacactcaggagcagccagaggtcacacctgtacaggcaggacgggttggccgtgccgtacccccggaccgactcacgtactcccaggggcacattagggcgcagggtaggagggacaggggtaagaggcctcgtcagtagtgttctacctcttcagtccttatgtgaccgtttcttttggcttacaaacttgtaaagcagtactacttttgctattactactgcagtactacttgtgtttgtctcgtctacatagttcttttcattcatatggtgctagaacaacttatgctcacgacaacacactttcggcgcttcacggtagtgtcagatccagtagcgcgcacagtccacaacagcacacatgaaaagcggcagctcgagttatcactatcaactttcggcgctgcttgttgacataaagtgaatcacgcccacgcgtgatcgtcttgtcacatctaatgaataatgtatctcattgagttcacatatattgcagtgaaaacgacgctatataattgacaatctgaacgcaacctcttcatatcttctttcccactagcacaccacacacgaaaatggaagcctattcattggtaatacgtaatctagatttgagattatgtagaacattcttcactacaattttacattttggcagcaaaccaaatatgatcaaatgcaattttaccttaccaaatatttggtagtgccaaaacttgcttatattttggcactaacaaaatatttgtacggtaacaatccaaatatgccctaaaaaataataaaattgtattttaccagtcttggagattttaatcttgtatagttttcaatataaaaagatttgataactattgatatttatacaaaaatatagagcacagtataaaatcgccctcccccagggcggcaagggggccgactgaaaaattccatgccc

SEQ ID NO: 12075 - DNA, 1624 bp, Oryza sativa
gcaatttttctctgtccaggctccagagcccctggcgttcttgatgttcatgtgatgttcttagtaacattttttgacttttgtgaaaacagacgattaccaagctgacagctcagtgcagtgagaaggcttttgaattagaagtgatattttaaaaataaatgtttcagtatgctgtctaaaataaaatttatcccataccaagtattaacttttctcacgattgtgcctttttttaatgctacagttaagatcagctgataatcgcgtccttcaggagcagctacaacagaaggtgctctccttttctttatttctttcttatcgttgttcagtttaaaatgtttgtgaatggtgaatgactgaatggtgcaatttcaatactggtttaacacaaaaatcacccctacttgcagaatgtggaaatcaatgagttacaagaaaaagttctacgccttgagcaacagctgacaacaaatactgaggcatcccctgaacaatgcacagaacatgagcttcatgatttgaaatctaaacttcagttgaaggttccttttctgatcctcatttccgcacagtttgttgaaatttttaatgctttccgtgcaattttttgaattgatatacacaatatttttaatatgctttgacaggaagcagaaagtgaaaagcttaaatacgagcacatgaaaatcactgaggaaaatcgtgaattggtcaaccagaacagcacattatgtgaggaagttgcctatgcaaaagaactggcatcttctgctgctgttgaacttaagaatttggctgaagaagttaccaagctatctgtacaaaatgctaagcaggcaaaagagttactaattgctcaggagttggcacactctagggttcctggtagaaaaggccgctcagctggcaggggcagggacgaggttggaacttggagtcttgatttagaggatatgaagatggagctacaggctagaaaacagagggaagctgccctagaagctgctttggctgagaaggagcatcttgaagaggagtacaagaaaaagtttgatgaggcaaagaaaaaggaactatctctggaaaacgatttagcaggaatgtgggtacttgttgctaagctgaagagaggggctttaggcatatctgacttgaatgttgatgatcgatctattaatctagctgacattactaacggtacaaaggaaaacaaagctgacaaaaatgtagctgtagttgagaaacaactttcagataataccgtgaagtcattgactgcagaggaatacagaaatccagaatttgaacctcttcttgttcgtctcaaggtatgtttaaatatgctgcatatgcatgttatgttatgactggatgtttattgtcttcaggagtaatcctgctatgtagagtagctaatatgtgccactgaataaaacaaattcttctaaatgcaggctaaaattcaagagatgaaggagaaggaaactgattccttgggtgacaaagatggaaattcccatgtctgcaaagtatgttttgaatctgccactgctgcagttttgcttccttgtcggcatttttgctgtaagtacagtcccatctatccatgaattttatt

SEQ ID NO: 12076 - DNA, 5612 bp, Oryza sativa
cacgttcaaactcggcagccgccgccgtatgcaaatgcacggtactcggaggccgagagcaacgacggcttctacaaagctttgctcggcacggcgcccaacgaggccttcgcccttgccatgtgctacgccgaccggaactggacggaatgcgagagctgcctacgcgcggcggccatcgggatggcctccctctacccgcggagccgtgcggcggccgccatgtacgacgcctgcctcctccgctactccaacgcgtcgtcctccttcgccgccgccaacaccaccgtcgtctctgcctactccgtccgactccgcggggggctacattgttgccggcgtcgacaccagcgcctcgagcttagacagcgacgacgcgcggcggcagctgctgctaggcctgctctgggaagaggccgccggttctgagaagaggggaaagagagagataacgtggcatgctgacatgtggggcccacgtgaatcccacgctgactcagccgtcacgtcggacaaaaccggggtcaaaaccactgagggatctaaagtgaacggttttgttagttgaggaacgtccggtatctggttttgcgattgggggacgattttgtgtttcgatgacaagttgagggaccttgggtgtacttttccccaaaaacaacctacatgccacaaccacataatttggcccacaaagaggcctagcaaatttgggccactcccaggcccagaaaacattaccaagtcgaacaccgcaccagccatcatcgctgtcctctctcctctcctcccaacgcggcgaccgacggccgaggaaacggcgacgaggcggcgcccggccggcaacacgggcgcacggggcaagaggccaagcaagctgcagcctgcaggcgaaggagggaggacgggagcgagtaggagattcaaggcggcggcgcggcggtccggccgtcgaccagcgaggcgcggccgcacggagctgactgggccactgggcgcaccaaaggggcaaatcaatttcaagatctgatgatatgctacactgagaaacagatttgattttaagaactacaccaaatcatccaaaggtttgaatagatgaaagagcgtccaaagaatttagtggtatcatgcttctccctaaatctctaaattattttaaaccattatttatctgttatcattattcattaatctgtcatttctttgttttttttatagattgctgctcgtgaagaaaaatgggtggttgatcaccgcacatcatttattggacaatggtttcgtactgtaaattctactccctccgtccaaaaaaaaaaaggcaaaccctggtttccgtgtccaactttgactgttcgtcttatatggaatttttttataattcgtattttcattattgttagatgataaaacataattaatattttatgcgggacttgtctttttaatttttttttatatttttttcaaataagacggacggtcaaacgttgggcatggaaaccaaggtttgtcttttttttttgggatggagggagtatgtatttcagtatgtgtactccgaatcagatatgtagcctacatgaaagatgcaccaaattgtgttggcctaatttgttaagcctcacgtattattttttcatgaatctatggtattaatcatatggtagaaagatgcgcatgcatgtcttagggattgggatcctctgacgtgaagtcagagagacgtggtgactgacatgtgaaccccaccactcgcggacccacttgttagtgaccatgtcacggagcagttcacgtcagaggatccagttccgtcttacagacactcaaaaaaaaaaaactaagcccgtttaacaagctgagcacggagcggctttgccatcacagtggtgaactcattcttctcggtcaagtccacctcgtcgccggccacctccttccactcgaactccttcaccaaattcgccacgaaatactccaggtgtagcatggcaacgccgagcccggcacagatcctcctcccgacgccgaacggcatcatccggacctcccggctgcccgtcacgtccactccctcgccgtcgccgccggcgaggaaccgctcagggatgaactccatcggcttctcccactccctctcgtcccttcccatctcggccaccatgaagttcaccgtcgcgcccttggggatgaggtacccgccgacctcgacgtcctccgccgccttgtgcggcagcacgaagtgggccggcgggtgcttgcggaggccctcgaggatgacggccttcaggtacggcatgtcgtgggtgtcctcctcggtgatctcgtcgtcgctggtcttggacttgatctcgtcgtggagcttggattggatggatgggttcttgaccagctcggccatgatccactgcagcgcggtggccgtcgtgtcggtgccggcattgaggaactcggagcagagcatcaccagctcgtcctcggtgagggcgctgtcgccgtcggtgtcggggaggcttacgtcgagcagcgtgtcgacgtacgagtgctcgaacgtcgtctccttctccggcaccggtgggccgccggcttgctggatatggttcttgcgcgctcgccgggcatcgatgagtggcacaaagagctccttctgctgccgtcgcagggcgaggcctatttggaggcggcggcggaagatgtgcttggtgaccgccgggtagaacgcgaatacgctcgtcttcctcgcgacgtacaggagccagtcgcgctgcgcggcgccgatggcgcgcaccgcggcctcgtcgagccgctcgccgaagcacatgagcacgaggaggcagaacatggcgtaccggaacgtctccaccaccacgcgcgggcgtggcggctcggactcggggcgcgcgccgtccgcgagcttgtcgacgagcactcggcgaacccaggagcgcgcgggcgcgaacaggcggacgcgcgacgggtgcagcgtctcggcgacgaggttgcggcggaggacacgccacacggggccgtagctggagcgcgtgatggtgttgccggtctcgccgagcagcgagcgcgtgacgtccgggcggtcggcgagcgcggcgccgcgctccaccagggccgcgtgcgcgacgcggcggtcggcgacgaagatggagaggcgggagcccacgcgcagcgacacgacggggccgtaccgcgcgatcaggcgctggaggagcggctccaagttcgccgaggagtgcctcagccacaggaggcttccgagcaccggcacggcgagcgggccaggcgggatgcggcggctgccaccgccgctccggcgccgccgcgcgaggaggacgacgagcgggaggacgagagcgacgaggagcaggagccatgaggtgtccgtggccatggcgtcttcttgcctttgctctgctccgccgcctcgtcagttgagctttagtagcttcggagttcgagtcaaagttctttcggctgctgacgtcatggctgatggatctgattcggtggcgtttctagaggatgagcatgtgcgagatgcccttggcttcaaagctcgatgacagatgctttggttatcctggttattgaccttattaaaaagagaaaattcgatccataatacatgaaagaaagcggtaccaaaaaataacataaaaagtttccactttcaatctatagcataggccaccgatttttctttgtcccgtagcacttccgtcacattctgaagtaacggcgttagataggagtggagaaaattttcgttgcactcatttgccctttgttcccccaccaggtctcctcttttgctcccgcgtggacggtggtgcggcggccatcagcgtgccgagtgaccacctcgtctccccgccaccgccgagagggctgcggtgcacgctcttcaacaacatggacgcgtggctcaccatcgccaccgacggcgaggtggaccccgtctggcgctcggcgctgctgatcgagggtgagccacccacgccggcggtcgtttgacgacaaggacgacaacgatgacgtgggtggccctatcttcggcatggatagatgtggcccatggtggccgtactcgccgccggagaactgcctcttcctcgccacgacgccgcaccacgccggcttgccgctgcttccctctacatgcacggctgctccaccggctgcagcacgctccgtctcgccaaggacatcgccgagaacaaccgcggcgcgtgcgtgctcgtggcctgcgcggaggtcttcctcatagcgttcgccgcccccgatgatgcccacctcgataccctcgtcgttgcgtcactgtttggtgatggcacctctatgtcttcctcctctccgttgcagatggtgggcggtgccggcgcggttcggctcggcggtgcgcttggagacagggatggtggcggcgcggctagggatggggatggcagcggcgtggctggggacggggatcgtcgccgtgtggctgtttggtgacggctccggcgccgtcgtcgtgggcaccgacccgagagaacgagatgatggtgattacggcgaggaagatgaagggcaaatgggtccaacaaaatttttctatacttcgatctaacgttgttaactccaacctgacggaagtgctacggggcgaagaaaaaccggtggcttgtgctgttgatcgaaagcaaaaaaaaattcttgtgttattctttggtaccgttttttttttctatactatggatcgaattttctcatgcatagtaaaatgcatcgtgttgtcatcgtcacatgaactattctgggacaaaccaaatgctccatcgggaggaatttctgaagaaaaatcgaccatcttggatgatcctgaattcctgatgtctgaaagcgcagacagaaacagttgaacggtacacgggccacacggcttcgtctaaatcagaattcttcagaaaacgatgccgttttactgttcacttgttggaagcaagtcaagctggatcaatcaatgacacggcgaatgcaagttggccatatcgttgcacggtggttctccgtcacataagatgtttgacaataatttgaagtagtaaacatatactatttacaaaactaattacataaatgaggcggaaacttgctaattgatgcgaaaaaaaatcaaaaaatgagaaaaaaggaaaaaaaatcgtgaaaaaaagggaaagacacgtgggaaaaaggaaaaaaacgcggaaaaaaaaggaggggacgcgtggcgtggtgggggccgagcgcgccaattagcaattgtgttcaccggaggtctcttaagttaacagcgatatttttttaggtcccttaatcccaaaaccagaaatgtgtaccctttaccttacacatgccgtgcacaaggtcctataccagtatatatgggaagtttcgctgatgtggcatcctagtcagaaaaaaaaattaaaaaattacgtgggtccacgtctcagctgcacatttttttcttctcttttctctcatctctcttcgccggcagcgggcggcgatggcgagcagcttcacgtcgccaagcatgtggccggaggcaggcggagcagcggcgtcga

SEQ ID NO: 12077 - DNA, 4610 bp, Oryza sativa
ccgccatcgccctgcccgccgaagaagacgagagaagagaagaaaataaaggagaaaagagaagaaaggtgaagaaagaagggatatggggcccacatcggtttctctcacttgcatgtgggtcccatatactttatttatttatttttgctgactagtatgccacgtcagcgaaaccactcatatatactatcatgtgccataggaccttgtgtgcacggtttatgtaagttaagaggtacacatttctggttttgtggttaagggactaaaaaatctcactgttaagttgagggacctccggtgaacttattccaatccaagaaaacgaacggttcgaccttcaagtccgggtgatttggcaatgggccggcccttccaattcggcccgctcgacctacaacgccttctttctcagccagcaattcttcccctgcactgagtgcaaagggatggattgccactcgttgtgcctcttttatgcgcattagggaggagacggccgaaacacatcctgatcatcggatgtgtcttcgctcgtttggtttggcttcgagtgctcaccttgatcattggtaggggagatttctcatcggacccgcatgccctgttgcatgattggtggcagctctcaagggatcgactgggcaagcagctcaaaactccagttatgttcactgtctaatcctttttattgttggttctttctgttccttaggagcttggaggaactgtatggaatagaccgtactgaatccgacttgttcagagaatagaattgcccgtttcaatgttcacttgtgacttaatttgtggttgtataatctactactaatatccatctcgtacaacagaagacacgggagtctcgtgaagcatcacacgactacacatctggcgattacattttgtgacctcaagggtgaagccttctacagttctatattggatggtagaataccaggcagacgtaaaagagtggaatttaaactttcgaggatgtgttccctcgttgtttgcaatatcacttaaatgattataaaaaaaatgagaagatgtattaacatacagtataatatatcatttgaaaatttacaagttcaagctcaacatatcgcaacgaaaaaaataaattttatatttagttcagaattagctcatttggcaggcatataagacagtaaaacaaaaatggcccaaaagaatttaggcccactagttttttaactactaaatacaaactcctaagaaagcggtaaaaatcgttaggctcgtttaattagccggacgcggagcgactttgccatgacggtggtgaactcgagcctctcggcgaagtccacctcgtcgccggcgacctccttccactcgaactccttcaccatgttcgccacgaagtactccaggtgcagcatggcgacgctgagcgcggcgcagatcctcctcccggcgccgaacggcatcatcctgatctctctgctgccggtcacgtcgacgccctccccgtcgccgccgccggccatgaaccgctccgggatgaactccgtcggcttctcccactccttctcgtccctgcctatctcggccaccatgaagttcaccgtggcgcccttggggatgaggtacccgccgacctcgacgtcctcggccgccttgtgcgggagcagcaagtgcataggcgggtgcttcctgagaccctcgaggatgacggccttcaggtatgggaggttgttgcgggcgtcgtcctcgttgatctcgtcgtcgttgtcgccgctcatcgtggccttgatctcctcgtagagctttgattggatggatgggttcttgaccagctcggccatgatccactgcagcgcggtggccgtcgtgtcggtgccggcgctgaggaactcggagcagaggctgaccatctcgtcgtcggtgagcgcgcggtcgccgtcgccgtcgacgtcttgtagtcttatggtcagcagtgtgtcaacgtacgagtggttgaatgttgtgttgtcgtccttcttcttctctgatgccgctgaatcaccggactgttgaatttgtttcttgcgctctcgccgggcgtcgatgagtggcatgaagagctccttctgccgccgccgcacggcgaggcccagatggacgcgcccgcggaagaggtgcttggtgatcgccgggtagaacatgaagacgctcgtcttcctcccgaggtacaggagaaaatcgtgctgcgcggcgccgatggcgcgcaccgcggcctcgtcgagccgctcgccgaagcacatgagcacgaggaggctgaacatggcgtacctgaacacctccagcacgcgaggaggagacgcagggtgcgcgcccgcgtccgcgagcttgtcgacgagcacgcggcgaacccaggagcgcgcgggcgcgaagaggcggacgcgcgacgggtgcgtcgtctcgacgacgaggttgcggcggaggaggcgccacactgggccgtagccggagcgcgtgatggtgttcctgctctcgccgagcagcgagtgcgtgacgtccggggggcggtcggcgagcgcggcgccgcgccccaccagggcggcgtgcgcgacgcggcggtcggccacgaagatggagaggcgggagcccacgcgcaacgacacgacggggccgtgccgcgcgatcagtcgccgcaggagcggctccaggttcgccgaggaggagtgcgtcagccacacgaggcttccgagcacgggcacggcgagcgggccaggcgggacgcggacgccgtgcttccgcttaacggcgccatgcttcgcgaggagggtgaagaggaacgcgacgaggaagacgacgaggagcaggagccattgtgttgcatcgatggccatggcgatggcgtcgtgtcgtcccttgcgttccgcaagttaattatcagctccgcttcgtcagttgttgttaaagatggtttagcttccctgccttgtggctctagcctctaggcctgtagttgatggatgggtttccatggcattccggacaatatcgatcgatcagcatggccagttaaatattcactcagattcatattataagttgtttgattttttcctaatcaaactttgttaagtttaattaagtttacagaaaatttaacaacatataaaatatcaaattagttttattaaatctaataatgattatactttgataatatgtttgttttgtgttgaaaatacggatggctactcagacataaacgtttagctctggatttggtctaattcttaaaactttagctaacgatgactatcatactttagtttataacgataaaaatgatgtacaaatatttgacttaaatacttatttttgtgattgtataatctctagtccctccgtatcgtacaaggcttgtctgattccgtagcatatcgatcgatcagcacgtgtacgctggatcaattatttatcacgacaaaattcagaagaaaaatcggtcatcttgaacttgatgttcgaacataaacgtgcttggtttgccgacttgcccgtactgattccgattttgcagaaattggtagccatttagcgcctcacttgttgggggcaagcagccaagcaatcagaatcacacgatgaatacaagttggccatatcatttgctagttcagcaatagcacacaatgatctgctctttgcagaacacattaatctactcgtatattgctaacacactccagcttacatacagttactacactcacgcctctatacactcgcatatgacctgcgctacaacgagtagagcactaactcttaccaaaaagtaaacaaaatgactgtataggacttgacaaggctgagtttacagtcacagagcctgatgccgatggacttagaagatttgcacggcacaagcacaactagcagcacaggactatgcacaatgcttctgagatgtggccccagcttagtttctgtggggctaagcaggggccacaggtcagaagcacaatgttcaaagctgtgctaccaagctgggcgcacacttagccacacaaacattatacggcaagaaaccttacataaaatatcaagagctgacctcggcgaccttgcttgctgcatctgagatcctgaggttgcagagcaatgcatcacgtcccgtaagcacgatctgaaagaagtcgcctacgcgcttcgatagggagtccaacccatgccggagcccctccgcgcttttcgacatgctggatatgcagtttaatagttcctccttgctttcctggacactggttctctcaggaacaaccagggcgctctcatcgctgctgccattcgcctgctttacgttactatcttggtgctctttgtaactgattctctcaaccattgccacttccttttcatagctgatatccttcttcatttcagcttcttgtgttcccccttctgcaatactctctgaaattactattccaccctccctggtagtgtcatcagcaagtttaagaccacagtgatggtctccttcctgcgcaatgctgtctgacatgacctcttcctctgtatggctaacagcatttgccaggttggcagcttcttcttcaagctgagaagtgctaaccaaa

SEQ ID NO: 12078 - DNA, 3551 bp, Oryza sativa
attagaaggctagtttattcaagctattcttaccagaaagtgacatgtctcttgccattccaaaattaattccacttaacatggcagagcatcggcatgttggttcaaacaacttcaacttatttagcagccgaagtcataccattttcacattggtgagttcataaattctttcagcattcaatcatttgttaaaaaaaaggaactagtgttttctaattattgtattaatctgcctgatgaatccaatattgggtatgctatattactttgtttggggcctataatatttgcgtgctcttctgcagatgattgaaagcagcgctcatggtgacgagtatgatggagtcatgtactcacaacttgtatgtttttctcataagcaactctctgtattttcaattgctccagctttctagtcttacatttctgtgctattgtattttgtagaatttgattgatctagctgggtcagagagttctaagacagagactacaggactgagaagaagggaaggatcatacattaacaagagtcttttaactctgggaactgtaagttcttggtgctagccaccaccattcataactcataattgtagttagaaatcaattattatttgttttcttgagatgtgttaggagttagaacatgattgcaactaccaagttcaggttggacttgggaagcatctggtttatgttgtttttatgttgctaataatttattgttggaactgttgaatatataaaaataactaatcccatgcaacccctaaaagaatgaaatgatgcgcctgaggaaaaacttccaattcacaacatttgttgtaatcttaatcttaatcactgttggtcctacttactctgaaaatttcaaacccacaggttattgggaaactcagtgaagggagagcaacacatataccataccgtgattctaagttgactcgcctgctgcagtcatcattgagtggccatggccatgtttcagtaagtaccaacctgtttgctttcttttgcagctactctgttcaaaattcactacatggtgctacactgttggccattctttcactatgaattgaaatttgatcatcaagtgatggattaacttatattttacagctgatttgcacaatcacccctgcatcgagtaacatggaggaaacccataatacattgaaatttgcaagcagagcaaaacgtgttgaaatttatgctgctcgtaaccgggtaagtattctaggtgtatgcagctgacttcttgtgtaactgttttggaggtaagaactaatggatgcttcatgattttctgctgcccagatgatcgatgagaagtctttgatcaagaaatatcagagagaaatatcctctctgaagcaagagcttgatcagctaaggagaggattgattggaggtgctagtcaggaagaaatcatgattttacgccaacaggtctgttccttttgctatttgcgagagaaattactggagttctgtggttgtgtctgctcgcaattgtggctattttcttttaggatacctatgatttatgctgttaagttaataaatgcctaataagttactctttttttttatcttgtttagttggaggagggccaggtaaaaatgcaatctcgcctggaggaggaagaggaagcaaaagctggtctgatgagcaaaatacaacgcttgaccaagttaatacttgtttctacaaagaacaatattcctgccctgacagatacgtctagtcatcagcgccataattcggtcaatgaggaagatgtaagtgctcgttattacactattgtgcattggcacatacaatttttcctttatgatatgcattcatcaggcaggccatttcacttcaacaatgtactggtcctttccatttcagaaagtaagcacatcacaagatagttctatgcttgtccaaaatgatagtgccacgaaagattcgctatcatctgcttcgccagatgctgtggatgagatcaatcaactaagatgtgctagtggagaccattcttcgattgctggttctggacccgatgaaatgcaggtagtttgactttacgctggttactgtctaatgacatgtgccttgtgaataaattgttcgcaattattgtgtggaagtgtccttataaaataagttccttggatttacatcaatatgacagacccatgtatactatttatttttttagaatcgaattagtctgtttttttggcagttaatgtatgagaatttccgccccttatcactgtcctctttcacttccaaaacacaatgggtctattctggatgggcgtattagccatatccagtggattccattgatagttggccctgccttcctactgaacagtttgaacaattatgaatgcaaagcgctcactagacagtacaatattaattcaattagttttcattttgtagtgaacatgctgaatttgtgaatttaattgcctatgatttcctgtattttgcatttcagggagggatcaccgcatcggatcaaatggatctactgattgagcaagtgaagatgcttgctggtgaaattgcttttggtaccagttcgctgaaaagactgattgagcaatctattgaagaccctgaagggacgaagaatcaagtaatatttttcctcctttttcttaatacttcactagaaaaaatgcccatgcgttgcaacggttgaaggctatcttaatcttattattgttatacgatttagctaagatgaaattcaatgtaggaatttgcttggatattgtttttacaaggtcataagctacaattaggagtctgattgtcttgagttagtatgcgagtttttttctaaagagatttcttatacgacgacttctatatttccaaaagtgaacgaacttaaaaacctactcaaatacaaatatataatttcaaaaacgaatgaactcaaaaaccgactcaaacacggatgacgtaccaaagttccggcaaaaacgtcttcaatttttataatagtagatatgtagttactacctttgggcagttttcgatcttttctatttgtagaagaagcaatcatgtaatttacttctagacacaaatcggtagcagaacaaatgacacatcttatgaacaaatcataccaatttctattcaacaaaatttcgaaaaagaatagttccctgacccctgttatgctgacttctatggcaggtaaaataatattatacatggctgggcactcatagtttttttttgttatttattgtatcttacggagtacttcttatgtaagaacagatctatgactgataagaattgttacctgaagtttaaaagttatcttctcaaggattaatgaacttatactagtttcttattttgtatttatgaaggatagacgtatggaattgttgactgcagtataaagtgctgaacttcttgattttgtttcattacgaatatatctccatgcttcatgtcacaccttagcactccattttgctatatttatgtctctaactctctatgtcatcactat

SEQ ID NO: 12079 - DNA, 5268 bp, Oryza sativa
atatggtcataaaatgagctttctataagccaatttagaaaaacttgcggttcatgcaaaccataccatattcttctttcatgtaagttcagttactccctctttcctattttaaacttagtcatgaatttccatgtcaaattttaatcgttcgtcttatttatttttttcacacgtaaaatactatttatgttttgtcatctaataacaacataaatactaattataaaaaaaaattaaaattagacggacaatcaaagttaaatacgaaaaattatggttatgcttgaaatgcgacggaggaagtacaagttataagaaacagacaaacgcttgatttaaactgtactttccatcttgttaagagcgtcccctgtcaacttctcatcctcccatttgaaaacagagaccagaccacatccgagcgccggtcattatcacgaaaaatttcaaattctaatttcaaatcacatcgaaaacaacaacaaacaacaaaccaacgggttgggaaaagtgcaataaaccaatcaaaagctggtgcgccaccgcaccggcacaccacctgcccttttttggggtatttttttcacctcgccccctacgcttctccgcttttcactttttacccctccccgaaaataaataaacacccctcctcgcagttattcccgcccaccacccgcaacctgtccacgcatttcaaattaccgagccccaccgccgtcactggtaggtgggcccgtgcaccgtgggccccgcgcgtcagcgccgcggaggctgacacgtgtagtacagtcgcctcctacctccctctgcgtcgcgttggcgtctcgctttaaaaactcgcaacgccgtggcctctcgcctcttttggagcaaggccatgtgaagcctctgaccttccgataccttcccctcttccgccgcgtctcgcctccgcctccgcgcgctctcgccgtcgagctcccccgccgcgccgcgtcgcgccgcgcagcgtcgccttgcgggggggaggtggggggagggaagcttcggtttccgtgcgggatgtcgtcgaggccgtcgtcgtcggcgtcgtcgaggcggagcagctcgccgttctcggcggggagcaggcggcctccgacctcgtcgtcgtcctccgccggctcgtacctcacgggccgcctcatgccgcggtcgtactccacggcgtcgtccgtgtcctcatcctcccatttcttcggcggcgggggtgggagcgggggaggctcgaggtccaccaccccggggcggagggggagctcctcctcctccttggtggggccggttccgtcgccgccgtcgcccgtgccgttccccagcgcggaggagctcgtcatcgaggacacctcccgatccggggacagcatatccgtcaccatccgcttccggccgctcaggtgagggggatctgggagtgtgagctgcgcggatctgtttgcggggcgtggttgtgagtatttcgactgatttgagctggatttgggcgtggctgcagcgagcgggagatccagcgcggcgacgagatctcgtggtatgctgatggggaacggcttgtgcgctgcgagtacaacccggcgacggcttatggttacggtaagtactatgcttcagttgcttgtgcggttaatttggcaatgtggtgatttgaatagtacatttgagctttctgtaattttggggcttgggattgaattcatgggttcagccaatgtcggatgttcacagccgcagatttatgggataagtcgcacaatgctgaaatcactaaggagaggcttaggattttggataggcataaatgcatcagcgctgggacaaggcttgatgattaattgaaaattgaaaatgcagttcttcgttttgcattttcgcgacattttaagagtcagcttttactgtgaagttgatagccagctaaaatctaaaacactgcccgtgaggtttcattgccttgttgccttttcatgctgcttgtactgtggtcgtctttcagaagactgctagttcccgattgcaattatttggtatgctataagattaatgaaattgacatcaatgttttcattcaagaagtttcatggcctactccctcaaccagttattaagcatttgttctgtgctttctggcgactgtaattatgtttctggtcatggtcaatcaacttgactgaaatcaatgcaaaccttcaatgttcatattaagaacaatatcacattttgtgatgctgttctctatggtatcatctggtttctacttaataaccaatcatttttttactgctgtttcttttcagatagagtttttggtcctaaaacaactactgaggctgtatatgatgttgctgcccggcctgttgttaaaggtgccatggagggtataaatggtatgtcacctatccttatttagattgtccgacacattgtttcatgagttttccatttatttatatctgatggaggacaattattgttcgagagttactctatggtcatattgtaatatattatcaccatgatggcacacacttcattccaaactgttctctaccatatcatattgaacaaattacctttccttgtacaatgtttgttgctgttgtccatatcatttcatttagtgttttaacttctgagatgtttcagacttgcagtactgacattcacatattaactttatgctttacattgtatgttgagtttttttgtttatcaatgtaatcacattgctgagcacaaatctgtgccaacttgtaggtacggtttttgcttatggtgtcacaagtagtgggaagacccacacaatgcatgtaagttcttaaatcctacagggaaaaatccttggtctgttgtcataatgtcttcttctaggaaagagatacgatcctgtatttagtgattccaggttctctaattctctgttgagccgtcctgaaaacttcctctatatcattcctttgaatgcaatttatattttcaagatattctgggatcctcctattgcaagtgatcacagttatggttgtcacgtgtacattttcaatcatgaatgttgttgctaaagggaaagctcaattgtgatttatgaagacttgatcatttgatccatacttatatctatccatttatttctgtaatcttttgcagggtgatcagaattgccctggaataatcccattagccatcaaggatgtattcagcttaattcaagatgtacggaattaaatgctttacttacataatatttagccgtctatttttttccaaatatttacactgttgtagtgcatatttttatttgtttaaatggagaaacaatttacattggtttcttgttaaaaaaagtatctccaaaatatgcagtgctgtctcctcttgggatcctgcattcctgcttctgcacatggttaatgtccatgtggataataccgaatttgaactattttataaagcatgactcacatattttttgtaatggtccaagcccatctgaccataataatctcaattgtaactgacacagctttaaaagggagtctatgtacctttgtgctactgtgatggccctttctttaagattagctgcctgtcaacctttcatctatattcattttaaaaggctctagttgactagtggtggcagcagtgaatctgccaccccacctcttgccactgcagtttttataaattgtcccctgataaattttagtattagtattacaaaaaaatcctataaaaatgggttaccccattatataatcaagctgagcaccccctacataaaaaaaatggataatatatatgatgcaaaattatagtttatttatttcaggtaatattatgacattttcttttatctgtagcaaattactggcatttagctaaaggaaaaatattttttatccatttgtttgactaaaagttatagggtttaacgacttccagaagctgcaatcagtgatcataatgctctgtgttatgcaaatgcaatcctaaatcatataatttttgcacattccattttcttgtactattgggtgtacttttcactgtttgctacccaatctactttgttttgtcatttattctggatatcactcaattgctatcactgttttatcttaatttacagactcctgggagggaatttttgcttcgtgtctcatatctggaaatctataacgaggtattctacctcacagtccaggaaacgcatcattttgtaattttgatatatttctcccatggcattgcattttgtccagccccacttatgattactccacaagtgctatgtctcttcagttatttctgaacttgcccttcatgccttcaccaaaggattggttgatgacctacccagattgtgcataaaattgttctcatatatacatatagaatttactggctgcaccattgcccttgtaatccacaaccatttctgctggctatattcttctgtttccagctttgcagttagttactgcctagccttcatatttccaatcctatagtgtaaatactgtccaagtgatacctatgactatgggcagtgccacatttatttaagaggtcttgtcaaattttgaggtttgttagatttagttgtattctatatgtagttatgtacattcatctcaatggatttaatttctctctcattgcaggtgataaatgatctacttgatcctactggccaaaatctgcgtgtgagggaagatgcacaggttaatcctctacagcattggttatcatgttggcatgtacttctatataatatcggtgctctaatttatttgtttgcataccccccttgagatcccttcttttgctttcaactgttacatctaattgtcctttttaggcaagtaaacttctcttctgttgatatagataatgctgtagcagacaaactaccttccttcagaccttgtttgttttatcatggcacaatggttcttttaaaagttctaaacttctaacggaatatttagatctctatgatatcagaacagaggatttgattgttgtgtagtgtgtactgaaatataaattcactcctattttgatgcgtggaaacagtttgtgcgattctcattttgtaatgaattcgttaaagtcaaaatgtggcctgttttttgtggagtgccatttggttcagacattgatgaacatgaaaagtttttaatcattttgtaatttatattcattgtgcgtgtcataatattttcatatctaactttgcta

SEQ ID NO: 12080 - DNA, 26551 bp, Oryza sativa
  unsure (1)..(26551): unsure at all n locations
gttcagctcttccttgggcaaaaccgctgtagtcacctttcctgcaaactcatccccactcggctgtcgctggatgctactctccaactgctggactttatgattcaaagtggcgagatcagagctgaggatctctacctttttctccactgctggaagacgaacttcgagagatttcttgagatcggcgaagtccgtgcgcgtgcgcccatcaacctcctccctcttcttctcattctcctccatggtccgcaatagcaggtcaagcttgccctcctgtgccatcagctgcgccgcctgcttcattacgtacctcggcttctccaaataatccggcttctccagggttctcgcccaaattcgccacactccgagctcagctaacctggggaaggcaagttgccttttcgcggggtctgatccgaagaacagccccaatccctcccccggaatttcacagccaagccaagagaattgggggcgaaattttaggctctgataccaattttgttagctactcctaacaaagacacaagaacagttggacacgagtggatacgagaacacgatagataggtttcctctcgatccgacaggatcaagccgccgccgccttcgcctccgccgtgttctcagttcatacctttcgccatcgttctcctctgtttaatacaatctcccacaacccgtgacagctgtcacagcacacgcaactcacacacgccatcgcacaggatggattactcacttggcccacatcggcccattaacacgaacactgggtcgtttagcacgcaggccgcgccccaggtcctttcctgattcacctccctgctgtagctcgtcatcttctttgtcaactcccagtgcaactgcagacttgtcagaccttcccgatgtagttatgccgcttggttgggatggtctgacactaattcatcatacggagcacacatgtcagcggcatctctctttctctttcccctcctctgccacgcccttgactcgcgatagctccccttcctcgtgccctgtcaccgctaatatcaccatcgcggcctacccagccctttccacacccgactttgacgcctccgcgcggggggggggggggggtccggatgggatggcttgatcttgagcatgcagaatggcgacgaaagagagatgtggctaacatgtgagtctacatggtaactcagttggttggaccagatcaacaagcccacgttaataaaccaccattgtcaatccttctcaagagttaaattatactaggtttaatagttagaatgtcgagatatctggtattgcgattgagtgatacgaattggattagacctataattgagagaattaaagtggacttattcgttcattcaaacagggaaaaaggcccatctatctatatgggctcaagggtataactgagccatctaatcgggctagtttacattgtcctttcactaattggacgtgcccaacttctctctcaaaggcattaaggcccatgtgcgacatcctctgagaaatcccataaattctggcccctgtatcccaggaaccaatctttggatcagcttgagattcattctcgagaattgtcaacatgtcatcctcttctccggccaaccaccggccggcgcgcggcgacaaggctactactaccatcatcgccgaggtgcctatcgcgtacgcaaacacgcacggtaaatgcaaccaaaatctcacctcaccgtgattaatttgtcgcttaatttcaccttctcctgtttgaacattgcaacaaccgatccatctactccggcgctctcgcaagtcgtaacctccagatcgattgatccgatccatcatgaggatttgcacgagaagcttcacgtaaaaaaagccccggccgcgaaggctttcggctcctactacgaaccctagcctctcagctcacctgtcgcgtcgtgtcgtcatcggcatcaacaaaaaacgcaatcaccggagtgcaatagaagcaaagaacgagcatcctgacagattaatcagctagctacagcagtagggtttctgtagatcagaatgccatcttctcttgtactgatccgtgttctgcattattcgatatccatccatccatcgattagcagcagctgtgatcgcttttggaagattgcacagtggtggtaattactttcaggtatctgatgatgtgatgtctcactgtaaaattataagcgtcggcaaccgctcgttcagtttggctgtggatgagcagtaaaaatcacattttctgttggtgtttgattgctcgctttgaacctgaggacgatatgcattgcttgctcagttcaagcaccagccaattctcaccatctccagtctcctccctcgtgctgtctcccactaactgatgacatacacagagagaaaaagatagaaaagatgcatatggcaacgacgaccactgtacgaagtgtttgtgattcgttcgatatcgatcgatcgtcattgcaattttgcagagacatgatctcactcgatcatttcatctcggcgtgaggtgaggggggagaacaaaagggagatcttgaggccagcaacactccgaggctggccctagcttagctcaaaactgagtgattcctggcctcaagttgtacacatggatgtacattctttttgtgtgcttttgttcagttcatgtgcagtacttgtgcatgtgaccaaccaacctgtcaagaacaaatgctctctgtagtatgttcgactcgaaagaatgatcagtttttgccacacgggtcacatcctttctttccatggaccatagcctcacatcttgagcttttactacattcaggcttcgaaaaattcagagtttcaggtctcagaattgcagctatgaaaaattcagacttcagggtttccctgctctctcattgggtctctactcatcagcaaatcacaaggcatatggatgcacaaacaacagatggttcagaaaaaaatactcaaagtttcaggttcttctacctaccctgctgctcaactactgccatgcatgcgttctttgcaagttgagccatgatccgatcaaaaatcctaaacgaaaagcatcagtagtgtcctagtcatggccgtgcttgtgcgtaacacagacacaacacaattccatgtgcttccaagtaccacaacaccatggccgctgctgctgcagcagcagctagccattggcatcatcatcagctagataattggcccctcccatgagcacaaattctctcttgcctttttttaaacacactttgtgactctctctctctctctctctcatgggcatcattggctcgaggaagattgatgatgacaattgacactaaacttttccctcatcatccactttatcgtcgacttttcggtggtcgctggtgatcagcatctcatgcacgccggagccagctctagattaatcgggccgatcgattcgtcactgtcatacatttgacaaatgctaaagcaacagttcgatcgatcggtcttttcttaattagtaattgtggcattctaaatttctaacaacgcctttcgatggatcgatgggtaatgcaaagaatgccaggtaactcatctttgatcgatcaatgcctaaagaactaggcaatcatacatttttttaataggatataatactttaccttttgtgtattgtttagtgtgatgatacgcaaccaagtgctagaaacactccattaaattataatctactgaatagttaattgactagagagttggtgagaaattattagttttgcggagacaaaaatattaggggtttaggaggacgaagacaagctgtcagatagatgttctcgcttgcagaggaagccaggtatggtccaaactctgcacattgccagcaaaacaaggatcatgtactgtagtctgtacaaaggatagatggattggttggcatggagcaatggagaataatgatcgataattgatgccgttgtccaatgtcacctatggaatctgacgaaaaaaaaacagcaggaaatcaaaaccggcctttctgaattaaattcagtacagtgtagtgttcttttctgaattctgaattcttgatgcctactagagtactgccaaggcatgcaatgcatgcaagcgagctgatcaaggagacaaactgaacaattaggtcacacgtatccgattgctctgggggccatgtcgtcacatcaccattaatccatattatcgtcgtcgtcgcctatgatcgccaggagaagacaagctaagctaaacctagacagacagacgccatgggggggccattgccatggacgagagacctcgagaatttaatttcttcctccatgatttgggccctgttcttttctccaacaaaagttggataaacttttggatactcgtggcatgcttttcaaactgctaaatgatgtgtttcgtacaaaaactttttatgtgaaagttgttctaaaatatcatattaatctattttttcaagtttgtaataattaaaactcaattaattacacgttattaccatctcatttcacgtgaaacacttaatctttatcttcatcatcataacatgcaaagtttcaaacactagcgcaggaaaggaagcaaagtaaaagctccaaacctgagcctcacgttgccgcacgggccactggagtgtgggcccgcatcccggtgtcccaggttctctctctggatcatcagagttgataggattgtgcttcttccatgcgcgcatgatggccggagttcgccagaagaagcggctgcggcggcgaggaaggaggtcggtcggccgcatcctcgccgcacgttctcgtctcggatttggggtcaggtcaccaacctcacctggagctggggacctgggggcaaggtgggggggcttgagcttttactgtacctgccatggccggggtcaatggagggaatgatgcaggtgtgggtgtggttgtggtgggcgccgccgttttcacatgccaacatccatgcattcatcgcttccaaactcccaggcaaaggccattaatggcggctcgcttctctacctttcttcatggctactactggtagtagtaggcagtattagtccctccatccaaaaaaaaaaaaagtaaatctagaactgaatatgatatattctagtgcaacgaatttatacagatatatgtctaaattcattatactaggatgtgtcacatccagtactatgttggttttctatgagacgaagggagtagctccttgtgaacagtctgtgaaatcaaagtgtagttttttattattaatttgcgatgaataattgacatgatatataattgattttaatatttagtgattattagtgaagtggtgatctccgtttggagcgggtcagactacataggttaggtcggttcaactggcgtcgtacgtatgtgcggtcaaaccggcaaaaccgacggtttgatcggctggatcctgattagggtcggttttcggattgtttattagtatactcgtgataatgagttctagatgatttcttcatgtgtgtaatattgttttgtgctaatgttgagtcaagttgagaaagaacttgtgctcggatatggtttcttgtttgattcatgtgtaggtgtgtcttgatgccttgggagagtgttgctggtgatggattgggaatcaacttgaaagaaggtgacgcccaaacaatcggaatatcctacgggatgcttaggctagaaaaacaatgcatgtagttgatggagattccatgcggcctacgattgaagattgtgtgtgtatgaaaagcggagtcaaattagggaagagtccaaatttgggaagattgaaattcgaattgtgataagataagtttgtttattgtaggggaagttttccaatggattaggacttcttgtacaagttagattcgtgactctaggctgcctacctcgggtatacttagagaggggttgagaccttttggtattaattttgtgggagttaagtttagagaaaagttaggatttcgagtttagtcgaattttgtaagaggagtgttattgttacactttgtaaacacgaataaaagtagtaaagttcaatctactttcaagatattttcgatttgtgttttcttgggtgcgatggtcacatcagcgggataccaccataccggtggtcagaccggcggtaccacgatggttggaccggatgcaatgacaagtgacgatgacatgaagggtggtcggaacagctaatcttcttcggtcagaccggcgacatctatgtgatcaaaccaatgatcaggcaacggtcaaacggatcttcatcgaatcttgagggtaacttttaattccgttaagagttttaggttttttgtgttactatcatttgccccttccccctctggtacgtttagttattgtttttcaatcctacccattcaatccccgacccttgcgatcggtggagggggatggtcatttgaagtagcaaatccgatttcctaacatcaagttacatggaaaaaaagagaaatttatgttgtacggagcggataatagctgaatgattttgtgatcaccattccaaggtatagtgaaattaattaagtattatcaagttaaaaatgaatttaaaacagttttttttaaaaagaaattcatatatagaaagtttttatggaaatcgtgccaggcatgtacaatggttgtcaatagtgatctcttagcgttgctaagtaggaatacttgttgacatggaggaaagagaaagaggagagacaaaacatcgttgttatgtatgacaacggcttaacaacgactcttagtcactataatatggaaaaatggttgcatgaggataaacatatggaaagaatattaacaaaaggaatattttttcagttaatgattagagcctttgtcgtctcaactattgtaaagacatggtctctaaataatcttgtattgtttaaaagaccatacccgtctctaccattgaacatgcccaaaagctcagaaagcgtgtctcattcatccatcctaatggaaagaacattccccgtaaattaaagtccagacattccgttcatgcacgactgcacgagaatttctaccaagtttgtctctctcttttttttcttttggaagctgtagctagtaaattaaccacttggcaattttttggtcaagaacgcacttgctgacatgcacaatacgcactgtcaatttctcactgcagcgggttggatggatgctgtcggctactctatcgatttggcaaatcaggaagagtgaatgacgagtggagtaaactgtaaaagccaatctgagctcaataatcttccctttccggcatatgcatgcacctgcattttcctctccatccaagagagaacaagtgctccacccctcactgattcgtgtagtgaatgccacaaaagagctaaaattaagctaatctagctacccaaccagcttcgaacatgtttaagaaacttaagattctgagaagcagattctgagaagcagctgattgatagtcggttttaagaatttgaaaaaggtgggttcttcagtttataaactgacttctagttcattttttttattctacaactatagtttcttagagtatggatcaaaaactaaactgtttagataagcttcttattctaagagaaactgtagcagtcagaagctccctaaacatactttcttcattggcgtaacggcaaacaagctgcacacggcgccaatgacggtgaatcgatcccttcttcttttttcttttttttttggcagcgacccgcgtgaattctcaggcaggcacacggtaactcgaggtatttgtcctcctcatattggctatcacctcaaaagtgttcataggttcaggtttcaggctgctcgcccaagaaacgaatcgtgtgtcaacatgatctttgattcttctctttctcttcttttagatcaccaaagcatatgattttgcaggccatatgtaaaaaagcgtacataaagcacggattatagtgccttagtgggacaaaattggtgctaggctctgtttaagtgagagggagactctaccggtgagattcggaaaaatctggtaatttcgatattttttttgtactatgaggattttgacttctaattcacttttttgattctatagtttctgatacaacctaaatgaaaaaatgaattgttttggaagctagttgaagaaactatggccgccagaaattccctcaaatatagaggtaattttaccatacttagaaggtatcaagagataacatattttctaatctaaaatttgatacctttagatattaagtattttaaggtattgaatattttaatgtaaaatttaggtatcttaagatatttttttatggattataaaaaatttctccaaacatagccttagccgggctaagtgctataggctatagctgcttgcttaattcttcggttgtaattttctagtactatgcaatgatgatcgatttgttttgggccaaattctgagcatattctttttgatagtgctgttattagcagctaaaccaataggttatgcacttatactgggctcaagggcaaaaggccttgccaaaggcacaaatctggccgtcactttacgcacttggatgattcttctcctgtaatccgaccttatcaatagcatctgcgattaatcagccattgaatgattaatggtacgaaaaaatgaggtttaattcgtttgactcgagcagacaaggacgcatgcggctgcctctgctagctgctgttctctgctcagactttcagagattcagctcagtttcagccattcgtctcgcgatgttctggcgatcgtttcgtggccatgagctaatcctaccagtactagcaattcactgttcagcaacaatcgatgcattgaattgtttctacatcagtagagtacagagtttctttcactagtggtgtaaatgtgtgtgatcacatcgattggatgagttcagagttccacatatcatactagatcatgacattgtgataccgtggtagcattaataccactagttgtcatgctcctacacaataattttgtatggaatgctgctcatcaacaaatcaggtaagacttaacaaggttattagcaccgacctgaacatgtgtggaaagatgcattataaatgatttgacccgaccaaattgattaagccacatgtccagttaagcaggagctagtatagcatgaattgattggtgcatatatatgcatgcagtcttggaactaagccaagcttgataaagatgggacaatcatagcaggatcaaagtggagaggagactgatcagctctcatggcaggtggtagtagtatgatatgagtaggacacaacatcactagccaaaatggtactactcagatatccacactgtagtagtggtgggagagagatattggagctagatagccccattcctcttttgccatgagttggagttgaaagttcactctgaaaaaacagattttcaaaatcttcagtactttggctgccctcctgtttgtgcttattctcattcgcgcgcttttcggtcccagaaattctacgataatttttcgttagtcttatacgttatagcccgattttttttacggtaaaaagtataaaatcatgtgtttcgaaggagacttggtctgtgtaacatgctgtgtatatggtagcatgttttgccactcggtagctctgaccatttgctggcacacatgacaagcatgcaatttttataccagttctaatgtttggtatattcggatttaccggagtcatatgtactcggttgttggtgcatgagtcctgtgtgtgtatcgaactctgcgtgagatcatctcttgtattgtttcgatcagatcgcacatgcatcccaatattttttggagaatgacgattaatcaaagcctaatgattcatgttgtcctagcttcatacaaatcgatactacatttaaaaaaacagtattattattgataagtcaataacggctggcagcattgcatagatatggtaaacaatgtgggtatcacatcatttaatggttttttcatggcaaatcagaagtcaaaagtcaaagagatattttggttggatataaaattcatgctaaaaatctgttcagcatttggacccataaattgattctttttttcaggaatttttgtgctgaaactgaatgtgcaaaccccactactgcatttgagggacaacatcatgtactactggtgctcacattgcaaaacccaaaaatacaccctcaaagtcatacaaaaattacaaaaaaaaaatacatttacaatatcatcttcacaatatatatcatccaaattgaaagatttaaacccaaataaagaagagcacactttgtcagaaatgtaccacaccaatgagtgcatgcatggtttctctctccccctcttcttttttcctctcctgagctagctattgggcagcctctccatgacagtttgtcctctttaactcatataaaatacttaattattagtactagttacttcacaaacttacaaaattacagctactgcttcttctgattaagctgatgcgatccccaagcctttttagtacttcgcgttgcattattcgggcggagcagttgggagatacctcgctagcagtggacgccattgacctcgatccatcgcctcatgtgcgcacactacgcctatatacagtcgcaccacacacagctacctccaccacccaaccccccaaacacctagctcactgcatcttcttcctcctcctcctgatcaaattaatcatcgtctcctccattgcattcttgcatccatccatctagctagttagtgttgttcttgttcgtgttcttgttcttgatgtgcattgatctttcttctctattgatctaattgttcttagattgagagtgaagttgtgagagagctggacaccatttctctcatcaatatcccttagccaaaccttgagaaaagcctgtgaagcatgtaagaacacaccagtttgttccatccaaacccaacccaaaaaagcaccaaaaaaaaggtcatcagttccaagtcccaaaagcattgttctttcataactaggcatctcggttaattagggtggatattcctccactaatcccttagcgaaaaatctacaaaaaccactagatcatgtaattttcggcgaaatcattccacccccagctgaagaaaaaaaaacaaaaaaaatataggccaagagaatcatattccagcatgcatcgttagctagtagccatcatctcagtcgcagtccggtagtaatactggacacaatcctcccattgctgtagcatttacctctgcaaaagccatcaaatcatgtaattagtagctaaaaacccatcctatttctacctcatcattcgcctgaaaagagaaaaaaacaagaacaaaaaaaaaaagaagttgcaagaagaggagagcaagaaagagttgatatattaatggagatggcggcgccgaacgggggcggcgcggcggggatgtcgtcgccggtgaacggggcgtcggcgccggcgacgccggggacgccggcgccgctgttcgcggggccgcgggtggactcgctgtcgtacgagcgcaagtcgatgccgcggtgcaagtgcctgccggcggcggtggcggaggcgtgggcgccgtcggcgcacggctgcgtcgtggagatcccggcgccggacgtctcgctcacccgcaaggtacgcgcccccatgcacatgacgcccccacgtggacacccaccgcttctttcaattccctcctctcactttgggtgttcttagttcacgtcaaaataatgtgatggaaacattgaaagtttatatgtgtagaaatgttttgatatgatgaaaaagttagaagtttaaagaaaaattttggagctaaactcggtcttcgtctcaaaataaatttaggcacctttctttcttctgttgcttcggttcgttttaaaataaatcaactttaagcaagaagtactctgtaaaataaaaagaaaaaactagtatcaggtttacaggtaggattgatttttttttctttttatggaggggatatacatgcaattatttgagttccatccatttttttttaccttttttaaagaaaatgtttggacactcttagctagctctcttctcccactcagctatgtgatttgattattcagtggattattgctgaggactattggtttgatttgtaggtatgaataaaatatttttgaaaataaatttaataaatagctccaaacaagagatataagcaatataatgaaaaaaagtttttcaacatgactaaaaaaatcgtattttttgagcgtcgagcaaataatctatcaataattgggtaaattaataagctggatataacatgactaacccttcatcttttaacctttttttgtatgtttttaaaatggttttttggggtgtttttgtactatggagttgaacgtgctggtactttttggtgtacttttactctgcttctgaaattgtgcgcgagatgtcgtagacgtagtcgtacgtacacaaccagcacggtataatgtcagagacatgtactgatgtacaaacatgcatccggtacaaaaatactctctggcatccatctgcttcagaaaaataaaaataaaaagtcagaggaactgatcgatcgtcctattcctagcaggaattttttttttcagtgcaataaatctggattttttttttacgagacaaagagagtatacacaacagacaatgaaacacatgatttttgtttgtcacgaagcttcagaaataaaaaagtcagaggaactgatcgatcgtcctattgctagttgctgaatagtactagtatttttttccgtaatatacacggtatattatacggccaagttgggtatgatccaatgtccttttggttagttttaaattactaggtgccatttctaaataagtgacgattaattagtctctaagaggaaaaaaattccgtatattccccctaaatattgaacagtttctccccttatatttctcttcttagaaagaaatcaaaaataaaaatggagggttgatatatagagtaccaacatgctcttctatttggccaaagtgctcattcagaaaaccatatatcatgcaaaatcattttttaaaaagagcaattctacggtccttgaggtaccaaaattttagtgtaaaatttaataactcatggtacctcatagtacctagttaccaagaggtaccaaatttacaatagaaaaaataataactcatggtacctctttaaggaccgtaaaattgctaaaaaacgttatataacggtggtataaagtttggatgttacatggggtacatgtactttttgaaacgaaatgtgttaacagtgacgtatggagacaaaagagcaacatcacactgacgcggtttcagtaggtgattaattaaggaagtgacagtggttagatctgtacttacacagtgctaacacactggaatcaggggtgccgtcagcagagctttgttggatccgaacctgcagactcaaaattttacacaggtccactctggcaatggtcctccgtgagaaattttaaaatattctgacgattcaagcaaccgcattgtattcagtgtgtttcaaacaaacctttaaaagtttcaaaattcagttcgaacgttgaaatcaaactcatgtgtggtgtgtgaagatattgccgtcatcaaacttacggagtcatcaattggcttttgcttatgcatattcgtagtttttattagcaaacaaataaaaatttgggagtaaaaattttaacatgttcttagtatttaaaagctagtgttgtaaaatgaattacgaatttcaaaattaagttttagaatttaaattttagcttataagtataagcataagtgaagaaaaccaataatgatgttataacgaagttaaaccaaattacaatgaaatacataccaaattaccgtggaactcttatcttcaaaacaatcccttaggacatcaccaatgtatatggcaaaagtggtctatatagatgggacccatataataaactttaactatagcaatcctcacaatgtatatagatacaatgtaatattaggagaagacagagaagtagagatagataatattatttatgttactagatggctgaatggaatagtttatttcctatagactactttttgtagtacattgtggatgtccttaatcgaaggtccatgtactccatttaactaatactatttatcttgccgtctacaaagaaaacacgcaatgctcatctttggaagctgaattttatattgtcaatgatcactgatgggatcaaacagtacagtactacctaaggcgattaggtcctagctagcctacatcatgtttgattaattttgtgagtataaaacctgcaaagatgctgaattttcttggccttgctcggcgtcagtcggcggcggcgcgcgtaatccggcggtttgtctgtcaagtccgcgtttactgttcacgccatccctgtgtgtcccataacccatcgcaatttcagaaatccagaactgatgattcgattaaaaatttggtcatgttgtactccatttggagtacttaccatttggaaaaagaaaattaaatactactcctatcaatggcactgttgaagtcgatgacaaaaatgcattttttaaaataaaaaaacgtgcgagcgagaaagtacaatgatttttggtgataaggttttttttggatgtgacatgagagggccgtgtccaaaattcagagttgactcaacgatcgcttcgagccatccatccgtgaggagagagtggttgctttgctatgtgcctgtcatgtctaatctgtccctggttttcgtttctttttctgggagggtaatcagttcatgatttgacataatcgccgcagaattattggttcatgattatttgcgaaaagcgcatggttttagtgtaaaatttcaacgggacattgctgtgtgattcttttggactaaaagcgggtaattttgttatcatgcacagaaacaaaactttataaacatatatgtcgtttcagcttttgattagtgcctgatgatcccacattcctactgttctttttgtcacgaccaaaatctcgctaaattcagaagtacgcaatcacaaacttttgtgtctgattacacctttttgcagtttagcattgccacataatcaatcagacgcacttgaaagtatccatagacttttggatggacttttgaaagtacttctgaaactgaaatgtccagctcaatttgcttgattgatcaatcaaacagtaaattaatcatcaaagagagagtgtcttaaattgattgcaaatttacacgattcatatacagttacagttatggtgtgtttagtttttaggtgtaaaatttttgaagtatacggacacacatttgaagtattaaacttagattaattacatattccgcttgtaaactgcgagacgaatttattaagcctaattaattcattattagcaaatgtttactgtagcatcacatagtcaaatcatggcgtaattaagtttaaaagattcgtctcataatacatacaaactatgcaattggtttttttcccatatttaatgctccatgtatgtgtctaaatatttgatgtgatgtttttggccaaaatttttttagatctaaacaaggttttaactctattatgaattcactttttttttaaaagagagctccactatgaattcatgaactcgtaaattatagtaatctgtatgagtgtgttaattaagctgggagattaacgctgaacaaataattaaactgcggtgcagcttggagcggagttcgtggggacgttcatcctcatcttcttcgcgacggcggcgccgatcgtgaaccagaagtacggcggcgcgatctcgccgttcgggaacgcggcgtgcgcggggctcgccgtgacgaccatcatcctgtcgacggggcacatctccggcgcccacctcaacccgtcgctcaccatcgccttcgccgcgctccgccacttcccgtggctgcaggtcccggcgtacgtcgccgtccaggtgctcggctccatctgcgccggcttcgccctcaagggcgtcttccaccccttcctctccggcggcgtcaccgtccccgaccccaccatctccaccgcccaggccttcttcaccgagttcatcatcaccttcaacctcctcttcgtcgtcaccgccgtcgccaccgacacccgcgccgtcggcgagctcgccggcatcgccgtcggcgccgccgtcaccctcaacatcctcatcgccgggtacgtataatcctcttcctcctccttgtagccaggttttaatctttcagtttgaatgtttctatcggaacgtgtcgatataccgaaatttggatcaaattttagtcaaattaagcaaattattaccaaaataaaaaaaattggccgaaataatcacataggggatccaaaataaccaaaattttggaaatttcatttcagaatttttgaaccctgctcgtagcacgttactgcctctgtgttatattgcaagtttattaaatttatataagaatatagtaacatttctaacataaataaacatattaaaagttagttttattaaaaactattttctataaatttggaaaaggaaattttgaaaaaaaaataaaacgacctataatatgaaacaatgagcactaaaaatggatggatttccaaaaaaaaaagaaaatttgaaccatgccacacaaattttataaattttgtaaaatttgtgatatgacaccctgacccacatgacattaacttatgtggttcctacgtgtcattgagatacgggtggcatattttaaattttacaaaattagggtgtcatggttccaacaaacaaaaaaaaaatggatggatttgatctccggctaaccggcggcgtgggtgcggtgcaggccgacgacaggagggtcgatgaacccggtgaggacgctggggccggcggtggcggcgggcaactaccggcagctgtggatatacctgatcgcgccgacgctgggcgcggtcgccggcgccggcgtgtacacggcggtgaagctccgcgacgagaacggcgagaccccgcgcccccagcgcagcttccgccgctgatccaaatcatatccaaatccatatccataaaaacaaattattatacacgacgtagttaacctgaacaaattatatggcttccaattaaaaaaaaatcagtcgtgtcatccttgggccttgttccacatgggccgaacaccaagagaaatccgcgtgaatatgggccgtgattttggttgaaaattttcggtccattcacgtagatgggccgggtttgaggccttttcaaatgagaccttgggggcgtgtaataaaccccgttttgcttcgtccagaacggcagagtataatagttcgagttgtgtgtgatgtgtcagaactcagaataaaaatgcacgccgatgcaccggggtgatgggcatcttgctgtgcgaatggtgtaaggttttatttaatttcctatttgacaaattgtgtaattttccctgttccgacattgataattgagaaaaattgtcccaaaaactgcgtagccaactgtcagtgagacgttaacaaaatgatgatgggatctctgcaatgtatactgagcaaaattgtgcttagactatgtgtgatgaaaatatgtcccctctgctgtaaatccatgcaagatttgtgccagtatataccactcaaaacgatcttagtaatctgaattttcgggatttctcctctctctttttttaattattcctctagatgtcatgcttggattggaatttcagtacggcgctttatttaccatacccaagtggttttgttcacatttttccattacgtttcggtaagtgaaatagctaaaacaggtgataatatgggggtcggccccctgactcccctgcccaacaacatcgacaaattagtaatccaatttagatgggtcgtattagtaatctaaatttctgaactttttcatatatgtacaaccacataaatttgtgttggtttcgaatttcaatgcagtgttttcatagtgaaacagccaaacatgtgaaaatatgggggtcggagtccaattctccaaaccccacaaactctcctgctcaacaacaccaacaaattagtaatccaatttggatgggtcgtattagtaatctgaatttctaaactttttcgtatatgttttttttttttgagaaaaggcccaaacaacattaacgaatccaagtccaatttagatgggctgtattagtaatatgaatttatgaatcttctagtttatttaaaaccacataaagttgtgtttggctttgatttcaatacggtgtttccaaggttaatcaaccaagcaagtgaaaatacgaattaattttgaaagtatattgtgttttttcttttctcaaaaatattgatgtagttttatcgacacaaatatacagttggtattgcggtcccgcgcgagactgctcggtgtcagtcttgcatgaccaacaagcgagaccagccagcatgctgttcttggacgctaatcaatgattaattaatcactaatcatttcatttccaacactctcgcaggctgataatgcgagactgctcggtttcgcaccctctccgcgcaagaccaacaccacgtggtctcgtgtcctcaccgtgcgagaccacccacgtcgtcactccaccatcactttcagcgatatcgaagatatatttgtgacaaaaaaaccgcatcaagaatatttcagagagaaaaaagaacgaagaatatattttcaaatttaattcgtgaaaatacaggggctcggagtctaattcaaagtactcaacgacctcccaaattaggagtccaaatccatttaaatgggtcgtaatggctacccggcatctctgcctgtgtattctgggctttccagcactggttttgcgttgtagtgggccgtccttgctgacaaatggatggtgacaaatccaatggaactgatgaaatgctttactcgtcgctaatgaaattccattcaacatctactcgaatagggaaaagtctattttacacccttgaactcttatgcgtgtctaaaatacacctccgaactacaaaaccgggtataatacaccctcgaactgtcaataccggacacttaacccccccccccgggctgtttttaccgtggtttttgccacgtcagccctcaccatgtcaacacacaaggtaatatgggccaagcccatactctgttcattcttctctccctcccctgttcgttcctcttcctcacgtccgctagcggcagcagcgcggagctgctgcgagggcggtgacggctgtgaggacggagctgcggcggcggctccccgttccacacgtggccactaccagctcgcgaccggctacggtgttgagtctcctccgcgcgaggggccagtgcgggtccctcctccacccgcgccgcctttgcttctctattgcgccagtagcagccgcaaagcccgaggccgtcggtaagcctccaggccccgctcctccttcccctcgcgtgcatggtgctgaaccgttgatatgtgcgatgatatttgtagggacgaccggggaggcagctgcggcgccggtggaagagctcgcgaaatctctgcagggggtgcagggggtggaggtgttcgatctgagaggaaaggcggtgcccgctgttgatctgtggaaggacaggaattttttatcgtgctttgtaagattgattgtgtttgagacgattgatgatggttgtttgcatgtgtgtgctgtgccataagagggccgatcttcttgtggctaagcaggatagtttagtggccgattcctctctgcaaatttcgaggaacaaaggaatacatcaaatgcttaaagtgatgcattcttctactctcttttttttttcaatctatcaggttccatttacaaaaacataaaatgttttcatattcaaccttcgcagcaccgccgccctcgcaacagctccgcaccgccgccgcagccatcgccggcctcgcagatccgtgccgctgccgccagtggtcgtgaggaagagaagaacgaacagggagggagagaagaacgaacagagtatgggcttggcccatattaccttgtgtcctgacgtggcgagggctgacgtggcaaaaaccacggtaaaaacagcccggggggttaagtgtccgatattgacaattcaagagtgtattatacccggttttgtagttcgggggtgtattttaaacaagcataagagttcgagggtgtaaaatggacttttcccactcgaataaataataagttttcagttttgctcttcagatctacaaacctaaactttttatgcgtttctggaaaattagattgttcatgcacaaaatgtttcacggccactttagctatggaaacgttgtattacaagcagaagttcttttttaaggcccgtttattcgtataaatatttagaagcaaagtacatgggtgagagatttcactccctagatggtgggtacatttcactccttcataattcaccagccataggctgtaaacgtgtgcttcgatcaggatctcatctaaaactctgctgtaaacgaggttggaagccttaaaagagaaaaataccacctatatatgtaataagaaaaccccactctcaaaatttttgaaccgtgcacgaagcaacctatcattttactccacttctcccatatgcatgtgagcgagcgcaaggtcgcttggttgcctcctccactgcctggccttgcccgcatcaaaagacatcaccaatgaggcccactcaatcaacctcttccctcctcctcctccccaagctaaaggcggcgagtgtcccaccccaccatcttcccatattgttggagaaacacagccaccgtccttatattataactagtcaattgcaatccctactgttaccgttacatcattagctcaccgccggttaccaaccccacagcttcgaaggtggcgccgcccgcccgttctaacgcctcccatgaccaactggccaaccctcctctccgcaccctcccactccgctaccgatcgccatggtcatcaaagctaaaggaaaagggtcatcagcgctggaggagaggacgtaggctcatcagagcactaatagtgaaacagatcttgaagttgaaagtctgtaaattttttggctcaaaatgtatgtcagatgtgatttagcaattaaaaaaaaaggtctcatccagttccgtgaacgttcagaaaacgttttcaccacgagaaccagtttgggagcgacgtatatattcctcattcgcgagtcgcaacagcgcgattgttgggcgctgcacgcaaagaccaaaagcgggcagtatacacgcacggtccaggctagttctacatctactaccgttccatcgccttcgccaccgaacgatccgtggacgcgagcgtgatcaggtggccgagaccacgtgctcctcctcctcctccatctcgtgtattgtggctctcgtgcagcgcgcgccccgaacagtagaaaggggcggatcgatcgactcaccagctgccccagctgggcctgatccctcttcgtccactcgttgctgtcatcgcgttgtgccttgacatcgtcaccatcctcctaacttggggattccgatctgcaccggccgcccggcatttggtgctgtcccgtctttcaggacggatcacaaatgcgatatggtttactgtacggtttactgtgacctctgttttgtgtactagtttcccttttttttcaaagactatgcacgtgaagtgtaaccggttgatggatgctgtcaaatgtttccttaaaaacatcaaaatgtctcggaacgtatntcttaaaaaaaaaaagatatttncccatatgtatggttcttttttttttggggtggtactaaacggctataaaagaactctacttgtgatgacaatggaagatcccgtagatctctanaacctgctattattaacaattgttgtgaactttgctagcagtgttaaagacttttaattatttgtccatatagatattattcatatgttacttagcccactgggttacccatacacgcgggacatgggtatatgtattggtttctgcccgctagtgttttggggcatcaaggatgttgttaccgtccccgtcacggccaagggccgcgtcagccactttgtcgaggcccagatccccaaggatctgccatcggtgaggctcgacaagtagtgacgacttccgcaaactcaggagcgacgaatcttgggagttgcttgccctaccaccaccgcaccatgctaagtcgccaagatagaagttgatcgaggtgggagaggacgggaccaatgatgagcttgacgattgtgagctaatgcaggcgagctcttttattgttggtctttgacccatcttcttcacctttttccgtgaatttgttttttttaacgaaccggtaagctgccaattttattaaatagataattttctgtgaatttgtggtggaaatgtgtgttgctatggaacattgtgatagagacatgtaatttttgtgtgttgtttgatctgatttacagtgtgtgtccaagttcaaacccttgattatttttttttggacgaagggagtatttgatatgttccacagacaactactaagttataaggtggtggctcaactgcttatataaaccgaggttgtgtttagttcgtgtgccaaatttattttttaagtatacggatatacatttgaattattaaacatagactaataacaaaacaaattatagattccgcctgtaaactgcgagacaaatctattaagcccaattaatccatcattagcaaatatttaatgcagcagcacattatcaaatcatggcgtaattaggtttaaaagattcatctcgcgatttacatgtaaactgtgccattggttttttttctccacatctaatgcactatgcatgtgtccaaatatttgatgtgacggaaaaattgaaagtttgaagaaaaaattttgaatctaaacacggtccgaatttagcagcatgtgaaaatcactttcgtagcattgacacgtccaacaggcaacacagagttgcatgggaaaaagagtttgtgttttctggtttatagatttgtctatttacatattgtgaatgaatgaatgaacaaggagggaatacaaatatgcagagtaaatgtgcagtacccggtgaccgaaatgttacagcaaatttactcatcaccaataaacattgtagtacttgcaagcagtgaatgattttttttttcttggaaaggcagtaattaaggtagtagtattgcattgtatgcctcgacaatgtacatcgagccctgtggtcccactgggccagtggcccatgctcgaggcttaactccatgttaccttcgggcccaccgtgtaccgtgcgctgcactctaaatttcccctgttttcttctcgtcagtgaaagcgattgtagcctgctactactgcagctagtccagtactcctactagtactatgcaaacaagaacaaaataaggattttattacaaatggagaagtgttaattactctaagataatgtaaactttttactacagtccatgtcacaagatatggacttttgttagccagagctaacctttgtttaatctccaagttttccagagggtgacacacacttgggtcactgattctctgcatattttatgccatgatgggcacatgcggcttgcaagcctacatactactaccctacaaacaaacatgcctcaatccatggaatggaatttgcagtgtgtgtatgtgcagagaaaagaaaaaaaatgtgcatgcttgatgcttccatggttaaataatttcattaatcttgctcatcgagtcattgtttgattacttgtttactcaattgtttaggtggtgtaagtttagaatttggatgctagtaagaccaggttggcagcgagcttagaaggtccatatgattggtgctgcgtagttgtcttctcttggtctacttcacagtttaatatactgcctaattggttaccaaacaagttagtagtaaatttattgtgctactggggactacttaaattgcggtgatgcagatggctggttaaagaaggaactccccatcaggtggattagtgaaactgcaacattttttggatgattttgcagagcttgaccaagccagtgatccctaccatgtactcccatgtgtacatgattcatcagtattttctgttctgctaattaacatcaagacacatacacaaagtgatcagctttccatgtctgcatgctgtcctgtactcctgtacagatgttctagagttcagagttctccatgtggggtggaaacccaataggatccaatgcattatatggtgcatttttgctcactctgtccccccatggcaacaattcactgcaacacttcacagttcacacgcacacaatcacacagaatgtgagatgatgataatagaggcacatatgacaaatcttgattggcaaattggcatcatggcgtgttgcatgcccacatataatcaggtactgtcactatgtgcattgcaatgtagtgttcttggcattatggccagggacagaaaggctgggggagtcttggcgttgggatgactcgccaacaaccatgttctctgcactgtcctgatgccgattgctgatatctccatcccacatgtatgcttgcactggaatccactccaaaatgttacagatggtttggtagaaaatacattgccctttttgtttttggcaatatcattgtgatttgggggatctttcagatgatgtgttcatggtttgttctgttgttttgtgccgttttggggtcaattcagagttcagacacctgaaactgtgctactgtagaattcacggatacatcttgatctgaagaattgtttcatttttacatcgattttaaatctgaaaagttggtttaagttctcgactggccaatttaaaacattcatgacagtgatctgtgtagtactagtacaatgtgttgggccattctttttgggtacgtcacctacccctgcagggtcatgctcttcctgtggagacaaaagcacataaattgtgtactcactatatcatgcgaattaatatgacctttaggtcagggaattaaaagtatggtggacaagtgtttatttcactccgatgcttatgaactaataacataaaagcattttcacaacatatggcaagagggtaactgaaggccaaacatttggagctgacccttcacagtttttttttttaaaaaaaaacagtttggatgatgcgctagattcacgtaataaacaaaaaaacaatcttaaggtatgggtataaactatgttataaacttcaaaattgaggactccatgggaatgcgaatctcacaggaactagttaaattcctatgaaaatcaggctatgacttgtacaagctacaactcttttttttaaaaaaaaatgcagtacaaacgtgagcgtttactcacattatgaacacaccctacccttataagcacatttaaaaaactagcccaacatattttgagattaacgaagtcatcacagacaatttgctatttacgagtaccactgaatgaataattagtataaatgcgagcacctatatcaaatttagagcttaaccaactctttttataggcacttcaagggtttttgtctcgctttgaaatcttcatatgatatgatttaattctttggttgtgtacatttgttatgtgggggttattatcttcttcatctaaaaccttcccctcatcttgccatattatgagatccaacaaataagtactccctccgtattttaatgtatgacgccgttgactttttaacaaacgtttgacctttcgtcttattcaaaaaaattatgtaattataatttattttattgtgacttgatttattatcgaatgttatttaagcatgacataagtatttttgtatttgcataaaaaaattgaataagacgaatggtcaaacgttggttaaaaagttaacggcgtcatatattaaaataatatggagggagtattttgttactcgttagtaagggcagtcccaacccataacaatagacatggtttccataaactccacatcatcaagaaactagtactagacactactcttccaatgcaaacaccactattccatacttcaatttaatgctacttctttcacatgatgtcttggatgttgtgtaaaaaccatgtctcatacaagacatgatttttttt

SEQ ID NO: 12081 - DNA, 5354 bp, Oryza sativa
attgtcttgtgagttcctcactgactgcagtatgaaggtcattgaaggcctgagaccaaccaaatttttcagggacatgcaactccaccagtggcttggggctgccagacagtacagctacaaaaatactgcatacgaacaccgtcacagactcgattccatataacgctctcatgagcactttccctttcgcggagttcttgaccttcatcagagaaaggttcccagcaagctcctgcaaggtcgccgagcagctaacaagccttgcacatcttacgcccaccagctccatccactccctaagtgatggctcagctctcttgagttgctcctgcgacggcacgccactctccgagcccaacacatgcagggcatactgcaacagcaattgcccttgatccagacgagagagctccgagctcagcgcgatgcaaatatccagcagcttcacgctgctgttgagataaatgtccacccatttgtcatcccagtccgagacaggcagctcgagatcggttatcaggttagctatgttggtgtgcagctctgacaagcaatccactgcaagcctcatccatgacaaggtgaggacatccgaggcggcctccggcttgagcttcctcaagctcaatgccagggcatcctcgtacgaagcgagcaactcttggagcttccgagataggtgagctccccctggaaacataactcgaaagggattccccacagggaagaacgatctgggactaccgtgtgcgcgactcatctccactgaactgcaaccaaaggggaatcgaatcatccaattagcacttcgcaacacaaacatggatgaataaagcaacaaaccaatcggccgtacatacaacaccttttgtggatcaaatcaagcaaaagggatacctaacctcatggtgataatagtccacgattcataaaattcacagaatctcccttttccccgattcgtctggcagataagctcccactaaacatacaaaccctagcgatgctccgcctcaattcactgcgccgaactaacattacactcttgcaacacaacatgaaattttttgcagtagcatatctgtatcatccatggcgaccaaaccctaaatcgagctagacaagtaaaaaatcaagcaggggaatcacagccacaaattcccaacaacaaaccaccatacctccaaatcatcaaatccacgaaccgataagaacacacaactaagctacgtccgcacaagttgacctcagatccaccaaaccacccagaaaaaaaaaaaacttgcgccaaaatactctcaacccaaataacaaccacacagggatgagaagaggaatccactcacctagatcggcggatccgcgcgcgggggtgctcaaatcgagctcgattactcgtcaatcgtcgcgtcttcttcctctcttcttcttcttcggtgcgagactgagtcgaaggggagaggagaaaaaaaggggaaagaagaaaattatttgggagaggtggaaagttcgagacgcggaatgatacgttattacgttggggttgggggttgggccgcgcggcccgttaggcccggatttctttttagttttattgtgattattatttctcggtttggatttttttgggggggagtgggagccaacgggcaaacagctggcaggctgatagccatttgtcggcgtggttaagttaatgcgatttttgtttgtttcgatcgatgtcgttatatattttttttccgggatttgttcgtgtgtgtccaactgtatggtgcgatgatgcgaatgcttatcttaattccggaattccctcaagcaagatactgtatcattaagaaaaagtggagtaccgaatagtttccgttaaattgttttgcaatgcatccagccatatggagtatataaaatacggtcctgctttgtatccctcaatcgtgatatctgatatcacgtcctttcaattattaaaaccaatataaattgactcttttagtgctattaacggtgcttttcactgacgtggcttattaacctaatacaaccagctaattgttagctactcctacaaagacacaagaacagttggacacgagtggatacgagaacacgatagataggtttcctctcgatccgacaggatcaagccgccgccgccttcgcctccgccgtgttctcagttcatacctttcgccatcgttctcctctgtttaatacaatctcccacaacccgtgacagctgtcacagcacacgcaactcacacacgccatcgcacaggatggattactcacttggcccacatcggcccattaacacgaacactgggtcgtttagcacgcaggccgcgccccaggtcctttcctgattcacctccctgctgtagctcgtcatcttctttgtcaactcccagtgcaactgcagacttgtcagaccttcccgatgtagttatgccgcttggttgggatggtctgacaatcccccagtcttgaaaactggcttgtccccaagccagtgcacgcggaaaccgcgcgaacagatcctccatgtcctcccaagtagactctgacggcgaggaatgataccaatgggttagtaactgaagaacggaacgattacctttctttaccaggcgtttgtccaggaactggaatggaacttggagagctcccaaagaagttggtagctcatcttgcacctttttagaaaaccccacagctgcttttaattgcgaaacatggaagactggatgaatggagctagtagcaggaagctggatatgataagcaacagtaccaactctgctcatcacctggaatgggccatagtagcggaaagccaacttgtgacaagcacgttgcgccacaaacgtttgaacataaggttgtaacttcaaatacacccagtctcctactgcaaactgtctgaaactgcgctttttatctgcctggtgcttcatttgctgctgagcacggttcaggtgttgttgcaagagctgctgcataaattttctctcagtgtgccactcatgtaagtcagcaatctgacagtcatccaaaccaatgccaaaatgggatggtgtatagccatagagtacttcaaaaggggttttgttcaaagtggaatggaaagatgtgttgtaccagaattatgcaagatacagccaggaagaccacttgtggggagcagcatgtacaaagcatctgagataaatctccaagcattggttcaccctttcagtttgcccgtcagattgggggtggtaagcagagctcatgtgcaaatcagtgccaaacttagagaagagttgatcccaaaattgactggtaaagattttgtcgcgatcagaaataatggcacgaggcaacccatgtaacttataaatatttttcatgaactcttgagccacccctccagcattaaaaggatgggataaaggaatgaaatggctgtatttggaaaacttatcgaccacaactaaaatgcaattgtaatgagaggagcgaggtaacccttcgatgaaatccagtgatattgtctgccacgctcctgcgggaactggcaagggctgaaggagacctggataccgagctcggtcaggcttggcttgcaagcagacttgacacgattgtaattgttctttgatcaacttcttcatgcctggccatgcaaacaaacttttcaccttgcggtatgtcactgggaaacctgagtggccaccaaggggtgtcgcatgcagctcattcactaatttgtgttgcagggctgtattgttgcccacccagatcttgcccttgtatttcagaattccctggcacagttgataatccttccggctgttgggactgatagctagttcagccagtagctgtttagattgaccatccagctgatacccttgcattagttcttgcatccacgatggaatacattcagatatagcagcaacttcactgattggtgattcccttctagatagagcatcagcagcagcattagaaactccctttctatagcagatcttgtattgcagccctagcagcttggtgaaagctttctgctgccaaggtgtatgtaatctttgctctgtaaggtgcattaagctgtggtgatcagtgaggataataaactctccttgttgcaagtatggtctccaatgttcaactgcaaggataatagccatgtactctttttcataagtagacagtcctcttgtttttgggcccaaagctctgctgagataagctataggatgtttttcttgagatagaacagcccctatgcccacatcacttgcatctgtttcaatagtgaagtgcttggagaaatctggcagtgctaaaacaggtgctgccactagagcctgttttagctgctgaaaagctgattcaatttcaggagtccacttgaagggtattcctttctttaacaactgtgtcagaggtttgctaatcagtccaaaatgtctgacaaacttcctgtaatatcctgccaaacccaagaatcctctcagcttcttgattgtggtaggttgtggccaactcaccacatcctgtatttttgctggatcagtagccactccagcggccccaattacatggcccaagtaagagatctcttgttgagcaaaggagcacttgctcaatttcaccttccactggtgggcagataagagctggagcactgttctgacatgttggaggtgcagttccagtgtgggactataaatcaaaatgtcatcaaagaatactaaggcaaattttctcaatactggagacagggtttcattcatagcactaaggaaagtggcaggggccccagttaatccaaaggacatgaccttgtactcatagtgtcctgagtgtgtttggaaggcagttttgtattcatcaccttctgccatacgaatttggtggtatccagccctgagatctaattttgagaaccatttggatcctgctagctcgtccaacaattcgtctatgactgggacaggatacttactcttgacagttacatcgttcagttgcctgtaatcaatacagagacgccatgttccatctttctttttgaccaatagtgcaggtgatgaaaatgggctactacttggttgtatcacccccgacctgagcatttctgctacttgccgctcaatctcatccttgagggctggtttgtatcgataaggtctcagattgacaggcttagccccttccaccagtggaatgtgatggtcacaattcctcttaggaggtaattcagttggctcagaaaaaatttcctgaaattcatttaatatgggctgaactatctcaggcactgtggttgcagtaagagtttcagcaacattgag

SEQ ID NO: 12082 - DNA, 13519 bp, Oryza sativa
aatggtccgaaaattggcaaattggcgtcgaatggtctgcaaaattggctcctcacccttgcgcagatgcagcctccttttgcagttttgttttgctgcaaattcggattcgtttttgttttggaaacgttccgaaaaatccggtgcgtgcaaacggcgtggagtccggataagttacgcgcgacttatccggttcggttacgcgcagtagagatcgtgcgggcgccctgatcaagcgacccttctctatataaaccgacccgccgtcttcacgcaggatatgcgaaaatcaatctagggtttgcctcctactctgtactgcgccgtcgctcgtagactaatccatcccgctcgccggcatgcaccagcgatcgggagagcaggtcttcggaacctctgcctttgacgtcctgcaccgggagaaggcggcaataaggtttttgggaagcgcttcgcgcgactgctccctgttcgttcgcgacggctcgccttcctcttcgctcgcgtgtttcgtgccttcgtagacacctgcgaaaagtttcgaccaagcagccggtcttttcgtcacctcggtatgtgttcaatatgttgcgcatatttaatctgttcatgttattctgcgtagtttacatgtgtagatctaatgatgcgttcatactagttttcatctgtaatatcatgatttatttatggaataaattaaatcattatatgcccataatctcaacacttttcgtgccgttcactgtgggagatatgatgatctatgcatgatacgatggggatcgaagacgttatcattcttaatatgctaatgtatttagggtcttaaaatggcattatcgtttaggcttactgtatcttaatttgaacgttgaatcttagagagggacatcctgttaaattttgaacgggaaagagtacgtgcaatgcgtggtgcatgtgagcaaatcatttatagtttagcgagtcgtagctctagcaatatgtagtaataattaataatgtccgtgaaataaccatcgtcagtttttgctatttttctgtctttccaggaaaccggtaagattttcttgtccttctgaaagcagttcatgattttttttttcatcgcaacgtgacatttgtagatagagcaatcgaaacagtagcagacaagctcacaagtcacaaggcagagggatcttgacaaagccgtcgtccatatcgagcttttgagcaagccacctgtactatccgcgtatatgcactcttgtctaaaaaacccactccttgatatgactctgggcaccagattcatacacaggagaaatgaggttttctatactgtgcttttggatggaatcaaatttggtgtatgattcaatggctcggattaattcactactgcttcctccatgtcatattataagactttctagcattgctaatatttatatagatatcaataaatttagacatatatagaaattttgaatgacaatgctagaaaatcttataatatgaaacggatggaatccgtattttctatttaaatatataagtatgtttattttatttggtcacttttataaaacttagactatgaatatatttcaaaatattcagtttgagaatatgtaaatcttatgggtcgttgtatttgttagatattatcggtatattttgatagaaaataatggtcaaagtaacatattaaaacccgaataaaggtactaccgtagtaacgatcggttgagacaaaaattaaccaaaacaataacatgttttctaaagaaatacttagttcatcgaaagccaaacaacttgctttcatgagaatgacggtgagcatgggccacggaatggaaccaagcgcatgcccaaaccactcctaacagaagtttcattctcattgaatagagtgttatgtcaatatttttatgatgtgacaaggaattaataaagagagatggacggatttcatttaggtgaaatcatgtatgcattatttccaatataacttgtgtttgcatgtacggtctacgaagaggttttttactctctttgaggttgtgcagtatcaaatcctgactgttgatctggcatcattcaacggttataaatcgtccgtacctcatcgtactgcaccttctcattaaagcggtaccgtgggtggaaggatatttctgtactttcgcgtgggcatctctttctttcgcgttcgcttccttcccttttcacgagaggaaaacattgctggggaagagcagcgagagatggcggcaagaggcaggggcagcgagagattgcaggacggcgaggacctcgatgtgcgacggcagcggcgcggcgggctcgacgggcgacggcctcgatgtgcgacggcggcggcgcggcggcctggatgcgcctcgatgtgcgacggcagcggcatggcggcctcgatgcgcgacggcagcggcagcggcggcctctcttttcctcctttctgctatgaattttgttgacggcggtggcaacgacggcctgtctcttcctcctttctgctgtgaattttgttgttggatttgctgaaccaaatgtaaatggctaaatggttgattaccagcttactcttgaattgcaagtttcgtattgatgaataaaaaaacaaggttcagaaattggatctgctgtaaataatatcgattcatgagaaagtctcgtgtactttgagttacgcattgtttttcctcctaaatccttcctctacagattaaagttgcaaactcaaattgagcatctcctcctggtatttctctgttcagattaaagcagcaaactcaaattggttgcctccgagcaaggcaggctcgatgcacgacggtagcggcgcgacggcctcgatgcacggcagcggcgtgacggcctcgatgcgcgacagcagcggcaagctcgatgcgcgacggcggcggcgcgggaggctcgatgcacaacggcggcaacagcctcgatgcgcgacggccttgatgagcgacggcggctcgacagcctcgatgtgacggcggcagatggaagagagagacctcatttttgttagcctgatcatacccagctaaaccaacggttagattagattagattggtacctcgtgatatcttcttaaggatgggaaaaatgctcgtctacgaaacaaaaaaaacaaaagaatgtattctatgaactattttaaccatcaattaaatattttgttgtttctgtagcactattgttggaagcataaaaaagaaaccacccactaggtggatggcctaaccagaaattcagaacaacgaagtactctttcttttcaaattacttgccaatttagcttttttactaagttaaacgcttatgtctttgatcataaatatctaataagttatatgctttcattacataaatcataaatatttatgtttttatattatattacaataaaaatactttcataatatataattcgtatgttattaaactatataaatccccttcttccatatgtatacatgcatttcctagaaacaggccaagtttggattgggctatggaagccacggatgccatttgctggccctgtccttgggccaagtttgcgctgaggtttgcgttactaaacactaacgcattatggaagtccttacatgtgaactgatcagcagatgtgtagcaaatccttttattaaaaaattaaaaaaaataaaaccataagaatagcatgtatgtaccacaaattaatatctttttgaaacactcagcatagatagtgcgatatttctattgatatagcagaaaaaaaaatacaagtctatagtcctcataagctatagtcatagagaaaaaaaggacaaacaaaccattcgtctacgttttatcatgctaaaaaaacaaaacaaacacacaacatcctcacaaatagatcttctaaacgatgtctctaaatagaaaacgatgttaagattgttgtcgccgtccgtcctatagaacacgggttcgctcctggatcgtccgcgcggacgcggaggaatgacactggggctgttcggctgccatttttcctagccgcacggcaacacagctgtagccgcacaacgcaaggttgcagccatatgacagctgaacaagcccactctaagtactttaccacaaaattaatattgcacccttgctaatgtcacgtgcctttgctttaggaacaagattagcaattcgtcactgcatcacgttttttaggctgcgttagttacctcctgttccaacttccctctcttatttttacgcgcacgtcaaactgctaaatggtgtgttttttttttaaaaaaattctatacaaaagttgctttaaaaatcatattaatctatttttttaaaaaagatagcaaatacttaattaatcatccgctaatcgctactctgtttttcatatcaggctcccgaacgcagccttaattagtttcaccacaatagtcagtagaagtaaatattagcctcccctgtatgattgtgtgcaataaaacgagtagattgagaaaacaagaaaaatagttctaatttggtagcagctcaactactaactatttctggccgtcaaaccataccgaacatgtactgtactcctttctaatacgaatagattgagtatgttttttttttggatgacgcttaattaatgcttgtcattataactcctttataataaattgatgcaactcacatgaagacaaaaaaaacaaaggaaaaatgttgtcagttattcactagattaattaacgattaggactagctattatgcattttcattataactggaaatgtgtttgttggggaaggcttttgcattgtatagtcttgaagttgttgcatttcccgatcggttcactgtgcgtgactgattgcgtgcagtgcgcggctggggtgttgaaacaattaagcacaaatttggagatggcaatgaataagttgggttttgctcgccgatgggttaactggattatgaagtgtgttacctcggtgagatacatggtaaaattcaatggaaccctacttcaatcattcgctccaactagaggtttaaggcaaggagatcctctctcgcccttcctatttttgttcgtggcagatggactgtcattgctgctgaaggaaaaggtggcccagaattctttgaccccttttaaagtctgcagagctgcacctggaatttcccacttactctttgctgatgataccctcttattctttaaagcacaccaaagagaggcggaagtggtaaaagaagtgctctcatcctatgccatgggcactggacaattaattaacccagccaaatgttctatcctcatgggaggagcctcgaccccggctgtcagtgaggctatatcagaaattttacaagtggaaagagacaggtttgaagatagatatctggaatttcctaccccggagggacggatgcacaaaggacgttttcagagtctgcaagctaagatttggaaaagagtgatccaatggggtgagaaccatctctccacgggtggaaaagaagtgttgatcaaggctgtgattcaagccatcccagtatatgtgatggggatttttaaattacctgaatctgttattgatgatctaacgaaactaacaaagaacttttggtgggattccatgaacggccagagaaaaacgcattggaaagcctgggattcgttaacgaaaccaaaaagcttgggtggccttggtttcagagactattggcttttcaaccaggcacttctggcccggcaagcatggaggttgataacatacccagatagcctgtgtgctagagttcttaaagcaaaatatttcccccatggttccctgattgacacttcctttgggagtaactcgtccccagcatggagaagcattgagtatggcctagatttgttaaaaaagggcattatttggagagtgggtaatggaaattcaattcggatctggcgggatccatggctgccaagagatcactcaagaagaccaatcactgggaaagcaaactgcagactaaagtgggtgtctgacctaattacagaagatggatcctgggatgtgccgaaaatccatcagtatttccataatttggatgcagaggttatactgaacatctgcatttcttcaagatcggaggaagacttcattgcctggcaccctgataagaacggtatgttctcagttcgaagcgcttacagattggcagctcagttagtgaatatagaagaaagttctagctctgggacaaataatattaacaaagcatgggagatgatttggaaatgcaaggttcctcaaaaggtcaaaatctttgcttggagggtggcctccaactgcctggcgaccatggtaaataaaaagaagagaaaattggaacaatctgatatgtgccaaatctgcgacagggaaaatgaagacgatgctcatgctctctgcaggtgcattcaagctagccagctttggtcatgtatgcataaatcgggaagtgtttcagtagatataaaggcctctgttttaggaaggttttggctgtttgattgccttgaaaaaattccagaatatgaacaggccatgttcttgatgactctgtggcgcaactggtacgtgaggaatgagctaatacatggcaagtcagccccgccgacggagacgtcacagagatttatacagagctatgtcgatttactgttccagatccgacaagctcctcaggctgacctggtaaaaggaaagcatgtggtgaggactgtacctctgaaaggagggcctaaatatcgagtgcttaacaatcaccaaccatgctgggagagaccaaaagatggctggatgaaattaaatgtggatggatcctttgacgctagctccggtaaggggggtcttggaatgatcctcaggaatagcgctggtgatatcatcttcacttcttgcaaaccccttgaaagatgcaacaacccgctagaatcagagctgcgtgcctgtgttgaagggcttaagctggcgatccattggactttgcttccgattcaggtggaaacagattgtgcctcagtggtccagcttctgcagggtaccggtagagatttttctgttctagccaacatcattcatgaagcgaggcatctgctggtgggtgaaagggtgatttctattaagaaaatatgtcgtagccagaattgcattagccatcatcttgcaaatacggctagagctgattttcttgctggattttggttgggagagagttgtaatcttatctcacatttattaagcgagaactttatgagtgagtaatatatttctttccccccgcaaaaaaaaaattaagcacaaatttggctgctcaaccactcaatttccaacccacgcggatgccgcgttggccgccatcccttttaaacccattgacggatgtacactgatcaattaatcgatattatgccaaaaaatgatacaaatactccagttataaaataacaacggaatatgtataacccattctgaaaaaactctcaattataaacttgacctatgcaatcggaaataaaaggacgtgtttttaattcaactggttatctatgaagtgggtgcaacttaattggttttgactcctagagatgtaatatgtccactatgcactggtggagaaatgactttgctgggtcgacccaaaaccacaataatcccggttccaaaaagaaccagaattaagaatgatctttagtcccggttgaaaaccccagaggcattctaaccaagactaaaaatcatctttagtcctggttcatcccctatcaaattgatgtccgggggccgaggatctttagtccggttggtgttggttgggaactaaagatcggtttgatctttagtcccggttgggaacaccaaccggaactaaaattcgaagcgtagtatataatccctatcccttatcctctcctacacatatcgaatctctccccttctttcccttcctcctccgcttcctacatcctcatcccgatccatcccctccacctcctccccttcctcatccgatcccctcccctctcctccacctcctcctctcccctttcctgcccatcctccccttcctatccggcaaccggcggccggcggggccatgcccggtggcgggccggcggccgtggcaggcggcggcgggccggcggccatggcgggcggtagcaacggagttgttttctcttttttttaatttgtgattcacatgtataattttgtgatttattggatggatctgagatgacctgtgatgtatttgatctgtgtgtaattttttagaatttgtgatgtatttgatttatgtgtatatgtaactttatgatttgtgatgttactttatttgtgatgtgggtttgggatgttactttgatttggggatatgcttcccacttgatttgggagaaaataaaaaaaaagaaacggtaccatctggaactgccgtattctctctttactcccctaaaaagagggattttgtagcgcccgttccgccgtggcgcctagcgggaaattatctcttaaaaaccctaattgcgaaatttgtttcttcgcttgtcgtctagggtccatgccatctcaagatctcagtccccgatctatcgtcaagttcaaatccgaatccaaatctttccaaatcaaattcctccgcaaaagtctattttgcctcccttggggtcgatgggccgaatttctctcggcccatcttcccctctcccccggccctctcctctcccccggcgagctcccgctctccctctctctctctctctctctctcgccccctcccctcccccggcgcgctccctctccccctctcgctccgctccgctccgccccgcccgcgcgccgcgcgcgcgagtgcgcgagcgccgcgccgagcgccccctccctttcccctcgctctgcccgcgcgtgcgcaagcgccgcgccgagcgccccttcccctcgctctccttctcctctccctagcaagctccccgctcgcgaagacggcccccgcgcgcgtcgttcgcgcgcgcgcgccgcgtggttccccgcccgagccgcgtcgtctgcgccgtccacgtcgcccggccccgctgctctgccgcgcctgcagccgctcggccccgcgagccagcgcgcgtgcccagccgcgccgcccgttgtttcccgcgcgcgcgtgctgagtggccgaccgcctggtcgccgccgccgtcaccctctgccgcgccagcccgcgcctgtcgcccgtgtcgtcgcgccgctccaaaccgccccgccgtcatcgccgtcgtcatcgcctcggccccgccactcccgcgctagcctccaagggacggaggcagagcctccctcctccctctgccgcgacgcccccgctccctcctccttttcccgaagaggcaaggggacaagcccccttttctctccctcttttcccccttttccctcccgccggcgtcatcctcctccctcctccctgtcgccgctttggccgcgaccgccgagcgctagccctctcctttgaccgccctaagtcggttcccaaaccgacattgccatcctataaacccgagctcccccctttttcctttcctctcccattcacctccgcgccattgccgcccctctgtttcgccgtcgccgttcgtgtcggaagagccgacacgagcaaggacgcggaaggggacttcggccgcgccctctccttcctcttccccggcccgaggccggagagattactcccgcgccgtcggcctctcgtcacagcgccccgacccgcacggtagtgcctctctccattcttcctcctcgctccatctcccccccttagttttcggtggtagcacgagtagcctccccgtagctagccggcgccgccccgaccgttgccgtcgctcgccgtgtgctcgccgccgtcgccgctcgagctccgtagcacccgctcgtcgccagcctcgctcggcgtagctccgcccaatccgacgctaacatcggattcccgtagccgcgtagatgctctcaccgtcgggaatcggcccctcgtgacctcgtcgccgtttccctcttccctccccgccggttgccgccgccgcgattcgccgctgtcaagcttcctccggcgaatccgagccgttggctcgtctcccctcgtctcgtgcaaccacccggtgtgctcgttttcgccggtatcgccgtggttcgctccgccgctcgccgctgttgtccgccgtccgttctggccggcgtcgtcgtctacctcctgccagcccacgtggcagccacgtaggcgccacgtcggcgccagctcagccgaggtcgggacgggccgaccccggtcagcccctcccgtgcgcgcgttccaccgcgagccgtgaggctgcgcgtgggcccaccgcatccgttcctccgcagaccgtgcgcgtgcaccgcgtccctcccccgcccgcgcgcgtgcaccgcatactccctccgcacggtgagacgagccgctgacaagcgggtcccacccgggaccgcgcgcggtgagcccggtccaccggctctctctcctccctcccgcgcgcgcgaccgacttgggccggccggcccacccatttagctcggccggaccgccccaattctcttgggccgcgccctagccgcccgataaaagtctattttccctccctcttttcttttcttttcttttcttttccaaaaaggatttaattaaatccttttcctttagaccaaaaatccaataatcttagaaattcaatatcttcccaaccgtaaatccgtttgactccgtttaacttccaaaattcctcaaatctcgagatctatctaatggcatgcttagaggtcattaatagggctttatttttcgccgtttgttgagttgtcccgtttcacgtgtagttccggagcccgaagacccgcagtgcgaggatttcgaggatcaagctccagatctcgagcaaggcaagccacctttgaacatcttgagcctatatttgaaatttaattatgttgcttgaaaatattatgcactgataggatcgcacttaatctgttgtcccgtctgcaaggcagtttggcggacctacctaatttgttgcattgatcctccctttgttaattgttatatcatgtccccttgtaaccatctagatgcgtctcgatattcgtgcaccctgtgcgagtatcgacggacgccttcgaacttaaaatctgaaaaacaatttgggtaaaacttgggttttacaaaagacttggaaaacccgacacctgggtcggtgcttgcgaactaaatgaatttccaaaaccgcggaccggggaacgtaccgggtgtacggtttcccgctctcgcacttaaggaccgattccttggaatttcatccaaacataagtcaagtacgaccacatgggtggaatgggacacccctggctgagtaactagcttatcaggggagccttgatgccgagagacatgtggattcgccggggtggtgtcggggaggacccctgggcttcctagcacaatatggtctgggacctaacctgttgttggtctgggacccctctcgtcggcatatggtaaacctgtgtcggctttggaaatgccttgtcatgaaagcttggaggtctcccgacgtggctgatccccacgggctgggtgatccgggttagtaatgtcgtgtgggtaaagtgtaccccctctgcagaggttaacaaactgttcgaacagccgtgcccacggtcatgggcggatgtgaggtgattcctagcgtagttttgtttgactactgcttgtgaaattgctgttgtggaaaggggttcgatgtttgaaaaatcagcagctgacgggatcagctaggcccgggtggccgtttgaaagttgttgtcccgggtggccgtttgaaagttgttggccgggtgccaatcttgatcaattctaaagactgatacattgcacaaactccgaccggacgagacgcactgtcttaaccgtgtcgtttgagaagcactcacttagttattttcagaaaggtgtacaaataaaatcaattataaaaacaacagcctttccttgaagcctgcattaaacacttaattctcatggcttgctgagtactcccgtactcacccttgctctatataaatatccccccctcagttgctgaagaagatgaagcggatcctgttgatgaggagttcttccaggagcaagccagctacgatgagttttagggtttcggcctagttcccaagtcgcgcctgtgttgattggtccaagtcctggcttccgtttcccttttgtaatgcagttgtgagctcgggatctgtccgcagcccaacatgactgtacctctactctataataaagagacctctgttgctgtgatattctgtcttcctgtgataccagcactatttcctgggactggtatcgattaacaggttaatttggagcgtcacgggctagtttcggtcgggactagttcggggcgtgacagatttttagtcccggttggtaacaccaaccgggactaaagatccatctttaatcccggttatttgaaccgggactaaagatagcgatctttagtcccagattcgtagtcccggttggaaaaccgggactatagggggttacgaaccgggagtaaaaatcacttctccaccagtgatgtttcaactctagatttgacataagtgttctcatttatagctaattattttttcaatgataaactatgtaaaggtggacacttcataatctcaagatatgccgtttaatcttttgaggtgcttataaaggtggggtgtatgtataaggcatgcatacgtatgttcatatggatagcgcgtgcgcatatgggcgtctatgtttatattatgtttcgaaaaaaaagctagctatcttttcttgaggacttcttggcatcacttggtattctttttcccaacaacagaacttattatgtatttattggcatatgaaggcgatgtaaaccatgtctactataccttaaactagaatgcactatttacagccaaattatccattttttttctactgcgtatattgagttttgtaattgaatttcagtatacatagtggtttggtatactcctataacaatatactccattatacatgaatatattgtgtttggtgagtaaaagcgcacaaggtggtgatgtcttctctcaagagactaaaaattcgtccgcaatattttgtttgattttattcatgcagaaattaatcgtgattacatatatatgcagacccgatcataaaccgaaaaaacaaaacaaaagaagaaaagatacatgcacgtaaccactcacgacttcttgcgcgtcacaactcgattacaattctcaaagcaccatgatcggtcgtcatcgatcactcgttggccgtgacggcggtggctgtggcggcggcttctttctcggcggcggcggcggcggcgtctgcttccttga

SEQ ID NO: 12083 - DNA, 19590 bp, Oryza sativa
agcccccgcagcggcatcatcccctccgggaaacccagcgccctcatcagctccatcgactgcttgaagcactccaccgccccgctcaccacctccgccccctccctctccttcccaacctccgccgccgccgccgccgccatcgtgcccgtcgtcaccgtcgtcgtcacggacgccatcgatcgatcgatcgccgcgcgctgcaggtgactgctcgctcgcgcggttgtgatgagatgagagttgggttgtgtgttgcgtgatgcggtggtgtgcgagtgaggggttttataggggggagtgatcagtaggtgagtggtcgttgagctaacggtaaatggagcaaaattttgagggatttggtcacattagctcaccaagcgacctgggaggagggaggaacataatgttgggttcggtcacgttagctcaccagcatgcggcaaatggatcagcactcccttcccgatcccgggatcagaacagcttcacctggcagattggtggttgcaggcaagactctgttttcagaagggctacagggacaatttcgacagcgcttgcatgctcatctgttggcaaatttggaaagatcgcaatgctagagtattcgatcagcgagtcagcagaccagaccagcttgcagaggctattaaggaagagattatgatctggaaagaagccagctatttcgcgagtagtagctcataaaaacttctcttccattttttttcgttctgtagctgttcctagcttatgggtgcttgtggctaggccatagcatcatttcgacagcttcctgtcgctgtaaaaaatgttgggttcggtcgtttggtgtgtcgaatgggtttaccaagatgcaatatctaacgtacgtacgcaaggatatcatgctacgccacacaatctcttcacgtgctccttgcctcttgttatgcgtgatgttggtgggagttgaatttaatgggctgttattgtagtgggcctattgaggtggatgtgccattaatgtccctaggtgaaataagttcacttttgctcctttgacatagagtttcagaaacgttcttaaaccgcaataacatatatagcgtgtcctttaacttgcaaaattggtttaactggaaaaaaaatacccgtgagttgcaacgggtgaagtctattttaatcttattattgttatttaatttagttaaaatgaaattcacggtgggagtccacttggatatatatatttttagaaaatcatgagctgtaattaggagtccgatcgtctcaagttagcgtgcgagtttttttaaacagatttcttatatgattccttctgtattaccaaaagtgaacgatcttaaaaactgactcaaatacggatatgtaattccaaaagtaaacaaacttaaaaaccaactcatacacggataatgtaccaaaataccggtaaaatcatcttcaatttctataatagtagagatagggtcccaaggtagcataggtttcgtccgacgtgtcgttttggctcaagcgtcaaacgaaaccaggagctatactggcttagaaccccctttaacctgattttgtaagttaaaggatatggtatgatgtttctgaaattcgacgtcgagaagaggaacctaaaatgaacttattcttttcctaggtagctggtgtgaacagcccgttgtaggtggtgggctattgttgggccgttaatgttgatggtgccctagtggcctggtttgctaggcaccaaaccgacacacgacgtgtgacgtgttacacgcaccccttcctcgaaaccgctcggaaattgtaaaaaaaaaaaaaaggaaaaaggaaatcaggtggccggaatccatccatcgcgagagcagagggagggggatcgcggcggcggcggcagctgcggcgaagggggaagcgccggaacgggagccgtggagcgatccgtcgggcatcggcgcccgatgtgggcgtggggcctcgtcgagcgcgccgccgcgggcctcctcggccccctcggcggagcccatggcggcggccgatggaacaccgccgtcgccgtcggtgtcacggccgccgccggcctcgtgctcgtcgtgatcgttgtctcctcccgcaggttcgtcgcctcccaacccttactccccatcctctaggaggcctggtgtggtgttcccttcctggcttcctttcgctgagttgctagcgggtgctttgattgcagaggtgggctcaaatcgccgtggtggcggcggcggaggaaggccgcgcttaagccccatgaatgggtcagcttgttcacgccggaggggaagcttaaggacggcggagtgaagcttctgaagaaagttcgaagcggagtaagagagttttgctttttcgtttatactccctccatttcacaatgtaagattttctagcattgcctacatatatatagatgttaatgaatctaaacacatacatatgtctagattcattaacatctaaatgaatatggcaatgctagaaagtcttacattgtgaaacggatgaagtattctactattatgtttccatgattcggtgtaggttaaggagttatatgattttgttctatgtgcttctgtgacaggggattgagccaagtatcagagcacaggtctggccattccttctgggagtgtaagtactctggaaaacttaatttcgagacggctatagtcaaggacttacgtgttcagatgaataattatatcggcaacatgctatgatcatcttgtacttaagcaaatgacaattgattttgcctcctggatttgaggaaagacttctaggctagcatctcaacttctgaacataggctaagtgtgcaggagcataacagaacttctgatcataccagttgtacacacatgctgagtagttactaagggtgcgttctaaagagcttatctgattgtctactccctcgtttattgtgagcatgtttcccgaaccgctaaatggtgtgttttttgcaaatattttatatatagaagtttcttataaaaaaacaaataaattcatttttcaagtttgtaatacttaatactcaattaattatgcgctaatggctcgcctccttttgtgtgccaagtacaacttataaagtgtttttttttctttcaatcagcagaatgtgagaagaatgtattgctacagtgaggaatattgtgtggttgcatattgtagcatatatatatgtgtgttagttgtgtcttgaagatagcttccatgtgatctgaatttttcattcttatgcagttacagtcttggtagttcagaatctgaaagagacgcggttaaggcacagaacaggtacattcttctgcatgcacattttgtatgtctctctgttcttcctgctttatcgcatcctcatatacctgcccaaagctgaccaatcaaaccaaatccacttgagaacctttcctgatagagttaacatgttatatctgctactctttattttgaaatttgactagtgcctcttgtgttcttttttctgggttatctgaagttgactttttaatggtggatgaattttgtaggaaaggttatctgttattgaggaaccattgcctgcgaaaatctgtctacatcaatgaagagaacaaacaatcaaatgaagccgctggagccaaacatgtggagtgtgttagttctgaaaaaggcgaagacactgtcaatccagctggatctgaagaagtacctgataaatctagtgtagaagagcatcttgttggcgatgacactgttggtcccgttgtatctgaagaagtggctgaaaaatcttttgtcgaagatcatcttgttagtgaggaggaaaatccatctgccaatccaggagaagaagtgcaggatgacacatctaaaacaagccctgagaagctgacagatggaaatcattcttcatctagttcatctagtgaggaagaaagtgaatcaagtggcctgactcatgtagaaacatctcatatggttgtcgcctcagttcagcaatctttaactgaggatgaacaagaaagtatcccgagatattccaacacaggaggaaacatggaaaatgatagcgagttatctaaggctgctcgtcctgtgaaatctgtacgcacaattgaggattttgagacttggcaacgaattatccgcttggatgcagttcgtgctaatgatgaatgggtttcttactccccatctcaagctgtagtttccagggagaaggcaattgaatctgctaaagctgtttgtctgaaagattacgaacatttggaaccacataggatccgtcatgcagcacgccttgttccaattcttgaggcttatgccatctatgacccagaaattggatattgccagggcatgagcgaccttcttgcacctctacttgccgtactggaagatgacaatgaagccttctggtgctttgctggttttatgaggaaagcccgtcataatttcaggcttgatgaagtgggcattcgcaggcaactgaacatggtagccaggataatcaaatacaaggacttccatctttacagacatttggagatgctccaagctgaggactgcttctttgtttacagaatggtggtggtcatgttccgaagggagctgacctttgagcagaccctctgtctatgggaggttatgtgggccgatcaggcagcaaaccgtgctggaattgcaaaatcatcgttggggaaactgcggttaggagcccctccaactgatgacttgctactatatgcaattgcggccagcgtgctgcagaagaggaaactgataatagagagctatagcagcatggatgagatcataagggagtgtaacagcatggctgggcagctggacatttggaagctcctggacgatgcgcacgatctagtaacgacccttcacggtaggattgagtagtgatatactgatacactctactcattttgtacacggcttgttgtattactttacacattttcatccttacgtcatatttcatctctttttcactaacactccctccatggatatgtgttagtttgggactacagacctacagtaccacaggctcagttgcatggtgtcccagtctagctgcctctcaggattaggccattatcttttcttgatcatagtggtgtaactggaccatctatgcgtgtggatttctttcttgctgtggtcgctgtcagtatcctgcaaatccatgtgatagcatcataccaatgtgcaaggggcaaattctacttcctccgttttaggttataaggctttctaacgttgccttaaacagagcgttttaggttataaggctttctaacattgccttaaacagaggtagtagtggacatgcggttggaaccggtaaaccagtacctaaaatagaaacaaatcaatggctacccccagtgtttcttgtctgtgtacataagcatagatgtttgcttcgtgaggacttcaacaaacagaacacaaatatcagaagttacatcaaagaagaataatttcacttctctttgtgtcgaattctccgaagtgttctacgctacgaaagtcatttgttatgttatttcatatcccagccgttccaaatgaacaatatttgggcacaaatatgtaacacggatgttcgggatacataatactccataatataacaatacaacataccgttcccctcaacaaatatcattatttagttcttttgatccaaatcatttcacctaatatagcttcatggaccatattgattatcaacattgtaataacagatctactcagatttggtgtactgccggatagcaaatgcaagccccaagatcaagatggggacaagaaactgcaagatcttaatgagcatgtcatcgcccttgtctgggttgccgggcgcttgctggggagtgacatgagtacgctttactgggatggttgaagcatcaatctccccaatgagatacttctccatcatctcccttgctgattcactgtggccaatgtcttcaaaatcattggttgcgtctttgcctacgtgcattggagaggaggggtcagctttgatattgagatggcaatggtttaataatgttgacagtcagtttcatcattaattatgaaatgaaagaaaatatatctcaccagttactgctagcaacacttcatcgccaccagggtgctcatccataaaagaagtaacatcatatacctgaaatgttaacaaggatgagatgttatggtcaagtgcataaatctccatattagcacaatttcttatcggcaagcaacatacggcagatgacattaaatatgggccaaacataagttttttatgttttcaccatgttttacttcatactccctccgctccaaaataaacaagtctagaatgagatgggacattacctagtaccatgaatctagacactaggtaatgtttcatcctaggtttatttattttgggacaaggagagtacaatcctaatcttatggaagagatgaatatgcatgtctataccaaccataattacttaacccaaggaactagacaatttaatggtacatctctttttcactgcagagaaaacctactgttatgcataggctgtagtagcacatggttcgttgtacacaggccatactaatccatacactttccaaatatcataattgtgaaggggagagacaaccaaaactattgaccacacggagtacaaatgcataatgttttagagggtcgtatgaatcaaatgcactaataactcctttaattccaccatgcacgactactctctctctctaattcaagtgggttgaatgtaagccatatcattatttgaggtgcatgcagtacctaagcacactgaacactaaatgaaagtcactcgacctgcaatggacatacccgctgatagaattatgcctgctttccatctctttttttttttacgtaaaaaggtagagagattctaccttgtaaccattagattaatggtgggtactttccatcttaaaaacacatatttgttcgagactccacagataccttgcagacataccaatcatgagtccacaaaagaatctgatcgaggaactttgcaaatacaagttacacaaccaccacatactgtaatatgttgatagccatatgtaatgcaagcccaaatgaattaattctacccttcaagtaaacaatctatcgtgtattgtcctctggcttcaagtatctaaccatctggcagatagcgcatttatttatcctaaatgatagaggggaaacgagtcgattagtcaccaacaagaacattctgcacagtgcccacaagctttgtcatggtcagcattttattttgctgtgttttcttatgtttgcttgctcttacactgaagcagattctttattccagggatgtagtaacccaacatccaaaacgaggtttgctggtgtggaacctatgcccagagcaggataatgatgtgagcttggtgtttgcttaggggttgggaggactactaccttttattttttcctaaaaaaaggttatatcccagctaggggttagggggtcatgtcaagtctgaagtcatgtcatctcagatgctgataatttggactcattcctatgaatagtatgggttgcgagtgatttattataccttcttggtgagaattggtgaccacgaaacaaacactaatcgcagagaaagaggataaagaaagaaaaaaaaaaccttcccggcgatgatgagccagcaatccttggtgacgttgtggccggccacctcctcgaacccgaacaccttcttctcgccggccatgtccgccgcccacgcccacgccctgcaacgctgcaaagagaaattcccccccccaaaacaccagagaaacaaacaatcagccccccttcttcgcgcacccgagaagaaaggagagaactccgccacgcaaagaggcgcgcggctggctcacctgcgaggtggtgggaggaagcggaagccgacgaggagcgcgtggccgcggggggagcggagcggagtgtgggggagtcacgcgatctggacacgctccgctctctcggcggcgccggaaaccccgcggtatttgagacgctgcgcaccccgacccgagtccaccgtttacttgcttgcccatgtggttttaccgaaatacccttcgttccctgcctactacgcaacgcacggctgctttgggtaattgggtccggcccattatcatgcctcgtggtctcttcctcgctctgcaccagtgtaccgtactactcgacaagtggttttacccaaatacccttcccttcctcagcatggctgcttcttatgtgggccttccgttgggcccggcccatcggctcgcctcgtggtgacgtaaccgttgacacgtaggcggcggcttcccctacctcggagtcagtcgtctcctccgctttttgcttcgccatttgatttttttgccaagtccaacgtcgcgcgaggcgaggcgaggcgaggcgagaggaggagtggagaccaccgccgccgcggcgcgcgcgcgctcggagatctcgccgcggtagcgcagcgcgggtgccgtgccctgatccgtccgtgcgatgaaagagcccgcgcaggtgaggacggcgcggggcggcgcggcggatggggtggaggtgggggtggaggaggaggaggagccgccgcgatcggcgacggtgaagcaggaggaggcgaacgcggtgctcggggcggaggggtcccgcccgttcgccatgcgggagctcaaggaggaccacgaggtcgcggccgggagcggcgtgaaggcggcgtctggggagaggaacgggatcggatcggcggatgcccagggttcgtcgtacaggttcgtggagatgcagtccattcagatctcacgacatgtaccgtatcagttcgatttagtcgtgtttgcgttgagtgttaattgctctgttgcctgcagagttttattcgatgtttaactattgctttagttagaattccaccaccatagttgagttaatctcatcaatgtgaattgtgatgctgatacttatgatagttgttgtattggaatgattagctgcaacatgcaagcctgcaaccataattctttgttttgatgagaattgtttgtcaagtatcagtggtcatagttgagcaaagcaaaattaccgccctagcaaatctagcagacctctcacctagtcgaccttcttttaggttagttttactgctagataaggatatataaaagccacttttcgtgccactgtacattgctttgcaatatcatgggtaattcttaaacattgtggaatgtttaattccattcttaaacatcatgggtaaaatattgtgttatgtacaacatatagtgcatgtctatcccattctccgtacacattgatgagactgtctcgaatttatttcagccaagagagtatgcagcagttttcatcccatcatgatgttgcaatggacttaataaatagtgtcactggagttgacgaggaaggccgttctcgccagaggattctttcttttgctgccaaaaggttgtgttatctttcctgaatatcctttctcttgctattatcttacactttaaatgtccttcatctgtaattacttgttctgtcaagtcttataaaatctttcatgcagatacataagcgcaatagaaagaaatcatgatgaccctgatgcatattataattgggcccttgttctccaggtacatctgcattcttcttaagttatgtgatgtgccagttattgtgttgtactgttgttaatacttaactgtgaccaatgtatgattgataatattctctcaaaatattgattcaggagagtgcagacaatgtagatccaaattctagttcgtccaaagatgcattgcttgaggaggcttgcaaaaagtatgctgaagctacccgtctttgcccaactctttatgatgtaagtttttgttcctcacatttgtttgatttgaagaatttgaattgataagagaattttctgagttggtcttgtccaagaaaagatgagaagagacatggccattttttaccaccaatactctatcaaaagcatttagaattgtagatcatcccgcagaatgtaatctatggttctggtggataaaaagtgctctcatttgctgtatattagatgtccatatttgactattttgtacttatttcaagcacccatttccccttttaggcatattataactgggctattgctattgctgatcgggctaaaatgcgaggtcgtactaaagaagctgaagagctctggaagcaggtttacttacaagcctcacacatgtacatgctttgttaaaatgtttatgctatatatcttgttgctccctgttatcagtataatgtttattcatctagtgaaattccattgattgcaatttgcattatttaaatgatcaacattgtgcaattttcctttcagttatcaagttaaaattctatatgataatattttttagttatactaataagttggttgcttccttcatatatctcgatggcagtgtaagccacaactttctcaatagccaattgggtagtaagcggcataaaactcataatggcacttcgtgatgacattaattcttgcggtttactgtaagctatgctgacacaatgtgatcatcatatttgaggcttatttttatctgtctttttctatactaaacttagccagtttgcctttgatatttggggcaaaatcaacctagcatattcttaaaaaaagttctgtgtatctcttaataccgctgtttggtttcgaacatattctaacgaaacaaactgtattggtggaaataggaattgattcctactgcaaattttgatggtgattttccaaatctaccttgtccagatagtcttggaatgggttgttctaatgatccatcactttattgaagcatatatgctgccctgagacttgtttttttttcggttatgtgcttgtaaatggaaaccggaatcacacttctagttttgcatagactaacttttgtcatcactcatctataacaaatgatacctatttttttctactaggttttactgagtcataaggtgatctttttctttacaaggaatacactgtcatactgtttaaagtttataatgaagtttgatgccacgtgttatgtatggttccattccattgcaggcaatactgaattatgagaaggctgtccagctaaattggaatagtccgcaggtcagaacctagatcctttttccttatcttcaggactttacaacataagaaaaaaaaagagaagatatgaaatgtttgcctttttgtgaagaagaaacattcttatttgatttaagtggaagaaattcacgtcaatgcaattaatgaaatgggaaggttcaaaaaaatatggagttgtgccataccataaaaatgctatcatatgggttgtagaatgtagagaaccgtttgtagaggccttacctttacatttagaatacatttttttaatctaaatcctaatatgccctttaaggaaaaaaggcctcactgaatgttcattcttccatcaaatggtccaaaagaagaaattttaaaattacatccactgagaaaccaaaacttgatatacctcaatcgtaatactgtacaattcatgtcacttccttttaaccattctcttcattcttcattttgggcaaagctatgagttgaacattgacagatcatatcaacttggattttctttccacacactccccctattttcagttctcacttgagaacccatgccattgttgcttatattagttatatctttgattacaggctcttaataattggggtcttggactacaggtaatcccacatttgacttcttgttattgtagccttctcaatctgggatattccttagctctctgctcttgagctatatttgctatgctgtattttttttcagctaggagtatgaatttgtattgcaggaactgagtgcaattgttccggctcgtgagaagcaaaccatcataaaaacagctataagtaaggtagatgcaatttctattactgtgcgagaatcatttttgatgattgtatcttctataaactattgggctgttgacgccccccttctgatgtcttggcagtttcgagctgcaattcaactgcaatttgatttccatcgggcaatatacaatcttgggacagtcttggtatgattcctgacttccattactcacctagcaataatctattgttttaatgtagctgcagtgacttgtgaaaaccttagctgattaagttttatgataataacaagaatctgtcttcttgtcttattaaatgtctcagtatggtttagctgaggatacaatgaggtctgggaagccaggtgtgtccgctagcgagttttacagtcagtctgctatctatgttgcagctgcccatgcactgaagccaaattactcggtatttctttttgtcttttaattttctaatttatgtatgggacttcttcataaaaactttatagctgacaatgtccctttttgtataattcaggtctaccgcagtgctttgcgattagtccgttcaatggtaagacactaattttatttcttgacaaactcttaatttattgtttatttttatcagttgttagccagcagtagttaagatatggctagaatatgtttatttcttaatttattatcttagaattcacttatctttttttttgttaagtcgtttttatgtggaagataaaagatgaatagacataggactttgaacctgtcaaatttttactctgctgttctttagttttgagtatacattgttatttcagtacatggcttcttatcttatttcttgatatggcagaagtaaccttgttcttgctgtcattctatgtcatgcagctgcctttgccatatctcaaagtgggatatttgattgctcctccagaaaatagtgccattgcaccacacaaagaatgggagaggtcacagtttgttttgaaccatgaagaactccagcaggtagttctgccactgttctttgtgcacttgctttagatgataatattgtccattttgaagttactgctgtctgtaattgttctttgtcattatcgtgcctgctcaaactgctatgtgttgtaaattgtaggtcaatgcctctgaccagcctccatcacaatcacctgggcatgtggacagcggcagaaagcttttcaggatagttgttgcagacattgtttctgtgtcagcatgcgctgatctaaccctgccacccggtgctggccttcgcatcgatactattcatggccctagattcttggtatgcatttcaatttgcaattgttcatttgttctatcgaaatggattacagatgttttcctttatctacaaatggactattttctctgctttccttgtaaaatggataactacaactctatgcctataatgtcctcagctatcattatcaagttagtgacaaacaactgagtatatagtttcgagtgcataacaaatgttttgttgtgcttgtggcaggttgctgataactgggagaccattgacagttggctagacgctatacgcctagtctacaccatatttgcaagagggaggagtgatgtccttgctgggattattactggctgatggctcgctgctagtgaaaaactgccaacaagtataggccaagagactgtaggagtatgtcccggaatcagatagaagtatcatagaactcatggttttagtaggcgtaagagcagatgttatttgtaacccatttatggactggtaggtcataggccaattttcctttgtactgtggcgttgtgtcgtcatggtacatatgatgtgatataagaaataaaaaccgtaatatcctctctagcctgtgaataaagatgcaacggcttgtggcaggcgagtaggttgtgtgaactgctgtcctatctccctctcaaagaaggaataaaatgtttcccctatctgtttttcagccttcaaatctctgtttctcggaaaggaaaaccacatattatttacaatgttacacgtacacagttcggcttagcgaacatttgttttcagacataatttggacatgcatgtcagtacttgatatcaaaggctcaaagcgtgtatgcaatttgctccttgaagtttcataatctaagcgtgtatacaatctcgagccgcaggatccagccgcaggaatccagtgctgttcagattgaggtcatttcaaaccatactaatttttaggtaaagttgtcaaagatgtgcatatatttagtttcttatcaatctttggtaaatacataataaatcctgccaaaatttaataaggtttattttggttacaatctgaagagcccctcagtcacttgatgctggacaagagatgaatctctgaattgacatctccaagtattccaccacttactgtaaagctgaagggaaaaaaactgaaaaagagaaatattcccccgcctgagatttctcagagacatttcgaaatttctcctcctcccagatcgccaactcaagaaagaacaccgcctcctcctcctcctcctccactcctactccaccgcatccgcctcaacctccatcaatggaactctcctccaagcgcgagcgccccaaggactccagctagagtgagctccctgatcgggccatggcgacgatagcagcagcccgtggaatctccaccaacgacatcgcccacatggcgttcgtgtgcaagcgctaggcgggcgctctgtgagttcactgctccaccttcggagaagtcttcagctctgatgcgtccgtctccattgatgaagcgcttctccaagggtcctatggattcgggctggggtgagctccctgcttgcgcagtcgtgaggatcacagcagcaagtggacttgcggacaaggacgtcaaccacatggtgttcctgtgccatcactgggcgaacgttctcctcgaggagctcacgatggcatcgggtgagtccccctctttccctcccttagagagttctgcagcggccacagggtggagaggggggatgcattcagctgctatgtcatcatcgcgatggagcaccattctatacgatttgttgttcgcaattgctcttcgcctgaaggatttggccgtgctgaggcttgtgtgcaagccatggtgggatgcattcccaggtccaccgtttctggtatgctccacacacttgctggaagaaccactggttggggaatcacaagttttgggtcattttctcccatgcaagttgcaaaaaattttcccccaaattcagtctgttggggtggatctcttgatgtacttgggatagtcgattcggacggccaccatgattgcaggattttttgtctgctctgtgagggagaggagagattaccaccattgccagattcacctaatggactcttcgtgttctagatctgtaacattcttatgagagcagttcatgttgtggcatcgtcattactttatcatttccatgagagaaaatttgtgctagtgaatgagggtttacaacgatttgtcgagtaggtccaaattaagattccaaggaactataccattggtccaaattcggtcgtggagacaaacattaatggtattgttatccaacagccaaaggtagcagaatttgcccaaggaagtcattattcgagaccaaaaagacaacacctctttatatgtaatgaggagatgtacttatgtatcatcttgcatggagctgaaagggatgatatcatagttaagctattcagagcaattgagctaacactaccaccatcaattttgttcttgcgaatagtattggtacttactcactttaccttggtgccaatcaaccttggttcgccacttgaataatgtttctacatgcagaaggatcaacactgcctatttcgagaattgggacgacaatatgtggattgcgtgttttaagcattaatttcagtagcatcacatctttaactagacaggtgaaataatggcacaggagaacattaggcccctgcagtgtgggtgtgtaaaaatctccatagagatacaagtaccgcatgtcatttatgctattagagtagggcaatacgatggtcgaccagaaggattgatgatggcacatcatgggtgcaatgtgcacaatgtaatttgttgtattaatatcgactaaggaaaaaatctcgcttgtaaaggattatggttttctatcaataaaattgggtttgaaatttttaaccaagaggttacaatacatgcttgcataattggctgtagttttttttctataataataaatgcttatataatgaaacataagctatgaattggttacaacaaaatcaggatcacaagactataaattcaccctatggtgataccttttaaatgactataaagatgttccacaatgattacggctatattaatagtatggtggaaaatataacttattttttatggatgaacttaataactgggtgtgtggcagttaacttaagttagttaagaaatacataatgtttagaagtagcttttatcaacccatcttactattcttattcgtattgtctatctcctcctgcagtagaaggcccttttgaaaactgagtttagtcactattgaaaactgagtttagtcactatgccaataggttgtcaaccgtttaagacatgctaaagttagagtgtgttgattttagtttagttagagtgttttattttagtttagctcttgtgagatgttttgtaaatattgttattttagctttggtctatttgatggctgtctttgagattgtcgtatacaaatgttgaatttataatagaacgtcatggatagttggtgtccccaacaagactccttctatctatctactgtattgatgttttcttcagaattttaattacttaactgatgtttgctggtaagtttgtcatatgcattattaatattttccttctattatggtgatgcttcttatttagttttaaaaaaaaagttttcggttccgcttaaaattcagtcaaatatggttgggatgttagatgttttgttagaaccataatgaagaatttaacatcaaaaaggtttgtttcatattcatatcaagtttttattatgttattttgtttacaacttattcaagtaattttttatttgtagttgcttaagattagttgtgaaactttataacaaaaaatatgccaagagctaagcccttataagtattttcatcacttattttttattttgtttattttatgatactatggtacatagtgagtatattaagtatcttatattcatttatgtgtataaagtgattatgggagggaaggtactgattgaaggataaaaccattttgttttttatgttacttgagttttatcctgctattttttgtttgtccctttacgtaattcactatataaacaagtagattatttccatttatttaatcttttcaacattatgaattatgcagctattttgaatttgtacatatgtgtagttaaaaaactatcaaaaataataagtgttaaacatactgcaaaatatgaatacgtatccaccgtaaaaaaagtaaaaaaaagctttaaattataagatactatacatgtgtacagatttttgccttagacattgataattacgcacagatttttgccctttaccctgagattgctaacataaatagattatttttatttttactgtttatttttcttgttaagccttgtctagcattagattaagttaatatcacggtgttacaacattttttctgttaaaaatatagttctgaagttccacaaacttcaacatagtaaataaatgtataattgtttcagtttttgaaggttaagtagtttaatagatacatccttttatttatttgagtaaattttgaaacttggtgttgtgtaagaactcaggatcctattgtgcatgtggggaggggtgggaagatgaaagttatcgtgtgcttattagaatagttttctaccgttggaaattaatttgcattaatcctagttagacagaaatatgtattgataatatgaataaataattgtaccattatgagtatgtatgcatacaagttctaattattacatcttggaaatatttttttggtaccaaaatattagaattaccaatgaagtaaaactcatcctagtaatgtatgattgtatgttttctgaatttgaatttagattaacaaaattagttctttaacgtagctaagtaatccacattgcacttgaatctctagataaatcagcagagtataagcctcacaagcctcatgtgagtgcatggagtgttgaaataagcataaagtatttggtgttcaaattattcagcattatcaccaaaaaaaacaacgtgagtaaacaactgcaacaatccacaatgattatttttttatatttttcttataactaccaaatatcccctctattaggcccattttaaaaacatcagcattaactgctcatttttgtttgagcttgttactgtctacctacaaaatcttacactatgatattgttagtctgattgataaatcgtcctctcttctctaacatttcaaggctaagtagatttgttaacggttgccgtaccgccgaagggcgggcttcactagttaagcggaaaatgaaatggtgaaattgtatttatttcttaaaaattggatcctctattacatccccttggggtctatttataggcttacagccctggattctcagttctagggttttgatattacatgaatgcccctatgtcagggatatttacgggggtaatgataatattttaattgcactatgcaactcatgggtccaattatccctttttcatggtgtcagtgggcctccatggttgaatcgaagaggctattcagcaatcagccactcaccgcgcgcggcgcgcgtaggggggcggcggcaggacgcgtgtaggggagggagcacgtgtctcaatttggtttttttctttggtttttgcagctttctggtttctttccttcggttttctttgggtttcttttttatacgtacggatacgttcccggttcagtttttctatattttttcctttggttttttgcggttttctggtttctttccttcggttcttttggtttataaagtttgtatacgtgaatgcaaagtttgtatacgtacgtatgcaaactttatatttatatatgtgtatacatacatacatacataaattttgcatacttgtatatattttttatacatataaaaatataagttttatagtagtggtatcagtgtagcagtaagtactagttatagaggtagtaaatagtactagtactatagtagtagcacgtactggcacgccgcgcgggaggctgggcgcgcgcccagcagcgcattagcagcgaatgttgattagcgaactgtcgtgtgcctctcctcccgtgcggcgcagccgtggcacgcgcgg

SEQ ID NO: 12084 - DNA, 659 bp, Oryza sativa
  unsure (1)..(659): unsure at all n locations
cagcttttgcacgaatatgtcaccatgttttaactgcacgtttcctcatcgcaggacctcgtctgccttcgagcgcgttcgcaggcacgaccggcgcttccgcgagctccgcaggggcgttcgccacctcttcgggcgcgttcgccagctcttcctctcacggagcgtcgatccctcgtccacacggtactttactttttattactactgttaaatacttgtacgaaactgatggtccttgtccagcaggatttgcagccgggatcttcggtactggggcctcttcgtctcacgccggtagggagatttcctcaaccagatgtgcatgaacccaaaggnccccctgtcctcgcggagatgttcgatgctagcaattggcatgcagttgagggtcttggtgatgaactcgatctcgtccctctcgacatccttcacgaccaggagcttggcctttgcgagataatggancgacagatcggtgactgaatcacgcaggatgcttttctggatgagcaggacgttgcatccggatgccttgatcttcttcaccatgccaaggatgtaattccgctcctcgcggaggattcgatccatctgcgcgtaatccgacacgacgacgctgtgctcgatgtccgtcttgggaggcgagacctggaact

SEQ ID NO: 12085 - DNA, 591 bp, Oryza sativa
aacctgctcgacatcaacctcccggaggacggcaaccgcgcgctcaccgacgacgagctggttatgctctgctccgagttcctcgtagccggcacggacagcacgtccgccgcgctgcaatggatcatggccgagctggtcaggaacccatccatccaatcaaagctctacgaggagatcaagtccaagaccggcggcggcggccagcacgaggtctccgaggaggacgtccacgacatgccgtacctgaaggcggtggtgctcgaaggcctccggaagcacccaccggcgcacatgctgctacctcacaaggcggcggaggacatggacgtcggcgggtacctcatccccaagggcaccatagtgaacttcatggtggctgagatgggcagggacgagaaagaatgggagaagccaatggagttcatgccggagcggttcctccccggcggcgacggcaaaggggtggacgtgacgagcagcaaggggatccgcatgatgccgttcggcgtcgggcggcggatttgtccccggctcggcatcgccatgctttacctggagtacttcgtggccaacatggtgagggagttc

SEQ ID NO: 12086 - DNA, 11278 bp, Oryza sativa
taacggacgagaacgcgccgcccaaattccgcgcctcgtcgacctcggctccggccaccgatcgatggctctgccggtgaccaccagggcggcgccggcgatgcccttcgcgccgcagccgcgcaccgccggcggcggcctcctccggcgaccgtcgccgcctgccgccgcgctgcgcatcgcgccgcccctcttctggccgtggcagaaggtcccattcgcaacaaacccctcttgatacctgcatgattacactagttaaattagtctagttcaaattctgctgcacttcttggagatttgcacggccagttcgtgtgctgtgaaagcttaactctaccgtgttgtcttcttaattaaggaggcaaactgttttggtgagcttgtagccatgtacagtagaactcaagctgcagttttttttttttcttcttcaagacagtactgctactacattcaaggctggaacagagccacagtagcttttgctcgggaggccctgcagtaggtttactgattttgtgacatgacatgagctaaatgtactacaactttgccattaaacaagaacgcaaagtaaatgaggcaccagtacaagcctcatgttctgtctgaatgtgcacaacttttactgaccgtagatttcgtgcctccttgagcacaaaccacaagaaggatccgatgaccatgctctctctcccctaccatggagctatctctagcaaagaaccaggaatgtgattagattagtagcactgacagtctgctcctttttggtaaccagctatggatcaaacgaaaattatttgttaatgtttatcactgatgctttcgttcctctttatcgaagtcgagcacggaaacccaaaagttccacgctgtgtgatttctgttggaaataacgagctagatgcatggcacaagtttgctgttgttgccatgcatgggctgtgcttattttactcaagatgactggaaagctactgacattgtgttcgtagactagaattagttgatgctatctgacaagaggaaaaatcaagagcaggatattggcccaacaagctttgtattcgcccctaaccaaattctgtcgaacaactgacacattgaaattcagactttctgaaagtttcaagtaggatcggcatgctaagccaaattgtcaaatgtgcatcttgttgtgctcatgtttcagtctgaagtatgaaccataacatgttacagtttctgaagaattagatgttatcactagtacatgaagttttcattcataattgatcagtgaaatcctttgaaggttatatttttgttgataaatataggtgaaagtcggtcccctttctgtttcgcctatgggatttggaacatgggcttgggggaaccagctactttggggatatcaagaaagcatggatactgaacttcaggagtgtttcaatttggctctgaagaatggcataaacctttttgacactgctgactcttatggaactggaaggttgaatggtcagagcgaaaggctcctcggtaaatttatccgcgagtatgaaggttagcctagctagtaattcagaataatttcttaaattatgggatagtgtttctttggggggagtttgtctagttgaaatgacttcattttccctttttgtatgacagggccgatgaagtcccctgatgatgtgatcattgcaaccaagtttgcagcatatccttggcggctaacatcaggccaatttgtcagcgcctgcaagtattcttccaatttgtttgcttaatgtacatgaaccatatttcagcttgttccgtgaaatttttactccatccaccaaccacgaatgtgctgaaaaacatagagctaactgaatattgaacatataactgatacctataggcctctagcgtttaggtgacttacatcagtgccaattttcaggtcttctttggaaagattgcagcttgatcggctcgggataggacagctgcattggtctactgctaactatgcacctctgcaggagcgtgctctttgggatggtctagttgagatgtatgaaaaggtcaccaaacttccgattgtattgtcattgttcaatgttctgaatcccaactgtatattcagctctacaaaccatatatatctcagttaggcaaatcatatctcagttaggtacacggacagattctttggatgaagatattgtcctcctttacgttcttgatttcttagaaatttgactgcaaaatggatttcttgtagggtttggttcgtgctgtcggcgtcagcaattatgggcccaagcagcttctgaagatccacagccatctatcatctagaggtgttccattgagctcagctcaggtaccttcagaatgcccatacatcttgtacagttgtactcattcagtatagctgtaactgaaattgtcatggaatgcaggttcagttctcactactgagcatgggggatgagcagatggagctgaaaactgtgtgtgattctttgggcattcgtctgattgcttatagtccacttggattaggaatgctgacaggaaagtatactacttctaaccttccaagtggaccaaggtaacgactaatgaccaaaggaagcagacaaatatttctctctgaattttatgacaattgatgacggaaattcagttcatttgttctctggtctgcaggtctgtgttgttccggcaaattcttcctgggttggaatctctgctgacttgtctgaaaagaattgcagaaaggaaggggaagaccatgtctcaagtaagtattgctttccaagagcaaaatgacctgcataacaagtgattcatgcatagatcttgccaatctggcttcaaattatcggaacatttcatcgtatgagtgataagtttatttagctcgttgcaatacctgaatgcttcagagatgcaacacatgaagaaaactgacggtgacactgtgatctgaactcaggtggccataaattggtgcatctgcaagggcacaattcctattccaggtgtcaaaacagtcaggcacgtcgaggataacttgggagcactgggctggaggcttagccctgctgaagtttcagagctcgaagctgcagcaatggagtctccgaagagaatggtccagaacatattccaaactgcatgagcacacatatatataaggatcgctccaaccatcagtaattcagtgagagagaattagaagtgtgcatttctcctaattgagaattcatcactgtaaatacatattccagccaagtgtttcagtctgaagaatatatatagactgtgacacgcacgaagtgccataatcttactgagaaagaaggttgctgcagaaacattgtccatataacatttcaccagcttattccaatacactcagtttcccagagaacaagcagcttagctgtgccattcaactatctgaaccagagcgatcagatagtactcagtttaacagcttaaaccttacttataggtagcactagtaattacataataaactatatatacaaaccagcaacacggggcagatacaacaaatcggatcgtcgctaatgcgcaccatcaatggcggggctcgtgacgtcacaccttgcagtacttggcggcggcgtcgcggtcgggatgctgctgctgctgctgctgcatgagcgagagcgcgcgctcgaactgcgcccaccgctgctcgagcgtgccgttgtacccgacggacatgcggacgaggccgggggagatgccggcgcgagcgcggtcctcgggcggcatctcgctgctggtgctgctgccggagcacgacatgagggtctcgtagtagccgaggctgacggccatgaggccgaagcgggtggtgttctggaggtggtgcatgaggcggttggcgcggtcctcggtgcccatgtcgacgcagagcatgccgccggcgccgtagcccgggttggcgatggcgaggaggcgggcgtggtgcgggtggtcggggaggcccgggtaggcgacgcggaggccgaggcggcgcatccgggacgcgtactcggcggcgcgccgcgagtgctcctgcatccggagcgggaggtgcgggaggcgctccgagagctcgaaggccaccttggcgttcatcgtcgggcccagcagcatcagggccccctcctgcaggtccatcatcgcgttcaccaggctcgccggcccacagatcgcccctggaaacaaaatcatccacgtaaattttacatcttgcgtgtgtgatatacttcctccgtcccaaaaaaattgcatttatagctctaagattttatcccacaaaaattgtatttctagccatgtggggcccagcaaattgattcatctagataagtttccttaagttttctcagcttgtaatttaagtatgctaattatatgggttaattctctcaaacttccttttaatcatttgtatatatggaatgtgtgcatgcaatgggtttattaaataaggtcattgtggtcattttccaatcctactgttttgtcctaaattagctagaaatgtaattttcatgggacggagggagtatcattttacacaggcttattaatctcttgcgttgcgttgctttttttttaaaaaaaaaactaggagaaccaagcttgttttgcgtagctcagctgcacgagcaaatgtgttactgtgacagatcttcgtgtctatagcacgtaagcatcatatgcacttgatagtgtagtagtaatagtgtgtgtttttaacaccgaagtctcgtgtttaattctcaacacgtttataatttttcttaaaaaaaatatatttctgtcaacatttcatcgaagtcgaaataaagttacaaatatggagaattcttgatgtatcaaaaccgatttcataaagctaatataataatgctattgtttctaaccattttcatgccgggtcaggcagggtgcaacgaatcgggggtaaatgatatgcgctattgaatcacgggtgacactgtggcgcaaatgagcgccacacatcggcaatgattcatttgatttggctagacgtacgacgcatgcgaaaaaagcaaacaaatccgtcatttagctccggcgatccagggccgtccatggtgatgggtagcttttggcttggcagacatgcaacacatggtgggtgcagtgcaaagccatgccaaatgggcagtaggttccgacctagatgggtcaccaccacgtcaatctgactcactgccttgtccgttccgcctcgcgcgttgtcggcacgtgagacgggtggtaaaattcttactaccaagaatccaagatttaacctagtaggagtagtagtttctttttttcgatggattaaccttatagtaatttttttcctactagtatgatgatgaattcgtgactcgtgctactacatacttcatcatgttttttcttatgtaccattagcacttctgcgagatttaattgccgcacgtgtgctctattaatcctaatctattccgggggaaattaaacgtagagtaacaaataggggtacgttgtccgtatcctagtcgcgatcaccttattaattaattaattaattaattaattgtttatttagcttaatccactagaccccgtgagtatgagtcatgacggcgcaagcctcacccaaggcctggggctggcacgtgtttgggcggctttgagccccagctaccttggaacgacatggtaggtgacagtgcgatacacgagtggcacacgacaaagacgtacacgacgacgacgctgatcgtgcacgcgcgctctgatgctcgcgtacactgccgctaacgtaagagctagcctctttaattgagcgtgtcaagcgtgtgtatgtgcatgcaacacgtcacgatgatatagctaaaaatggagaacggctaaggcgtccggcgtattcgtccttacctgcgatgatgtcggcgccgccgctgatgaacttggagacgctgtggacgacgacgtcggcgccgaggcgggccggcgagacgaccatgggcgtgaacgtgttgtccaccaccagcttggcgccggcgtcgtgcgcgacgcgggccagcatcgggatgtcggccacggccagcgtcgggttcgacatcgtctccacgtacaccacccgcgtctcccccgggcgcaccgcggcgcgcaccgccgcctcgtcgtcagcgtccacgaacgttgcgcgcaccccggacgcgcgcggcaggaaccgggacagcagcgcgtgcgtgccgccgtacaggcaccgcgacgccaccacgtgcccccccgcgccgacgagctgcatcagcacggaggagatggcggacatcccggacgccgtgcagtacgcggcctcggtgccctccagcgccgccatctgccgccccagcgccagcaccgtcgggttgaagtggcggctgtagatgtacaggtcgccgcgctccgggccgagctccccggagaagaggcggcgcatggtgtccggctccatcaccgtgaacgtcgccgacgcctcgatggacatgttcaccccgccgtgctcgccgaactcgtggcgcgccgcggccagcgccgccgccgggtcggcctcccggcgccgcgccttgggcttcccgtcggcgttgccgttgccgttgctgctgttgtcgtcgtcgttctggaaggggcgcttgatggtggcggtgacgagctcggaggcggccatgacgtgggccatttgggatgcgtgtgtgtacgttcgagacaggagagcgggtgcggcgtgtctgtcgaacaggagtcgcgggcaatttatagacgggggttggatcttctgcggccagaaaagaagggagacgcgtcgctgtgacgtggtgtgtgacggttaggtccgcggctcgtggaggaacggacggctgacactgacagcctggggcaatgaaccgggcccatttttacggccaggggggagaagggacaagattagaacagtgtaaacaagcagcatttacgtggaaagataacgtaattcaattactttaattcctagcggatatacaggagtactcctggagtagaatttttcgagtagaaacaagctgttcttaggctcatttctttttctcaactccaaacttcaactttctgctttttcgttagtatattttttaaaatgttactttaattcctagcggatatacaggagtaagttggtactcctggagtagaatttttcgagtagaaacaagctgttcttaggctcatttctttttctcaactccaaacttcaactttctcccttttttgttagtatattttttaaactgttaaatagcacgttttttaaaaaagtttatgtacagaaattgtttaaaaaatttaaataaatatattttcaagtttataattattaatgcttaattaattatgtgataataaggtttctcgttttatgtgccttaaaattctgccttcaaaacggtcgatcgaacgcagccttaaaaagaatctcaaaactcttacaaatactgatgtagcatgctatgttaaatctaaattttctgtaatttttatcttattaaatcaaaagatggataacttgttctaattatctacaagagctttataagatagtttttcaagaaactttatttttttaagtacctatagcagtgttttttcccctgaaatggcaacatgacggatcaatttagccactagagcatgtccactgtataattcctgaaggaatcttaaggtgagacccacttacgtcatactagcaactactccattcattctaaaatataaaaagttttgtttgaatgtggtatattctagtactacgaatctaaacagataacatattcagattcataatattagaatgtatctctttaaccaaaactccatatatttttagcacggatggagtaggagataaaaagtccgccaatgtacgaaacccgcaattgatccttatcgtacggatggatcagcaaatatgtgtatggcaagtgggcctgaagattctccctgctttacaacctggtactgtactatgcatgacgccgactccttcctttggagcagctagcaaaaatagtgcaatatatgggaccggaccggttcgattgtcctctctccttttgagacctctcaaaatccataggaagtcacagggaacgtgcgtacacctataggtccagtgcactttgtcacggtgaaaagacgggcaagttcaatgaaccaagctcgatcactacaggcctcctacccccgtgaggtcgtgactactactggtcaggtttagtctaaattggctaccatgctaactttggcacatcatataagcctgtagaaaaggcagagttctaaacttctatgtcagggcagttctgaaccacagaatcatcatctatcttgttagctcaaatttcaaatgaggccttgaatcgtttccaaatttggatggaaaagacggcatatgaaagccaacatgaatttggatgctgcattgaccaattgtagttatctagtaggtggatggatggcgatcaatccataaacccatcccttggtgccaagcgttttgactaaacctcgcttgtcaacaaggcaaaattgctttgtactactcttttccaaatacatgggtgtgttttatcaaaaaactaataaaaatacacgggtgtgtgcatgatgcgcacaggcattaacaggttcagtgatcagtcagatcagatctccagggctgcctaatcatccagttcttacaaaatttggagccttgcatggattaaacatttactaatatctgtgacaaaaagagcacgtgtaaacggagatgatacttctaaatttagattcaggagtcaggtctaaagtggagttgtgatctgaaattatttatttaagctccaacttcaagagaggtagagctagaggtggagctgtgctaactgccaaataaaccattattaagattttatagctttaaaattttaaagtccaattaacaaagttaaattttgaggaagccaaagattacttcgtccgtttcaaaatgtagttatttttgaggttggcatgagtattaaaaaaagtatgtgagaatgattggaggaagtgtgtaattggttaaaaagataaagtaggtgaagaagaatagttattattggttgagataatcaagtaggtggagaaataatttcattttgacaggacattgagctagaaatagctactgtagtacattttaagactgagttcggtgttaaaatttttttaagtatacggacacacatttgaattattaaacgtagattaataataaaataaattacaaatttggactgtaaactgcaagacgaatcttttgagcctaattaatccgtcattagcaaatatgagttactgtagcacttatagttaatcatggcgtaattaggcttaaaaacttcatcttgaaatttatatgcaaattgtgtaattattttttttctgtcacatttaatgttccatgcatatatccaaatatttgatataatggagaagtttgaagtttttgaaaaaaaatgttggaatctaaactgttcaaattgcagctgtgggcttgggtggtgggcagcttgggtacgacgatgaaactttggaactcaccgcggacgcaaaagccccgaagcatcgcgcggcggaaaacacgtggagccgggcgtggcggccgctttatccgcaaggaatccgagtatccgacccacgcatccggcaatccgcgacattgggatgtggtgcggtgcacagggccacaggcggccagagccccggaggcccggaactccacgggtttaggatatgatttgtcatcgtgtcttatcgcatcatcatcaccagcgttgcatcgactctcttatcttttccatcttctagtagtatttcttttcctaaccttttcattatggcatatgtggtgcactattttatactcctgggccctggctaggcaaagataatcccagtgccggtgtttgtttgcgttaattaggtgtatatgatggacaaaacacgttatcgtacctaaacattctggattctgaaattttgatcttcattctgaattctgaaaggagacagcaaatgaagatctcattgttttcattatgtagagagcaagagaggaacttgtacaatagcagtgaagcaagcggcctgtcaagtgttatgtcaagttgtcgagacccactcaaagtattttgcactgtggagcatgtatctttattggggcttgggcctactccctttataaaaaaaaatctttagaattgaatgtaacatatcctaataaaacgaatttgaacatagtcatgtttaaatttattgtattgtgacgtgttacatccagtactaacttgatttttatgacaagagggtcatcaagtactacccgcactgctatatcgcactaataaaagatatcgagcctgccacttgtatcccgttctgtcggccatttgtcctaatttattcaaacccttttttttcaatggaataaccggtgtatctaaagccagacaacttaacttgctttcatgagaatggcactgaaggatagagtggagtgaattagcacatgcttatcagataggggcacactagtacggacttcctccgtttcacaatgtaagactttctagcattgctcatattcatttagatgttaatgaatctagacatatgtatgtgtttatattcattagcatctatatgtatgtggccaatgctaaaaagtcttacattgtgaaacggaggagtaccacttagaatgacgcgatacacgttggaaattacaaaaatcgaacacaaccaactacttccgttttatattataagtcattaatttaattttttttcttagtattttaaagtttgatcaagtttatagaggtatatactaatattatcaatacaaaacaaacatattatcataatatattcaatgttaaatttaatgaaactaatttgatatagtggatgctgctatttttcctatcaatttgaaaaaatctaaagaattttgactaaaaaagttaaataattaaaaatataaaacagagggagtaataagcattcataattcaagcaggaccattactttggcagattcgattcgatcctgcgctgttactgtcattctcccgtactactactgattaaggcgtgctttttgttggaattaatgaatgggccttagcccactcgaagattaattctttggaaa

SEQ ID NO: 12087 - DNA, 16768 bp, Oryza sativa
  unsure (1)..(16768): unsure at all n locations
cccactttttatacacattttggtatgtgaaattacaatgcaagagagatatcggtagatgaacactgtaaaactatgtctttggatgatacgaaattcatatatgttgagaaaatatagggaagaaaattatttatttactgaagtttgactgctttaccacattatgaaattgacttacattttagaattttacacgtttttataatactctctttgttccagaatatagcttacctttaacttaactatgaaataagctatgaatttgaacaagtatagaaggtgttcagatttataggtaaaagtagctatatatttgagacagagggagtgacacacgctcacatcacattttttggattttttaaaagcatatatttttactatagccttttggaacaaaggatttatgcaggaattttgtaccatcctgtaagaaaatttcctatatggccctttggaagagaagactgtagcttttcaagtaatgtaaaattccaagttaggaataatacatagtgtgaggattttggaaaaaaaatagttaccatgaggtcaatttcttgaaaaatatatttgaagtctatttatttcatctaatttctttgtttttttctatagcctattcaaacggttattcaaatatcccttgttcttctatttgtgtgttttgccatttttgtatttcaaataggcctaagtgttatgcacgttttcattgaattggtgcttgtatcctgctagttttttttcttttttatttattttaaatcacttctaaatttcaaattcacataagtatatagaggcttttggagctattttgtgcagaattaaattccactcttcagttaatatatgaggcacatttcagattctttgaaaaaaaacagaattttagatgatctttcactggaaatacactgtttgtacagtttcaattttcgagagcgattgagcacatatactccctccgtcccatagtataagggattttagtgggatgtgacgcatcctaatactgtgaacttgtctaaatttatagtattaggatatgtcaaatcctactaaactatattcaaaaagatcatctcaagatttattgtcgatgggtttttctcgagtggagtagaaaaacaactcagatttgtttcactgacgtgtgtcccgcttggtagtgagcccatatattactggctcattttagagggaagtagtatacaaatttacgttttgattgagacaaggaaaaaatcgagaaaatacataaaacgagataaataattaagtattaattattttttattagaagaccatttaacggtttaaaaattatgcgcaccgaaactagagactttctcctcgtccccgaatagagattatactatggttaattggcgatgtttttgttggagtggaggagtacaccagcagtacaaagttgatgtcgatttccggtgcgtgagctcagctccctcataatttcagtacctgctacactaattgcgcaaatttctcgaagtcacgtcaaatcttttggggtaccatagcgctgaccataaatcttacaccgcacagcacacgaggctcacactgtgatgaatgcatttgtgtttgccagggtgggtttcaaattcggataaggctttccgttcggtttacagaattgaattgaacatgatgaattgcattgcggtacaagggatcctctggaacgaacgattgttgaagtaataacgttttgaggaagggtgtgtttagtttacgttaaaactagaagtttggttgaaattggaacgatgtaacaaaaaagttagaagtttgtgtgtaggaaagttttgatgtgatggaaaagttgaaaatttgaagaaaaagtttggaactaaactcggcccaaatcctttgaattaaggctgtgtttagttcagcgtaaagtttagattttggttaaaattggagatgatgtgactgaaaagctgtatgtgtatgacatgttgatgtgatggaaaagaagtaaagtttggatccaaactttggatctaaacacagcctaagggttaattcgatccataccattgcaactttatcaatttacaaaaaaaaaaataccattactgttcacgatatcggctgagtgtcactgaaattttgcaaaattaaaaccacgtcatcgccatcacattttctattcccctttcatcttctttcttcttccttctctttgtctcttctcctccccgtgtgccactcgtgcctgcgggtcttcgatgaaccaccgccacgcctgttgctccttcccccacctccccggcatgctcaccggccagtaccaccagcatcttcaactcctcctcgcgcaagctccgacaagactggatccaagcgcatgtgcttctcggccgatgtcaccgccatcttcaccacctcctcctcgcgtgtgctctgaggaggctggatccaagcgcccccgccatattctcttcacctcatcctcctcgcatcagctctagagaagctggatctaggcacgcgtgctccctgggcggtgtcaccgccatcttcaccacctcctcctcacgcgagccctgggaggccagatccaagcgttgcatattcatcacctcctcctcctcctcgcacgagttctgaggaggctagatctaggctccgccgccatcgaccggatcctggcgccactgcaatgttcaccacctactcctcaccgctaatggagaggtgatggtggtcaccactggggtcgctttctactccacctccatgttcttcatgggcatcggctgttgccctcatagcttactgctccgccgtccctgacgttgtcctcaccgcgtgatccctctctgccgttgacctctcccactccctgggctttggcagcggcggccttgcccacttctccggggctcgctggccggcctccgacctctctcactccctaggctttggcgccgctagccttgctcgcttcgccggaacttgctggttggcctccttgcagccgaccctcgacggggagaagaaggaagaagacagaagggatggaaaatgtgacggcgatggcacgatttcaattttgcaaaatttcgatggcactcagccaatatcgcaaatagtaatggtggttttctaaatcggtaaagttgcaatgtgtcggagggtgaactcctcaagcggggggcagagaggccctccttgttagttcgaccaggggcagcgggtgaaaatcaagaacttggtggaatgtgtggtgtagagggcctagggcccctcgtgagcaatgagacaaaagtggtttatacaggttcgggccgctaagaagcgtaataccctactcttatacttgattgatcgaccaaggaatataggcgcttgaatcaatgagaaccaagcgtgagttagccaaagaaacgatctcccccccccccaaaccaggcctggacctccttttatatctcaaggggctgccacataggcctcgaaacctgcctaggggagagggaggataattacattaaatgcacgtcttgttgcttgccttagaagccattcacacaccgaccatggcgtggggcctgtcaattccatccggctgacacgggggacacgcatgtcattcactatttaatggaggaagacttttgggtcctcacttgtgtcgagaaacagaaaccctgctctggttgggttagatgagttgactccggctgtgatgagaggctaaacagcctctcatcatcatgacgtgacaagggatgccaggtggcacaccgcctgacatgcaaccagtgcacaggcgcactaccctggtcacatcggtcattcgaccagtctcagaccggtcacagattggtcaggcacactacacgccgcataaaatgccttaaatgcggttaggtcggtgttgtgggcgtccacctaaccccgtacatgcggcgtcatgcggagggggtaggggcagcccaatcccctggcatggatggggtggccgccgccctacctcgggcctgacccccctcgggggagcgccgcgtgggtactagggacagcctcctccctctgagcttgataccaccggaccgtatcaccgacacaatgtcatggatcaaattaactcttgaattaaaggaatagccataaaagaaatcatatcaaatttctttggatagactcaaaacattgcaatattggaggaattttgatattagatccaacctcttggaaaaaatattttgtttttatatctcttttcttattcgtgcatttttcatgtactctatctatacgatgattcctacattttttttctcaatcgataagatttggagtaaagttccaggatactccgatcctgtatttttcatgttcttatattttgatcatgagttccaaaagactaaactttccatcaacgaaaatccggtagaaacgaaagtgggttgcaattcaatttccctttttggttcacaagcaaattttcttcaaatgaaaattgttacatataaggatggtttggtttgctaccattgtggcaacatacattattgtggaagccaaacatggtctagttggcaaatttgggtagtaaaccaaacatggtctgttcaacttgccaacattttcgctaattgcggaagccctagtgatgataacatacatgaaacaattagacaaactttgatagcatagcttgaagatggaatagtgccacaaacacaaggcagctgcgggctgcggcagccgtaagctgtaggactggctaccgaacaggtccgatgaattctagaatttgatgttaggattttaggggcttcgttgttaggccctgttttgttcattggtgaaaagttgttgcgtgtaacattggatatatggacacatatttgaagtattaaacgcagtctaataacaaaacaaattacaaattccacatgtaaactgcgagacgaatttattaagtctaattaatatgtcttagcaaatgtttactgtatcactatattgttaaattatgacgtaattaggcttaaaagattggtgtcacaatttacgcgcaatctctgtaattagtttttttatctatatttaatactccatacatatggcaaaacatacgatgtgacccagtaaaaactaaaaagtttttgtttcggaactaaattgtctagttctccttagcgactgttaaagaagataaagtaaaaacttatagctaatctattgttaaaactcaaactttaaattcaaattcactttgagtgaaatgccagcgaaagtccattggaaagatcgtgcttgaattcataggcggaccttagttaccctggcttgttgacctaccagtgctaccacagtacaaagtataacacgttgaggccaagtttagatctgaagtttttcttcaaacatccaacttttccatcatataaaaattttcctacacacaaacttctaacttttctatcacatcgtttcaatttcaaccaaacttttaattttaacgtggactaaacacaccctgaatctgatcgtttgagctttattttttcaggggaatcgagctttggttaataggccgtcgagaaaaggaatgataaaactaaagtaatgtatggttatatttgtattatcaatggtttaacatgcaaatctgcagaataaaccacgatgaagaaagtacaaatcaatcaattataaagttttaaaatttaattttaaattttggctgaaatgaagagaggctaatgcgtaattaaggtcaaattcatcttaaatacagaagtaactgaaattactattttccatacaccatcatctattttttttaaacaccacagaaggtattgcaatttgcacatgccaaagtacagaaaacaagctgctactggagtaccgtatttttttttctaaaaaagcatcaagttatatgtaactaaggcctggtttagtccccaacttttccttcaaatttccaacttttccatcacatcaaaattttcctacacacaaactttcaatttttctatcacatcgttttaatttcaatcaaacttccaattttagcgtgaagtaaacacactcactctaagagtgaaccaatcactcttaaaaacttatcctctccatccaaaaactctaatctaattcaagatagaatatatactactacctaatcctatgaatacgtccagattcattagatgaggtaatatctcatttcaactatagattgagtttttttttacggagtatataccccacctgtcagatgccataccgccatgtcagactgcatgcggataagaacgtccacgtcggatgccacgatgccattcctgccacgtcagcgtcccccgctcctatactcctttaaaacccggtcccttctcctcgtcctcttcccccaaaattccacaacaaaaaaacacccccaaaaaagatcaaaaaaccctaacctccgatcgaatcatcgccaccctccgccgccgccgccgcccgccgtctccggccatgtccccgtcaatcgccgcctcccaggatcgcgtctcccggtgattactcccccgcgccctcgtctccattttcttgtgctggtatgagggccgccgccgcccccgatccgtccccggcgccggcgaggtcgatgctgaagcggctgttcgatcgccagctgctgcgcgtctcccccgccgagcggattgtggcggtgggcgggggggagaaggatgaggtggagccgagctccgtgtgcctggatggcatggtgcgcagcttcttggaggacgggagcggcgtgggcgcggctgtcgagcgggctggcggccatggcgcgcggcgctgcaactgcttccatggcggcgggagctccgacgacgacgacgacgaggacgacgccgccgcgtcctccgacgtcgccgagacgatcaaggtaggtggggtgggcgaggaggaggagaacgacttgtggtcttttattttacttttctccggtggccgcgccatggcgtgcaaggacactgacctcgccgcgtgtcgtgcaggggctcgtgcactgcgccacgctccgggagcgcaacctcctcgccgacgtctgcggccacgtggagcggcaccgggcgggcggggcaaggaggcgggagctcctcggcctggtggcggcgtcgctccgcgcggcggggcacgacgccgccgtgtgcgtctcccgctgggacaagtcccccacccaccccgccggcgagcacgcctacgtcgacgtgctcctcccgccggcctccgaccgcggcgcgcgcgagcgcgtcctggtcgacgtcgacttccgctccgccttcgaggtcgcccgccccaccaaggcctaccgcgcgctgctgcagcgcctccccgcggtgttcgtcggcaaggacgaccgcctccgcctcctcgtcgccgcctccgccgacgccgcgcgcgccagcctcaggaagcgcggcctccacctcccgccatggcgcaagcccgagtacatgcgcgccaagtggctgtccccctacgaccgcgagccagcgccgcccgacgaggcctccgcctccgccgccgcggccgaggtcgctggagaggaagcccccgccgccgcgtaaacaagaggtgccgcttggaattttcaaccttcaggagggcctaaatgcaaagttaaatttcttcgattttaacacttttttttggggaatctcgagtattttggggagtgagaagagtatgtattacgcgaaatggagacagcaatatgtagtgtagttttagtattaggagaaaacaagaagtacaaaaaaaaagaagaaatcttttggttaggatcagatcaggttagcatccacttttggtcccaaattaagcctataatatttcataagtagtagtactagctagaagcttgatcatgatagtatggtgagattatggccattaggctcctgtttgttttcatttttgtaagcaaaatgttgcccagcagacaagttgaggcgagagatgagtacatcatacacggagcttttgattttgatttggattttgagttttgatccccacaaattagaattgtgcaatattttgtaggattatatgtttaatatatacatgttttatgaactgtttggaaatgagcacttatattatgtacaaagatttgtatataatgtttggaggaagaccgaattggagggtatgcttcccatttaaaacctcttgagtctgaatcttttcagacaaattcacgccttcgttaaaaaaaggcttgatttttttgtttggcttcctggatataataatctacttaaattgaagtgattcgtgtaaactttacagtagtatggctcgaagtcaagctggtttgtggtctttctctcagtttctagaacagtctctagtcttggtttctttttttaatttaaaaaagagaacagttttagataacgacgaagagcaatagacgcaagataaacacatggatattatcatattactccctccgaaataataatacttgtcgttttagaaaagggtgagattaaattttagaatctttgattataaatcatttttaaaatatttgtctttcaaatatagtgattatatgtatagattcgtcttaaaaagtactttaataaaataatatatttgttaacacttttttacatattataatagaaaataatggtcaaagttgttttttttgaaaccgtgcccttatccaaaatgataagtattatcaacccggagggagtattagttttcatttggtcaaaatatattactaacaagggaagatttcaaactgttgaccatacatatatttatcattcagaaaaggatgtaatagaagttatagccaaaaagaaaaaagaaaaaaaaaactgaatcctctcacgatcaataaattactaacggagtgtttccccccactaataattcaaggtaagtggctgtcttatcacctaaaaggaatatgctttatgtggtgaaaaaaaaggaaaagatattctccatcatctctcttaaaaagttaagaatagagttttaatactactaaaattcaaggtggttgtacagtggaagcaaccaggtgccggttgttgcaagggagacaagggcaagtggcagatataggatttttattttctttagttctttctgttcgttttgtgtgccaaaaacttaaaaccaaatctgcatgaaaagattatctgcagaggttggttgggttggattagaggatggacctgtaggtttgataattaattgccatttgtttatccagtaggacaatcttgttctagaggattctctgtggagtttggactgtgccaattctagggagtcagacagatggataatgccaagctttttagagaaaaattacaatttctacaacataaaattagttttattaaatccatcattaaatatagcatatctgctttgtgtttaaaatgttacatttctctataaactttattaagtacaaactcgaaacgttttataatacgtaatgaagggtgagctcttttttttttccattgaagactgataggggaaaatgatatgaaaagaaagatggaattatagaccctttttgcccaaatcttattttaacattttactcacttcatcccaaaataaattttacacatgacaacctactactcatctcgcatagagtacaagaagatttttagggtgaacaaccgtagtactccctccgttttgaaataaaacgatctaggatgagatgagatatatcgtaatataacgaatctggacaatgtctagattcattatattaggatatatcctatccatattcgttataccatgatatatctcatctcatcatgagttgctttattttggatcgaagtattagaaaggaactgaaaaatgagaaaaaatacagctagtatgaggcggaggggcccttttgattcacggaaatagaaaaaccaatattttaatagaaatgcaagtgcaaaataaatgattgcaaatataacaaacaaaaataaccgtttgattggaacgcacgaataatgatagatagactcaagagaaaatttctaggaggttgaagttcttgctaaatttccttcaaactatctatatgattgtccgttccataggaatttaaagaataagatatgattcaattctttgtttcaaaaaccttcatagaatatttttctactatagagttaaaatccttcaattttttttatcttttcctccaaatcaggcccctttgattcaaaggaaattcatatgaatttttgaggatttcattactatagtaacttttcctatatgtccctttgaattaaagaaatgaatactatagaattctaatatattacctattcccataaaagttttagaaaaaaattaacatgagctaaaagctccttaaaagaattctttgagtttttaccgcttctcaaattccagtgttcttcatagggcctaatcaacatttctatgtttttctgtgttctacggttatctattttacacttacatttctaccaaaataccatgttttttctatttctctatttttcattcatgtgattaattaaagaggtctcaacatctactagtactactctctttgtcccatcaaaaatcaaccagtactgaatctatacatacatctgaccacattcgtcatactgtattttgtcttattcagttccaaaatttatttttttatagaacgaagaaagtagtacgcccttcccggaatcccgggctgtaaatcgctgccgtacaagtacgggagaggcgatgagatgatcacgggcaaggagcgaggagtacgacgcgtggggtacgtgagcggcgggcccgatgtgtcgcgtcgccggtgaccgctcgcctcgccctcgcctgaccactgtttttactcctcactccgccgctccatggcgggccagcagcagcagtgtttattactactgcgctgcaccgtgtactactactgcttctgctgccaaacgctgttgctcccgttttattgcacgccaaaattcacagctcctccgtttactcccgtcctaaccagggtgtgatgtgttgtttcagtaccttatcttcacattcgtgtgtacaaaagttagttttttttttgccgagtttagttccaaactattttttcaaacttctaacttttctattacatcaaaacttttttacacacacttccaactttttcgtcacatcgttacaatttcaactaaacttctaattttgacgtgaactaaacatacccaaatgttttaaagaagaagttaaacaacaatggtattgattttaacacagaaaataatttatcaatattttgtagaaaaagtataatcttaacttatacgacctttacatatttatactaattttttaataagacgaatgttcaaacgttatacgaaaagttaacggtgtcgtacataaatgaagtagtatatagcaatgccatgtaatcctagtaaaagaataaagtaaagaaaacgtagggcatcaatgaatcaattgtttagagttcagacaagtacacaatacaagttatatgtacagcgctgcagctactcggagtcgtcgggccgctgtcaatccttacattgggtccttttctaaataggcattgatcactggattgatcaaagataacacggcagctagattgtgacgtccgatgatggatcgatcggtatgcacggagaaactttcctaagtatacttgtttcaaaaattcaatgggaatgtacaattctcccatatatgttgtaagcttaaactgtagaggctaaacattctcccttctttgtttatttttcatcacgaaaaaattgcaccgcctgtgggttaattttcaaagtgagctttcaaaacaattgaaaacagtttgcgagcataccttaattgggtgtgccagcaagagagttcattctcacgatcgatgagacaattttttgcagacgaatggtttctttcaaatcctacatggaatagttggattctataaattaaattaaatctttataacaaaataaaatgaaccaaggacacgtttcccaagaggtgttgtgtcataggagatcattagctctagattgtctctatgggcacactccctgtaaggatattagaatgatcaactatcgcttgaattaatgagggaaaagaaacgttgcagataatccatatattccaataaagccccacttaatttaaaggcttcgtttcatatgaagtttgcacatttgaaggccaaaggaggggcattctgcagaatttgtggcaaccatgagtaggatcataaaaaccatccaaattaattaaaacgagatgtggggcattcagaactggtggagagaacaggataatgacatcctctcagttggatctatctaccagttacatgcacatggacagaaaaccagggacagaatttttctagaaatcactaaacaaacaaaccttccatgattacaactaattaaacaaatatcaaggattggttagctagcagcatcagttcagtaaacaacagtccactggccttgttgttcagttggttgagtcgatgagctatcacatgcttttgctgatgagactactaatctatgggtttcggatacgattaatcagcaattaggagtagcaccctaggaggaatcatgcatagtttactcctaattatgttgctttagttgagacctccaatcaaccaacttgctatcagtggccaaaggcgttaggggacacacatacacacacaaacaaatatcttaggttatgtccaaactaatgatagtacaggtatgacaacccatggctaagagcacacacatgcacccacaatccaatcaattatttttcaaataaaggaactcttgtgttgattttgttgaatttttataagagatttgttgatttaatcgtactcacgtttccattgcaattatattttaggattattggatttagaattaactttgtcttttctcccccatgaattcgaaataattgttaccgtgcaaagcaaactagccatgtgtgcatctaacaatacttatcacatccttgtctgtaggtcgaatttatataagcatatatattacctgctaataagtccaaatgctcaatcatttggcacaaagaacaaattaaattgtaggggttgcaaattgcaatcaaggagaaagaaggataggtatccgattaagttcctcacgattaggtaaactgaaagttacactagcttgataggagagaatcttagggtggtccttcatttgatgttgcactagcaccaaaagttgccaaagcttctttctttttccaacttttttttttcttttgttgctgttcttcttttttccttttgccatgctcaatttttgagactaccatacatttttgggttataggacttcagtgttgctgttgtcgtctttttcgtctcttgacgccttntcaattcgatccgattccgactgaaaatatggtaggaaaagtatacggaaaaggatatgtagaaaaaaaagaacacttgtcattcggagttggaaatcgacaattcagtttcatggctccttttgttcagtaatcgaaggatggattcttcacggatgaaaatttggaggcggcacacaagaacaatcgtccacaaattatgtgcctcataataataatgggttgtggaatcttgcattagcaccagtactagtgtccgctttacccgtttaatagagaattaagtaatatcaaattatagttaattaatttggaatgctgttcgaaatccaaatttgaaagcgcaaggcatgaattcaaaggctgttattggcttattgcagcatgagactggccaatatcctctgggcccttttcctgagcttgctaggttttgtaaagtcaaacgatgctcgggccatatctgatcgttttggagtggagaaagtccactttacatccctcatataggttgagtttcatttgtgctcgtgaatagcaaaacagagcgttcgtcaatcatcaaaactagtgtaaatctagtccttagcgattttaaatggtggttttgtgtatacatattttatggcccatcgatttttagggtatatgtggtgtgttgacttgttcttcatcccatatgacttctacacacactaatatacaacaagacaaaaaaaaatcaattaagctcgcatgtcagtcataaaaagaaaatggtttacccacatgtcagtcgagcctctttctccatggccctggataaatggtgttgacagcgattttgaccgaaatggctttttgaccctgtttacatttaacgtggcgtttatattgctatgaggatatacatgaaatatatggttttcgttccactatcactaccttctccgccatcgtcaaccctctgcaactacaagcacgagagttaacagaccgtttggttggagggagtttttaggagggattaggagtttagagggatgaggctattaattgttttgtttggttgggagacatgcgaatttaggtgggatgggatggggaattgaggaatgaactctctttttttcaataactgggtaggggtggtaacttggagggacgctcgacatagaattttgcggttgacatcgagacctagaatggactttttcctattgtagtagcccatacctgggccgttcgatgtggcccacaatttgtttctcttttccagcccctttttgttgggcccttgatgggcaacgtaccgcagttcttctgcgtcatgggccgtactcactatgcgtgtggttttgtgtaaaaaaagaatctatacatgggtcatgcgtgtggtccttatttacatttaagagttcttttaaatattatttgttgataggcttctgatgatatttttcgaaaaaaaatttactctaaatacatagccgtgatatagtatttcacagcgtggtaagctaagtatagattttttttgcagtacaattttagtggctctacggaccaagcatccttttcctaaatcctattcctacgtgacaacctacgccgcgacaaatcccacagtgctacgaacgtaccgcagggcacgccctttaaaccgcaggattagaaaaaaaaaaggaagaaataggaaaaatataggattgacagaaatataagtgtaaaacatagcattgcaaaacactgaaaaaacacatgaatacttgtttaattgggctgcaggaaaaaaacgcaggaatcggataagagaggtgaactcaaagaaatttttccaaaaggttggacctctcgctaagtttccttcaaaacctatatgcaatgaattgtataggaattgaaaaactctaattctttgaatcaaaggaccaaatagaaaaatttcctatagaaatataaaattcctccataaatcctttgattcaaaggggccctaatgtcatacatacgtaccatcatttctaagggttctagtttaattcctataaatttttgtcgctcttaacgtgttgtctttcattactaaaagtagtatttttttcatgcgatcaaaacctaattttacatgtggtggttgagccgtccgtctacccggaggtgtatgcaaaatcgttagtttttcatgtgggtggctcatctgcacgcgaaaatcaaattttcgtgggcgggtgcttatgttgtttgcctgtgaaaataaaaaacagaaaaaatatcccaaaaaaaatcgaaacacaaaaccttagctaagcttccatccgccggtgacgttgttgccacagtctgccaccgatcgtggtcaccgtcgccgagtccccgtagctcatcaccaccatcacccctccttgtgcctccatcactgcccctccgtaccccaatgacggtggcggcacatatccaccagatctgcctatcgtagggccgatggcggtggatccacccattatggcaccgtagtcgctgtcgccattgttgttgctgagcccggtaatgcccagtccgttgcggctccgcttgagcccgtcgtctgccactccacatgaggccacctctagacatactcaaccctgctcgcgctcacacaaggtcctcgctactacccgctggccactcctcgggaaaggaagtcgagggagagataagaggttagaaatgagaggggtggaggatagggagtgagacataatatgagtagaagatgtgagggagagaaggtgaggaagataaggatgaacacttaattttttctttttgaagatgttgagtgggagaacaggagtgaggtcagacttgtaggtgggtatttaagaggtccgcttataaaaatgtattttcgcatggggccgcttaagaggcccatttagaaaaataagtctatgttacactgaaaatatttgccgtattcatgtaattacaaccctatctatacatattttattgtcggacccaaaaagttaatatgtattaattcacctttgaatttctctcatgctttgatcacaaccccacatgtcatgtgattttacagtgcagttcttatcactgtaaatatcaacatatatcgagccacattcaccttgaaataatactaaccattggacctttctcatgctcgatcataatcattgatgcctcgttcgatgtggcgttttggagatagatttttgttggacgtaatgagaaacctcattatcatatgattaattaa

SEQ ID NO: 12088 - DNA, 11637 bp, Oryza sativa
tcgaattcctgcagccccgctgccactcgacaagctggtgctcgtccagcgcctgaagcagaagggccacgtggtggccgtcaccggcgacggcacgaacgacgcgccggcgctgaaagaagccgacgtgggcctctccatgggagtccagggcaccgaggtcgccaaggagagctccgacatcgtcatcctcaacgacaacttcgacacggtggtgacggcgacgcggtggggccgctgcgtgtacaacaacatccagaagttcatccagttccagctcaccgtcaacgtcgcggcgctcgtcatcaacttcgtgtcggcggtgaccacgggcaggatgccgctgaccacggtgcagctgctgtgggtgaacctgatcatggacaccatgggcgcgctggcgctcgccacggacacgccgacggcggggctgatgcgccgcccgcccatcggccgcgcggcgccgctgatcagcaacgccatgtggcgcaacctggcggcgcaggcggcgtaccaggtggccgtgctgctggcgctccagtaccgcggcttcggcggcgccggcgccggcgagagggcgaacgggacgatgatcttcaacgcgttcgtgctgtgccaggtgttcaacgagttcaacgcgagggagatcgagaggaggaacgtgttcgccggcgtgcaccggaacaggatgttcctgggcatcgtcgccgtcacggtggcgctgcaggtggtgatggtggagttgctgaccaagttcgccggaacggagaggctggggtgggggcagtggggcgcctgcgtcggcattgccgccgtgtcgtggcccatcgggtgggccgtcaagtgcatcccggtgccggagcggccgttccacgagatcatcacggcgaggaggaggaggagaagatcgacataactatcaacgcttaccactgttcatattttcggatttttgtcggtagcttaggccattcttttggagatattataccatcttgttatttgccatatataatatgatatatgatttgtttggttcatcaatattactcatatcttttctcttttaggtcttgtccgtctaatctctcgcctaatccctttctcataggagttattaaacgaacaaggctttacgatatgccatttgccattttgtcatcaggcgtgacaactgacaatactcagatttgtgacacagaatttcataaaggacaaggcgcgtgcgtgcggctacgtgtatctcacgatgcataatgataataagttgggatttgctctatctcttccatgatctgaaaaatgcagaattatgtgaatgcaaccctaacctcaaagtgcagatatgtgctctgtcaaatgatttaggccgagtttagttccaaactttttattcaaactcccaacttttctattacatcaaaactttcatacacacacaaactttcgatttttccgtcacatcgttccaatttcaatcaaacttctaattttggtgtgaactaaacacacaggccggcctctgaatatctgattcagatggaaacctgaatttcaaacaggctagcagcatgcatcaagtaagtgtttttggcagtcgttgtcagaaccaagaaactttggttgttgcaaactccgaattcttgttgtcactcataaataacgattcttcccaatgttcggcaggagatgaggatcggatagttaggtatcgtaagttgtgatgagtcacaaaagatagtttgctccagatgctgagcgcaaggaccaggttatttttagacttgaactcagaaagaatgttacagaatttcctggacgtttccttcaaagaactctccatttctgtcagaatgggtttcgccttttgttcatatggaatcaacttataccacactgaagaaacaatggctcgtgaatgtacttacattttgttcatatggaatcaactttttttgaaaattttacagcgtgctgctccgtctttgcaagtttcagtgccacttctttctatcgccagttgcaacacgtcaacaaaaaagagagtaaattgcactttcgtatatgttgtaacagggtgtaaatgacatcccccacataatatgataagaaacttttgttcccaaatgcggttcttgctgtcactcagtaacaacgtttctaccaaatgttcggcaggagaatcggatcgttaggtattgcaagcttgtgactcaaaacatggttcattcggtcattacatatgctgatatgctcagcgctgggatcaggttgtttctatagacctgttatacaagaaagaaagttaagtgaatttcctgtatgtttcttccagagaactatccttttctgtgagaatggggtttcgcctttgcttataccaaactaaagagacatttgtttgtgattttacttacattacttttgaaaaattctgcagtgtgggtggcaactgctcctagcttctttgcaagtttccattgcgaggtctttctctcactgcacggtaaaaaaaaaaattgacctgaataatttagttttcacgtccttctcagattaaccagtaatgagaactctctcctgacaccgtcaaaaaattacttctagtttagtttaaacgtccttctcatatttacccagcagtttcttgggaatgagaagttaaggggaagtaaagttcattctttgagaagcttttgacagagtaatgtagatgaagtctaagtaaatttacttaggatgcatattttttatagtagtgctgaagacaaggttgtgtactgagcacaaaaaaagtctgaatttcctgtccatgctgatctaaaacaatgaactggtctaatctgattatctgaagaaccatctaaaaagatcttaacttggcaacttttgttgaaccaagccaatttccaccaacctataggatgtaaaattccttgaaaataaaacaaatcacaacaatacatcacattcccaaacgactgttgctgatcttgcctgtcacacagttggaaatgcaagttcagagattcacaggtactgtaacagattggctatacaacttacctgggattgacaggtgcaacaaccatacagagaacatcaaacacaaagtgaaacaaatgaaaaataaggcaataacacattaggctatcagcctatcaccagtatgaaaattgaagacagctgaacataaataggcccatttggaacacaattctcccatttcctaggagaattgagtgtttcctacttcctctgtcccataagataagggattttgagtaaatgtaatacatcctaggacaacgaatctacgtcacatcctccccaaatcccttatattatgggatggagtataatattcttgtagatatcctataaaattccaatgttccacacatagtataaacaaaaaggaaattccacaaaaccacctgttctgatgcatcctggagtgcaagtcccagaatcaatcaaatcactatgacatctacaaaagcaaaggtcagtaagtgatcaacaaacttgactggacagcagtagcaaagctcttgaaacctgatcataaatgacactaaaccatacatccagttcttctgaatgagcttaaacagatgcagcctcagatagtcagatagcaaaccatcacaacatcacaagcaagcattgtcatcaacaagtaacaaccaagcattagctagtcacccaacagagagaaaaatataagcagtttcacatcacaactacaccaagctgctgcaagtcaagtcttcagccctaccaccaaattaccaaaggtttagccagccattacacagattcaggaacacctaattcaggtaatcaccataacaacaagtcctaaatgattaagactactagtgaaaagataactgggatttttttctcactaatcccctagcagagaggtcatagaaaacttccaagaacacatagccgccgctgcctctcctactccttggcggtcttgttgatgagggacttgtggatgtgcgggatgacgccgccgccggctatggtgcccttgatgagggtgtcgagctcctcgtccccgcggatggcgagctgcaggtggcgcggggtgatgcgcttcaccttgaggtccttgctggcgttgccggcgagctccaggacctccgccgtcaggtactcgaggatcgccgccgtgtacaccgccgccgtcgcccccacgcggccgttcgccgacaccctccccttcagctgcctgtggatacgccccaccgggaactgcatccgccattgcccccaagaaaacaagcatcagtgagtacgcagttgtgcaagaactagtgaagctttcggataaagaactggaacaacacggggtggatttgcgcgaaaaattggggggaattcacgaaggcgacaaagatgaacagtaaatctggcaagaactagagcgttttgctaatgcactcgtctgaaattgaatctgctaacgaagctaagaacagaatcgacgcggaaccaccagatctaccaaaacgcagccaagaaaccgcctaaaaccatccagatttccgcaaccgcagccgagaacaaccaagaaaaagatgaaccgtcgcgagaggcgcgtcggggaagggagagagagaacctggatcccggcgcgggaggagcgggagacgggcgccttcttgcggtccttgtccttgtcggcggcggccttcgccgccgtcgtcttcgccgcgagcagccccttccctcccttccccgccattgctcctcctcctcctctccctctccctctctcgctcgcgttggtggttcggctgcctcgcgtccgctctctctccctctctctcccccttcctcgctgtagaatttatgtcggtttgggaggagcgcgcggaggttttggagggaaattttcgcgggcgacgcgggggttttgggcgaatttcgaattccaccgcgcggcgaggaattaatttcgaggaggattttcggcggcggcggcggcggcgtgggtgggagattaagggagacgtgaagggtagagagcgtgggccttgttaacccagtaaaacacggcccattaattagacagtacaaactgggccttctggatgagctggaacttcggcccattaacttgtaggcccattttgtttgggctgctatttttttcaatttcctggcccacgtcaggaaatgaatggactattcaaggttggatgggctaggatgagtccccatccaacaaaaggaaacaaaagcccttgagtgttggactgtttcaaggactagccttttcttttttttttcttttgctatatatttttcgactctaatttctcttttcgaattaactacaattttcaatcggggcctcaggggctattacgctctcttttcccaaatttaagtcgttttatagacatattataagaattaagaaaacaactcaaaagattttggccaccctgcatattgcattgataaagataaatcatttgactgtgaaaaacgagcatttaaattttcatggaaaatatgaaatcatagttaaaagttaaaacaaacgtctgagctctaaaatgacttacattgaggatacctttaaaaaagataaagaatttacatttaaaatcaaaggcggttgctgggctacttggctgccgcagcaaatacgaatggtactcaaagcctgcaaacaccaagccagaagcacaactacaattgcagccagggttcacaaaccatttaggatgtggttatcgccacccaacaatataacaattaccgtaaggtataccgtggtttcaaaaactaagaagattaccgcatgtgataaccgcgttgtattataaaccttgattgcagcatccgcctgcagaacaggcctagggtgtagtaaataaaaaaaatggtgttgctatgaaacacacacacacacacacacacacacacacacacacacacacacacacacacacacatatatatatatatatatatatatatatatatatatatatatatatatatacctatccgtctcgtaaaaggctcaattctagttatgaatctagatatatacgtgcctagatttataattagaattgttttttcctgtacagcttagttaggtattattggaaaatgaaacaatagtacatagattccctggatggtggtgtacatctttgtgccgtggttggcccttcttcctcatctttgatgcctctatccatccatccatccacatcctttactggctttgagcagcatcatcctcagttccaactttcagctacaagccacaactttcaacagcatacagttcttccagctttcaactcaagacgaaatcaacttttttttttgttccaaggagctacaggcaattcgaatttagtccttctttagttggaaaaaattttttgggtttagatgtcgcatcggatatatagacacacctttaaagtattaaatgtagtctaataacaaaacaaattacagattccgccagaaaattgcaagataaaattattaagcctaattaatcaatcattagtaaatgtttactgtagcaccatattgtcaaatcattgcgcaattaggcttaaaagactcgtctcgcaagttacacgcaatctgtgtaattggtttttttctacatttaatatttcatgtatatgtccaaacattcgaagggtttttttcactttgatgcaattttcaaccatactatttttttaagttaccaaaaaaatctatgtttactttgttgccaaatttagttaatacataagaaatcctgctaaaattttggcaatattgctatcttgccaaaattttggcattgccaaaacttggtcaggtttattttggctataatctaaacagacccaatatgacagcgtgaaaatttttgttttgggaactaaacatggccttaggttaccagttcaaaatatttaaggacactttcattcatgtccaggataggaagtttcagtcaggaatttcaaggaaattgaacttcccgatagggttttcaacctggttttgaggggcctttcaaaataataataataataaggctctagttaactttggcagggttgttgcagtgccaactgccaagcctaacacagcgagaccaaagtgcacacttttagcaatcgccactgaactaagagcttgtttggataattgccaacatgaactcttccaaatatagataggctgaaattttcaataaagcaggatcattccactgttgccaaagttttagtactacattttttttcataacaacaagcatgaatgtttcattctgtcggtattgccaattctcttgtatggttagcatttgtaacaaaccaaacaaccgcactacacatacgtaaaggacgcttccaccacgacctacttcccattgcatcttggttccttcaaacacaatgtaagtaaatataatactactggtcactcaaactactttcaagatacattcttattttaaaaacaatggaatagataaacataagtagtcactcagaactccatcaaatacattttccaagtatcagaggactgtgaccaagaccaagagagacacctccccaaacttcagaagaccggtctatggcaaaaaactgatcacgcatacgagtagtaatgggtacaacttttgatctaacaagatataaggggactaagagcatcctaggagctcatccaaatttcatcccctatattcacatttagattcatccaaaaagattctcactctatattttttcccactccaacagatcatccatactacatcatccatatatattttattgtatctttcaactatcacatttatatcatttacatttatcttcctctcttctattctacccctcatcatctcttctattctaccgatgaggaggacgaggaggggcgacgtgcggtcatcgggcgaaggaacagcggggttgcgggcggtcgccgggcggaggaggaccggcggcgcaggcgataaggtcgcggacagaggagcagtgcggcggtcaccgggtggagtagccgcggcagagacggcggggttgccgagcggcttcttctccaataacctccctagcccagatccggttggtgccacctctctacctcccttcttccttcgatagccaattttatcgaagctgcgccttatcctccccgtatctcctcctccatctgctttgcttgccgccgttgtgaactccgggtgggggcgggagctcaacccagagcggcggttgcgatttggcgtgaggagagaggaacgccaaaattggtatttctctctcatgttttagcgatccgctacttttggcgttgccgatggcgtatccgctggaggctggttttttactcccatcctctatttcttagatggaggattggatggagcatctgtttgggatgctctaagagccacgtctataaggtagggctgaaatttagttgatttttgaattaaaaatatttaagaactaaaatgagatgtgaaagaactcgtagcccctaacggcctgacccattaccaccctaacagaacagaaaaaacccattccgttacagtgcagactcacacatgaacagtactccccgggacaatctgacgatgaagccatgattagtgaagaccaaaactgaagtgaaagaaaaaaataaaataaaaaagagctccctgattctcctccagcctctgaatttctgaaaccatcactgttaccctcgggcccatacgtcagagttccgtgggcccgagccgtgacgccaacctgacacctaccagtcacgtcccatcaagctttggtttgatcgtcttcaggcttcagcttcacaacacttcagaatactcgcaaatgaggacgccacgtcgtgcagtaatctgtctctgaaagtggtgctttgttcttggattagccagagatgttgccatctgctcaaagtctgggctcgtatcatcatcgctttaccacgggctcagtttcgtactagtaaaagaaactctgctactgaacaggaagtatcactaataattatattcctatttgatatagtgatagtatcttagtttttgtttaagataacccattagatgccactgagtttgttatgagtctacgatttgccattacctttgtcacgttctataatatgccatcgacttttgctaacctatatgatttaccatcgtcgtccggttattccccgttagtactgtacactttcatccaaatgaccaaaatacccctgagacaaaaactttcaaattttggataaaaattctaaaatgtaagactttaagtttttggtcaaattttgaatgtttacaatcttatgtttataatatggtattttcgaatttttgtccatattttggaagtttttatcttagggtattttggtcatttggataaaattgtacagtactaacgtagactaagcggacggcaatggtaaatcatagaggttaagtaaaagtcaatggcatattatagaacgcaacaaagtcagtggcaaatcgtagagctgtgacaaactcagtggcatataatagattgtctctttttgttttgtattggtgtgtatgggatgggtgaaaaataaacttattttggctctgttcggctgcccttattttcactcagtatattatttttgagtaaattgcaaccatagtatatcaacttggcaggtgggtacaatttggtgcaagaacttaagaaatgagcgttctagtgcaacaacttggcagatatgtgcaatttagtacatagttgatcgcataaatgcaacaacttataagatatgtacgattttgatataataagttcagaagctatgcgacaacttaattatttggagcactttttttatacatattcaatttttaagtacttattttgacaatatactagtgtggatttgtatataagcatatttatatttttatcataataactaataactaaaagtcaattaaactagatataaaaattattatatttcagttgagatttaggaaggtgaaaaaaaacaaaaattcttaaaggtaattatatctaaattggatgtgcatgataattcttaaagattaaatttaatattataaggtaataccgtaggattgctatgtaatggcatattgacatcgtgagaaaaactcacctagcatatgcttagctaagttgatgcaccaaaatactaaattgccaagttcttgtactagaacgtacacacttgttaagttgttgcattcaaatgtttaattctcaagttcttatattatatcacatccacccgccaagttgttgtaccgtgggtataatttactcattgttgtggcagctgaacagggccgttgtaacagatggagtagtataataataattcaacttattatacaataaaagttgcatatcagtacatgatctgttcccatttctctaatactaaacgataaggtggtgatgtctctgtcatgccatatcagtattgccccttcacttctctcttcaacagcatatcccttttttcttcagcagcaggcaggcagcatctctccctatcctattcccctttttaataaattggttttgtttaccaatcacatcacatttctgtgaccactcccttctctgtcaacaccacaagagatagagaatattaggggagaacttactcaataattttctggtttattggatatggttctattctgctaggtagcactgtactagtacagctttgctgataggggttaacctgatcagggtatggcagaaatgattggcttggggaaagaaggagaaaaaagaaaaggcaaatgttaggtttgatagtcacatgaactatgttgccctggaccatggccataaagttgttacacagtgtgcagctactgttcacaagttttttgcatttgacttttatgactccaagatcttttgacaggtattgttggaaagattaatcaccagcgctgactgtataaagcagaatggaaaatggtctgtcctcaaaaggtattactatgcacttaccaggcaccagccaggataaatagctggattattgttttttaggtacatagaagatataaggaaaaaggtacaaattatttattaaagacagttcgagttacctgaactacaacatcaaacactcgacactcctcgacatttcacaatgtacaatagcctcctcaagcatttctctggatggttttggcctaagctagcacatgtggcaatccaacgtggtagtgtgtgccaaatataggttgattccgcaatcttctgttcctctgtctccatctcaaatccctaaccccaaccccctctcccaaatctctagccgatgtcggacaacaatgaatcgatggatggctgtgatcgcaccaggccgtgattcctccattactagcgcttccatctaggcatgtgcatagttatgaaggaaagtgaggaatagaggagaggacgctaatgccaatgatggaggggatggatttgacaagagatttgcagtcatgatagatctgggtcttcccttgtagagcgacataatcgaggagggctgcaggaattcgat

SEQ ID NO: 12089 - DNA, 7407 bp, Oryza sativa
  unsure (1)..(7407): unsure at all n locations
cctgaaaaaatgtcataggatttcagacaataataaaataagatgatttttattttcgttagttttgcaaggaaaaggacaggatcgatatgacatatgttacatatgacggcgtgttcatatttaaattcaaaagacgatgaaacgatatttaaagctcgttgacataaccgatcgaggcggcatttgtcatgcaaattgaaatctccgttatgcaactttagcaagtaatcaaggacaatatgtgtacggggtagtacggcacaatggatatgtacgagatgatcgatgtgtacgttaaacccataaattatccatgactaattgggatgtctatagccggtccgatttaaaaacatacatggctccttcgtctcaaaaaaaaaatctcctccatctaaaaaaaagtatatttagttcacaataaaattgaaagtttagttaaaattggaacgatgtgacggaaaagttagaagtttacgtgtgtaggaaagttttgatgtgatgaaaaagtttgaagtttaaagaaaaagtttagaactaaaccaagccttaatctcgttcaatatattctagcacaatgaatctggatataactttatattccgatttgttctaatattaggttgtctttttttaacggatggagtatatgctataagacaagcatggtaaaatatccataaaagtatttattactctctccgttttacaatgtaagtcattctaatatttctcatatttatattgatattaatggatctagacatatatacctatctagattaattaacatcaatataaatatggtgcgtagcgcagaccacaattatttgcaagacgcgtacgtacggctgcgggcggcatgatccagccgcgtccatatgtaacaacaaaaagctcacctgttgacagggacacaccagctaatatgtacctggagtactacataaaaagtcaaagacttcgccgtcgcagtttgcttagccctcaggtatacgcggatggctcgccgcgcgcgaacgtaacgtgtaacggtggcagggatatggctcgccgctcgccgctcgccgctgcttgcctgcctactagagcttcccggcaaaggcacgtataaatcgctgaactaaattaacacgcgcccagctgtgtttgcttcagttcacacatatccctgccactgccgtactgccaccgcgtggatcttcactgcaataagtgttgaagaaaaatacaaacattggtcatgcaatttctggtcacatcagaaatttagttcgtgaaaaaaaaattagggtgtcacatcagatatttgaccggatgtcggaaggagtttcggacacgaataaaaaaattaattttataaattgcctgtaaaccatgagacgaatttattcagcctaattaatctatcattagcgcacgtggattactgtagcacttatggctaattatggactaactatacaattaatattttcatgtaaactatgtaattaatatttttctcacatttagtgccccatatatatgtccaaacatttgatgtgacgtttttggcaaaaaaaaaatcatctaacgttgtgtttagttacaaaataattcttcaaacttccaatttttccatcacatcaaaacttttctacacatacaaaccttcaacttttccgtcaaatcgttttaatttcaaacaaacaatttttaattttggtgtgaagtaaacccagcctaatcaaggcctaatattgtcgctggcgatttgcttcgcctgcgccccttgcccgcacgctgtcaggcacgcggcggccgtaacggcagcggccaaggcgcgtaccgcgtggatgggatggatatacactgtgctgcctagccacctgccttgctacgcgtgcgtgaggcttgcctggctgctgctaccccgcggctaaagcaaagctgcgtgcgctgtggtccctatgtttcagtttcacatgttcatgcctaggtcacgcgtgaaatgactcggttagtttgctgcaaatgttaatgaagatgcctgtaaatctcggggggatgaacttttggtattttactttatatataagtattgatatatactctcactctgttctaaaatataaaggattttgcacggattggatatttcctagtattcgtagaaaattcaacaattttcgagcaaactttggaaaccaaaatttgaatgtgaaaaattgaaatttcattagaggtgatcagttttcgatcgaaatggcttgaaatcctaaaaatttctatcagtttaatttgtccaagatgccacgaggagataaaccaggggggcagtgcagaggctttagtcagcgctggagaaattggattgtgcttctcctatcgactgcatcatccagaattttactcaatgggatagcgggagaaccaactacacacaggcgaggcctccggcagggtgatcccctctcgccctacctcttcatcctagcaattgacccgattcaacgactactcaataaggccacacaagaggggcttctatctccgttatcaaaccgaacagcacggttcagaatatccttatatgctgatgatgcagcgatctttataaatctgatcaggaatgatgtcaacaacttgattagcatcctcaagttcttcggcgaggccacaggccttcaagtgaatctgcacaagagctcggtcgtgcccatcaaatgcgcagagcagaacctgtccgaggtgttggaaaatttcaatggacagcggggcaattttcccataacatatttgggattgccgctcaccccaggccgcatcaagagaatacacttgcaaccggtgatggacaagttgcaatcaaggttagcgggatggaaaaggaagttaatccagcaatcagggcggaagacgctagtcacgtctgttctcagctccataccaacctacttccttaccgctttaaagccgcctaaacagttcctcacagacatggacaagattagtaagaaattcctctgggccggcgatcaagagattagcggggggaagtgtaaagtgaattggaaaaaagtatgctccccaataaacacgggaggactaggcgtgttggaccttgataaattcgcgagagctttgagactccgttggctatggtttgagtgggagtgccctgacaaaccttgggttgggacaacacccccctgcgatgagttagatgagcaaatcttcgcggccgcaacaaaggtaacaatcggtaatgggcggaaggcaaaattttggacatccaactggattggccaccagccgctgaaataccgagcgccagcgcttttcaaccactctaaaggaaagcaacgcttggttcaggatgtgttaaccaatgacaaatggattgaggatattaggcatgagctgtccatgccactgatccgagaattcttcgtagtgttccgccttatctgggataatgagacaaacctagaggaaggagttgaagacaccatcatctggagatggacaaatataccggtaaatacacagcaaaatcggcttatttagcccaattcgccagtagagaagactcaagggccgccaccttgatttggaagacatgggcgccatccaaatgcaaaaactttgcatggcttgtcctgcaaaacaggatatggacatccgaccgcttgcaactccgacaatggcccaataactacttttgccaactctactacaggaacttggagacggcgcaacatttattaaaggattgtccattcacgcgagaaatttgggacaaaataatggctaggatgaaccacaaccaacccttcccggtgcacaatccggacgagagtctagttgactggtgggaatcaagaacaaagcaacaaagcaaatgtcaaagtaaggggatgcagtcactgcacatgctcttgagttgggaaatctggtgcgagaggaacatgcgagttttcaaagataaagaacttcaaatccctcaactaacggcaagaataatggacgaaatannnnnnnnnnnnnnnnnnnnngcaaaatatcttgcgagaatagcgccttaacctctcatcctttgttgtaattttccttttttctgctctcctcccccctgtctttccccttgtcaccattggtggtatttgtacagtgcttatcttctgaaatataaaaccagctaagctggcaaaggttttaaaaaaaataaaccaggggatttattgctcgaaattcgatcggttgcttcaaaatccaataggaaagtgtggaataatatggaaaagaatattcaatactccatccatttcacaatgtaagtcattctagcatatcacatattcatattgatgctaatgaatatagacatatatatgaattatgctagaatgacttacattgtgaaacggaggaagtatcattttttgtaaaaaaaaaaatcgtgtacgtatgccacttagttctacaaaaactttccactcaaaaaaaaaagttttacaaaaaccatagtattaatagttgtttttaaattttccagtattttttcagaaaaaatgacaggaacagtatttttcaattcgatctgaatataggattttgtcccaaaaaaccttaaatttctaatcgagattgagatgtcaatatcttacgaaaaccagtaagttttggccgagaatgtaaatgcatgaccaacagaatctcaaaatactaatcccaaaattgaggatttctaataaatcaaatccaacagttgccatgctcagatgctgaatgctttcgcggttgccccacagccaacatgaattgaatagtgccacattcactgtgcgcagcccctgtagacggcctgtcgaacgatcccttagaattcccagcttcagtttttttagttctgcacattaggagagtctacgttctcaatccgtgcgtaaagattatgttagtagattttcaagatgggattttaaagatggactatctcggtgagggaagggtattatcatactttaaatttccattacagatttcctaaaataagatttaggggattaaattttggatatctctctggtcaaacccttaaaccccgtagttacctttcttaatgcgctaaatataatttggatcgaaatggtactaaacacggttgtatgaaatggtaaataaaatacacacggtaaatttacctctagttacttctcttggttaccttccctcccaattactaaccttattctgttcaacaatttctatttttaactcacaaacggttgatctttgtaacagacatagtaataatagtggaggttatttccattacagatttcctcgcagcttcttggtagcttctgttaaaccgtgatatatatagggggcatataggaatccatccttccaccaccaattaaattcagtttcgcaccaattcagcaaatccttggaccattttctttgagagtaatcgcttgtgtttctcgaaattgtgagtagtttgatccattcatctttgttggtcgcttgattcggcagcgcctgatcgatcaggatcgggtactggatggagtgcgctgactacttcatcggctccgggcggcggtgctcgccgtcgacgtcgacgtcgacgtcgagagaggcgtggaggccggagaagcaatggcggaaagccaccaacgtcatcagggggtgtcataggcttctgcgcctcggcgtcctctccgccgccgccggcatcatgcgccggaacccctcctatgtcgagatcaaagtgcacgacgaaggcgagctggacgtctcatccggcggcgacggcgaggcacccgtggcgttcactgtcgccgcagatgatgagtcgttcaagggactcgtcaagaacaagcgggaggactgcttccgccttctgggcggcggcgccggcgtcgcggcggtgctggcgtccggcgcggagcgcggcatccgcggcgacgatgccgacgtggcgcgccgcaagaaggcgttcggatcgaacacctacccgaagcccaagcccaaggggttcttccgccacgtgtgggacgcgctcgccgacgtcttcctcatcgtgctcctcgtctgcgccgccgtctccctcgccttcggcatcaaggagcacggcatcaaggacggctggtacgacggcgtcagcatcttcctcgccgtgttcctcgtcgccgcggtctccgccgtcagcaaccacagccagggcaagcggttcgacaagctggcacgggagtccgagaacatcatggtcagcgtcgtccgcgccgcgcggcgccaggaggtgtccatattcgacgtcgtcgtcggcgacgtggtggtgctcaagatcggcgacgtcgtccccgccgacggcgtgttcctggacggccacgcgctgcaggtcgacgagtcgagcatgaccggcgagccgcaccccgtcgaggtcgacgccgtcaagagccccttcctcgcctccggcgtcaaggtggtcgacggctacggcaagatggtggtcaccgccgtcgggacggacacggcgtggggcgagatgatgcgcaccatcaccagggagaacaccgacccgacgccgctccaggagcgcctcgaggggctcacctccagcatcggcaaggtcggcatcgccgtcgcggtgctcgtcttcgccgtgctcacggcgaggcacttcaccggcagcaccagggacgagcagggcaacgcgctgttcgacaagaggaatgtcaccttcaacgccgtgttcagcggcctcgtcggcatcttccagcaagccgtcaccatcatcgtcgtcgccatccccgagggcctcccgctcgccgtgacattgacgctggccttctccatgaagaggatggtgagggagaacgcgctggtgcggcggctgtcggcgtgcgagacgatgggctcggtcaccgccatctgcaccgacaagaccgggacgctgacgctgaaccagatgaaggtgacggagttctgggtcggcgccgaccggccaagatccgccgcggcggtgaacggcggcgtcgtgaggttgctctgccagggcgccgggctgaacaccacgggcagcgtgtacaagccggacaacgtgtcgccgccggagatcaccggcagcccgacggagaaggcgctgctgtcgtgggcggtggaggagctccccatggacgccgacgcgctcaagaggaaatgcaaggtggtgcgcgtcgaggcgttcaactccgacaagaagcgcagcggcgtgatgctccgcgacgccgccaccggcgcggtgaccgcgcactggaaaggcgccgccgagatggtgctcgcgaggtgcaccgtgtacgtcggcgcagacggcgccgcgcgcgagctcggcgtggagcagaggaggaagctcgagcaggtgatcaa

SEQ ID NO: 12090 - DNA, 4581 bp, Oryza sativa
cctcgcggtaaccgtcaaaccgcttggtggcggtaacctcatccccaaacggtttggtaaactctgctacgaagaagcagatgctacaaaattagatacacaaaccttatactttagagtttttttttcctaaaacacactacaaatgcatgatactcataacacgcacacacttatccctatgaatacacacgcacatcctatctctatgatcatcttcgaaagactaaaccaatataccttgaggctgacgaacactactacagaacaacctatcaatgctggttcgattaaacccggtgctaacaagggtttacccggcattgataagaacccatcggtactgggttttttataggatcgacactaacaagttgagccttgagtggtcgagccgagccaagccaaaatgtgtagtagcgcactagcattctctctgttttctttttccatgtatctttcgatccccttctccccatcgctctatccttatctccttttctttccctctccctccccaggactggcgaccagatcattggaccctccccttctcttccttattccgtgtcacgcccagaaatttagcccaaattttcagactattttgtgtattaaatccctgtattacaaaatattcccggccatgatttttaaagggaattttaaattccctctattcttcacttgattaaattgctttaacttttatttaatttctaaaaatgcattatttaataatttttaatcccgaacgaatatcggggcgtcacattccgacaagaagtagccccctctccagctgcaatcgcagcctacccctagacgtcgatggcttgctgcttgggggaggaggaaacgacgtcatccacgttggtgcgcaccctgtcgatgagtaggctgacggtgtaaagttgcccaccaccaacctcgagtagaaggacatcgatgacagatgaggtcaccggtgatagatgtgacggctacgacttgaagagaacggcggtgaggtacgtcggctattccttccctcctccccagctccccctccctgctcgggagaccttcttgctagatctctacatgccaccactgcacatcgttctcatttgtgagggaacaacaatgagctagcgtgggaaggagcaatggactagtggtgccgtgatagaggcgacagaggggtcaaagcagtgatggtgaagggctcgagtgtggccagctctttgtgatgttcttgttctcaatgttcttgttcttgatgtggaattgtggatctgtgtaatatgcatgttcttgtctttagaaaacaatgtaaacttgattcatgtgtcatgttggatgttcttgtctagctttatctcaagtcatgcagaaattgatgatgggcggaatctgcaaattccactacaccgaagctagtcacctgtgacgggccctaaccatcacctttgacgggtttgggcctggtcactgataagtcccagtcacctctgacgggccagtattttaggtccgtcacagatgagagtcacctgtgacgggtggctatttccagcccgtcagaggtgtctgtcacctctgacaggtttaatttcaccacccgtcacaggtaggaaaaatcacccaaaaaaatcaaaagccctcagcccccagcaatgtctcgatatgcaagacacgataactttgcattttattcatagaaactttgcattttattcttagatctgttaacatcagagaacaacaacatatgaagcacttccacacaagtaatatatatcacagatcacacaacttatgtaacaatatacatcacacagtaatgattcccatcttaacaaactacaaatccacacaagcaatcaagatatagcctaatctgaaatttggcaatgaaaattagcaatgaatatagccaacctaatcggaaatggtggcggcgcttgtgggtgaaggagatgtggaggacgtcggcggtcggggggacgagccgcagacaccaacagttggggatggaggcggcggacgtccaccagatctggccgttggtcggcgggggaggcggcaggcggcgccggctggcggtcaggaggcgagggaggtggctgcgaacgctggcggtcggcggttggtcggcgggggaggcggctgccgccagatccgtgtcctccaaatttgttgaggtcggatccgcggctcgcggtcaggaggcgggggaggtggccgaggacgccggcggtcgacggtcggtcggcgggggaggcggctgctgccggatccacgtcccccaaatttgttgaggtcggatccggcggcaggcggcggcggctcacggtcaggaggcgggggaggtggccgcagacgccggcggtcgctggatccgcatcctccaaactcgtcgaggccggatccggcgaccggctattgggagacggggggaggagacggcggccccgagctcctggaggccggcggcgagcgaaggagacggcgacgcggtcatgggagggaggcgggaggccgcggcagccggtcgtcgtggggggaagcgacagccggtggagggtggacagggcgacggccgatggtgggtgggtggaagcgaggagaagagagaagagagaagagaggaggaagcgagaagatcgagaggaggaagagagaagagaagaggagataaggctggtgggtgggtggtgggcctcctacgtggggtggaggtttttttttttaaggtcaccagtgacgggtataaaaatccaacatgtttgaggtgaggtatctcacctgtgacgggttacaaacttaaaacccgtcacaggtaagaggtcatcagtgacgggtctgtacggggacacgtcaaagatgttgtgtgtcgggtccttatatagatccgtcatagatgagtacttacctgtgacgggttattttcttgagccctatctatgacgtgatttattgtaacccgtcacagatgaggttatctctgacgaggcactttggtccgtcactgataggccgtcacagatgggccgatctggcgtagtgttcgatcatcctttatttcggttggcatgttcttttcgaaagtagaatgactcttatggattattataacaatatctctggtagtacgtacgagcatgcatggagactcacttgaaatcatgttaacatgtcccaggaatcatgtcgtgtaacacgaatagaatcagatgatctaggcaacaacatacgtgatatctatatggactccacgagtttcattcggttggtattcacatcacacggactttctttcgcagttcgctcgcaagtcgtgacttcgcaatgaatgttgcgcgtgacaggaatcggatacgaacgacgtaccatagttttgacaaaaacatcttcaatatttaaatcatgggcgagggcaatgtagtcccaatcggacatgtggcaatggcaaatcacgcgcgcaaggacgtcacgggtccaatcgggcatgtgaaaaattgggcacgcgagggcattgcaggcccaatcgtggcggcgggcaaagccgtgtgtggaaaacaggcaggggcccaattgctgcgtgcggcaaggggtgcatgaaaaggtgtgggcccaattaattcacgcgcatctcgaataagagggacactctggtgtaagaaaaaaaaagaaaggatttcacagaaacataaaattaaaattgattcaaacatggatatcgtagcaaaattctggcggaaacatcttcaatttttataaggcggaatttgctacatgacatctaaaaaagtgtaattagctagaggacaccataaaaacatgtatttgctgtagggcatcgcaaaaaactggtaattaactgttggacacccgcagcattatttcataatttttggaggaaaaggagaaagaaacaatgattaaagataagtttgcccttggattaaatgactccaacgtgggccccacatggaagtcccctctcccccttcttcctagataggccgagtggcggtgccgaccacgttcgccgtcgggagagggggggtttacgtgcagccggcgccgttgcctaagtgcctcgggcaatccccagtgactggtggtcactacaatgaagcctccgaggcaatggtctttgtacccactccttccccgagcacccaccaccaccgaagcaccgattccccttcccagttcaagcctcaaccgttgccatgaccagctatataccaagccgtcctcctaccgtacgccacccgcccaccccccgggccgcccgcagccgccgccacgctgggccaacccactcccggccgtggcccagccgtagcgccacaccgccgtggcctcggccgcgccgccgcgcgctaccggccgccggcgcctgcgctgctgcgcccggccgtcaccccgcaccgccccgcgccaaccgcctcccgctcaggcgtgcactcacatggtgagaaaggggatcgagagagaagcaagaagaaagaatatagagaagagaggaaagaataaagaaaaaaaattcaaagggtagaaccgtatttacaagctgttttctcacct

SEQ ID NO: 12091 - DNA, 1492 bp, Oryza sativa
cgaatctttgaacatatgcatgaagcattaaatatagataaaaagaaaaactaattgcacagttaggggggaaattgcgagacgaatcttttgagcctaattagtccatgattagccataagtgctacagtaacccacatgtgctaatgacggattaattaggctcaaaagattcatctcgcggtttcgagacgagttatgaaattagttttttcattcgtgtctgaaaactccttccgacatccggtcaaacgtccgatgtgacacctaaaaattttcatttcgcgaactaaacggggccttaatgcagtaaacaaaactggtgttcaatcattacatctaattttatgtttttttacgaagaaagtactatactactttttttgatgtagtacaatctttgctattgaatttacacgcccccggtcctatccacgtcaccatcgtccctaccaatcgttttctcgttctcgcaacgctgtacccttttatgacgtgcaagtgtgtaaaccccccatgccgtgtatatccacaaccggtggccgccgttcaccggagtccggcttgccgcgcgtgacaaaaaaaaaacgtacaacagcgacgcgccatggccggagcagccgctcgtctttcgctcggacgagatcaagacaacacacccaaggaatatccggttccaccgacggtggggcccacccacgaggtggtccccagctgtcagcgtctctctacagtctatgccacctacctagtgataatgaagcaccgggatactaatttagggtgtgtttagttctttgggtgtaaaatttttgaagtatacggacacacatttgaagaattaaatgcagactaataacaaaacaaattacagattccgcatgtaaactgcgagacgaattattaagcctaattaatccgtcattagtaaatatttactgtagcatcacatggtcaaatttttcccacatttaatatcccatgtatatgtccaaacatttaatgtgacgttttggctaaaattttttaggatctaaacaaggccttacttcttatcttatgatgagaggagagtaggaagaacacatcatctattcataaaggtaatgcagagcattcccattgtttcattgttcatatgacaaaatgtaatccatacgaagaatttccaacacgacgcgaaaaaaaaaagaggaagaaatctcgagtatagctttttaaacacaagaaaccggtgtactgcatatgagttataacgacaggaagaacggctgttgttgttctgaaaggttgcaagatttccaagaagaattcatttctgtgagctatctgtagcgaagtaaggtatggccacgatcaagctgagaggagctgattgatcttcatggtgtagcagctttgaaattactccttgccatcggcagcacggagggagcccagctgaaccggggcctgggtggacaccaccttggatgagccgtaacccgcgatg

SEQ ID NO: 12092 - DNA, 15393 bp, Oryza sativa
cccgtccatggggaggggaggggggaggggggagggggcgtgattctagaagcttcgagagggttagggtttttggccgagatctgggatccagaagcttccgacgcggcacggggttcgaaccgggagcgaggaagatgggagagggcgagtaggattttctttacgggccgatttttttccgtggatgaattcagcccataatcaaattcggcccacttattttctatggatgaattcagcccatacatagataaattaagcccacttcttttcggcctaaatcgttttgtgaacatgtggatcgtgtgagtgaatgaaattggtcaggaactcaggatgtgaaataatttaaggagtgtcaaattatcaaatctctcgaacgaattcagcctgttaatcaaattggcccacctcattacgtggatgaattcagcccgtaaataaaattggcccagcttaatccgtgaaagaattcagcccataaaataaagcagcccaacaattttccatcagtgaattcagaccataaatcaatttggcccagatttttccatgaacgaattcggcctataatagaagctggcccatgaatgagctctgttcataaattaaatttggcccacctcttttcctggattgaattcggcctataaattaaaattggcccatctttatccgtggaataattcagcccataaatgaacttcacgttgggcttttgcagagattcagcgggctgcaattttcgtcttcgtggagcaaccttagtgggccagttcttctgtgggccaccttatgggcctttagtaggccgctttagttagtgggccataacattggtggcccgttgggccgtttgccggtgtctcgctcgctgttggaccatatcactggctggcgatagcttcgggttatgtgggcccttttgtcagtgggtgttctcgtcgagccaaagacatcctcttttacgccaacggagaaagaaagcgggaagcagaatgctaattgcggttgaagcctccgcttgcggcggcggcaggacaaggaggaggaggaggaggaggaggaggaatttggtaacgatttcttctctctaatccattctgctcaaattataccccgggaatgcatctgttcttgtccagatgtgcaaagattgggaggaaagatccgtcttcccttcgaatttgatcaccgcggcatgatttcaaagatgtgagaagtttttttgggggaaagtatggggggggggagttgattcagtctttctgggggatctttgagttcactcgaaaattagtgcgttccattccttcgttcatgtttaatttcagtactcggatactcagtttatcacgaaatttagtactatttgttgccagaaaattgcaatattgggactgaaagtcagactgtcatctgttccatagatgatatctttaggaattttcatgggctgcaactgcagaaatgctgaaggcacacagcaacttggaagagcagtctctgtgtgtttttctttttatctcttagattgattattgagcagttccactccgcatgcttgctgacccgacgcataaaaaaaaatcaaaacttttgtgcttgctgttgttgtccattgtctccatgtgtattatgtgttgttttctggtatatatggacaaggagctgaattgttaggcaatgtccaactacatgaataaatccacaagtaaagacaagaacgaattcacaaatgaagacacgtgttcagttgaaagattgcaccgtgtgaactgttaacagttgaatgttctccaaactcaagagatgcctgatcaaataatccaccgggttgttattttctgttatagttgaggttccaatgctgtgagatatctggctttctagtttgggaactttgcagataagtttctcatttggtgtatgggagcttatttctcatctttattgtataaacgaatttaaaaagactaattaaccagtatgaatatgctgcatgatggctgattggtttcctttaaaagaccatttatgtagaaaatactagtatcaaatttaagtgatatcaaagttgacaaaatgaccacttcatatatgaatatcagacagaaccccatgcctactgcaacatatttagcattttgaactaattgttacaggatgctaatgcaaacactactggtgataagtaaaacgatatcactggttacaaccaaaggagttgttaagttctgatatcgcactctctagtgtcgctcgtgtcttatctttgcatgtaataggtcaatgcaaacgtaatatctgccttgtagaggcattaccttgatgccggtagatgttatgttcattcttcattgcttattgaaatgctattttctaaaaacagcacaatgatctgtcactgacttgttcttccatcatgtgcagatgtagtgaagaagatctgctactttgttattcaatctcactgacttgccacatgcaacgatcatgggccttaatccccgccaaaaaatgtggtgctagtgggagggttggtggaagtatcattggcttatgatgacaactacgacactacaaatcaattttcacaatgaatctgctcttaatttagtgagagcaaccatgaggacgatgcttcacaggcaagtgctattgctctgctagcctgctacatgcagttccaattaatgtgtatctcaaacctttacagaacatgtattatttatgagaaaaagatgtccgcatatcctttccaacatatcggtatctcatctttttaagtcaaaattgttagtatcagaacagaatatctatcagatagcaggcctaactttctgacctactccttatatcttagttcagggttgttcacagaagaaacagcccaatttagcagctgttctttccttttctcctgtcactgtagcaagagagaaagaaagtgaaagattagccccactattcacaaactactgaaatagatccaagaagaaaagtatttcaaaaagaaaatttgaaaaagaataatgttttttttctcctgtcagtcatgccaaaatccaaatgagacagtgtagttgacctttgcagtcaaccagtttggcctctgtactagccctgctttggatcttctggaagctgtccctgtaaggtttacttcagtttgtggatttcaaaagttgggacttttctttgatatagttagttggaagagtaagacagaagtgtacctaataatcagaatattgtgaatttttttagtcacatattctctcttcacatcttaaagattatcctgcatggcaaatcaaataagagtcagccattgaggaacccttccaacctcatccaatcgaatcagttgaaaattttgaccttatctcctacattcaaaccttggttgagcagtccattcagaaggctctgtttcttcagcaccatttaatttttcatttgacaaaatcttggtggttgatttgtgagccacaaaacaagttataaattcagcgttcttctgaagattgcagcagcgtcctcaaccaatcaattgcaagcaatttctccatcacagaagtcaccaatgggctccgccaagctcattgctgtagtcctcctcccggcccttctggccttccaagctccaatggccacggcagtaaactccaacctcttccgggactacatcggcgccatcttcaacggcgtgaagttcaccgacgtgccaatcaatccgaaagtccggttcgacttcatcctcgccttcatcatcgactacaccaccgagacgaacccgccgaccccgaccaacggcaagttcaacatcttctggcagaacacggtgctcaccccgtcggccgtcgcgtcgatcaagcagagcaaccccaacgtgagggtggccgtcagcatgggcggcgccaccgtgaacgaccgcccggtcttcttcaacatcacctccgtcgactcgtgggtaaacaacgctgtcgagtccctcaccggcatcatccaggacaacaacctggacggcatcgacatcgactacgagcagttccaggtcgacccggacaccttcaccgagtgcgtcggccgcctcatcacggtgctcaaggccaagggggtgatcaagttcgcctccatcgcgcccttcggcaacgccgaggtccagcgccattacatggcgctgtgggccaagtacggcgccgtgatcgactacatcaacttccagttctacgcctacggcgccagcacgacggaggcgcagtacgtcgacttcttcaaccagcagatcgtcaactaccccggagggaacatccttgcgagcttcacgacggcggcgacgacgacctcggtgcccgtcgagacggcgctgagcgcttgccggactctgcagaaggaggggaagctgtacggcatcttcatctgggctgctgatcattccaggagccaagggttcaagtatgagacagaatcgcaagcacttctggctaatgccaccatcagttactagctagtagctagttttgtttgctgcattattgtttcacatttttaaacaaagatcacaagagctgtactatgaaaataagcaactcaaatttgaaatacgaatttgaattagcatctagtatatatctagccgtgcatcattccagctggaatttaagataaaaccccaaccgtgttatacgtacagacatgcttatgttgtgtatgtcattattggattgttcctgttttgttgaatttgtgtctggtgatgatctgtgtgttaattttaattgcttgctggtggagcatgcggaccttgattagtttgtctagataacctaccctagtaacatgtcttctgtcagttctgtggatgtggtgatatatatgtactatgagtatgtagcttcttcttcacaccattgttgacagtctgttctgtccttgtaagttcgttagtttgtccatttcctatggtcaatgcacattaagctaatgatccaacacctcttctaataaaagtctaagccaaacccaagttgtattaccttttttccatggcctcatcacagtacaatgtggaggatcagattgatgcatgttctcccactgatctagggtgatcaacctccatatccagggcatccaacaacaccatggagatcaagatcccaccaggatttcttgcaagtccatagaattaatcaggacacacacaaacacaatgattgattaatagccaaattaagccctaataataaaggcctatcatcatcatcatcatacataagcagcctagcaatggctccatattcttgagatcatcatatcgatcgacagaacaagaagtctactacttataaattataatagctatatagcctcatatatccccttattagtttgggatctggtaggaggtctcatcgatgggcgccaccttgggcacgtcgacggggagcatgtccacctccttcatccacgggttgtcgccggcgtcgaggcccgcggcgtcgacggtgcgcagcgccctccacacggcgctgttgcacttgaacccggagccgaaggcgatctgccacacccggtcgccgcgcttgatcctccccttggcctcgcagtaggcgagctcgtaccacagcgagctgctggacgtgttgccgaagcggtagagcgtcatccgcgacggctccatgtcccacggcgagagcttgaggctcttctcgagctcgtcgaggacgccgcggccccccgcgtggatgcagaagtggtcgagggcgagcttgaagtccgggaggtaggccttgacgtcggcgcggaagacgcgcttgaggacgacggtggcgaggaagcggagctgctcggagatggggaggacgagggggccgagggttgtgatgttggtcttgagggcctcgccggcgaccaccatgagctccttggagagggagacgccgacctcgccggcgtcgtcctcctcctgggtcacgcacccgaagctctggtcgtgggcgccgcggtgggtgcgcaccgtgtggatcagctggtacttggcgcggccgcggcggtcggcggcgcggttggagaggaggatcgccgcgccgccgacgcggaacagggtgttggtcaccagcatcggccggttgttgcccatgtacgcgttcagggtgatgttctccgtgctcaccaccagcgcgtacgtgttctcgtgcacctgcatgcgatgcgatgcagttatataattctgtgtaattaagagaacgtactacatacatttccactgataggtactacctccatcccatattaattgtcattctagattgtttaacatggattaaggtttgatgaaaaagaatgatggttggatgtgggaggatagttgagggtagaaaaaagaaaattttgaattagaagtgattgatgtgacaaatagtaccctatagtgacaactattttaggataatatttgaatcctaaagagacaactaatttggggcggagggagtagaagatgattagcagaagttatatgtctctctatctaattctgtctaattaagctcatttgctcagcaactccatgaaatatttgtgagaatattttgtctaattaaaccacgcacactccgatgcatcaacaaactgactaaacaagtaatggtatttcacaaattagttaaaacttagcagaattgatactaatatttcagaaaataatttacgattagcaggggctagctatatctctgtataaattcagcgaatattagcaactcaatgaattgtgaattaatattttttcccttggtcatctctaggaccacacatggagaatgagctggacctccatgaatatgcttactcatgcgcatatggcgatcgacagatcgattaagggcctgtttggtacagctccaactcctaaatataactccaggagttgagtctggagtggagttgtggagctgcctaaacccagctccacaactctagtacattttgtgagagagctccacccaactccactctcagttttggtggagctgaaactgtttggctgagctccagctccaggaggggtggagctggagctggagctgtgccaaacaggccctaaggtacaggtacccatcatttctctctcaaatgtattttttttgacttagcaatttagcatagacatactggcacgcacagttggacatgaacagtatagtggtactgtacagagcagaacaaatgctgaaatttattgcgttttgttgtgcactccatgtgcccattcacggcgctccataaccatatattaagtgcgtgtgtgttcttgcacattggttaaatgcatattgggacattgaaactttcctagttagcctagctgcctgcataaatgtagctctgtactaatcacaaaaagaaaaaagaactttttggtgttttgacagtcagcaagaatatggtatttggtcactaaatagattttattgtcaaatacataaaaagaactatgtatgttccatttttgactgtgcatgtagtgagacgaattacacaattcgacacattctatgctgatttttttttgtcctttttaccttgcagatgctatttccaaaaaagtaagcactgccaagtcttgtatacagtacatgttgcatttgtggagtagttactgctgccaaaaatacagcttggaatatgggaggtaaaataactactctactactggtatatctgaacctccaccaaaccacatttacatctctgctgggtcagagacggagtagttcttcaccggtcagatagtgtgtagtatgtatatatcatggggcactcatgtctagtacttgtcatgataaatcgatgagtccatgataagacactactcctacatgcgatgctttgtcagtgtcaaggagagctttatccttttttgatctgcatttggtatatactagctagtatctttcaaagaaatggtatgcagaactaattaattgagtgacattttcatgatatttttgatggtatatgcaatagatgagtgcatgtgcacttaagttgcaaattgactttcacaaaaggttttacaattaatgcctggtagtctgatggggaggcctttaattagtttgagaaaagtaagatttgaatctatcattgttgtttagtataggtagttcttggagaaggctcagttatgttggcaagtttcaactagtcctcagcattttgaagagctttaacttagtaaattcctacaatctagcctgcacaaaatgttgtagtaaatattattaattacatttcattttcctcttgcttctaaaaacagaggcattcaattatttcacatatggccaaataatatattgttccagtttccaaagataaagatattactactctcaatttgtgaaagtatatccagattcgcaaacaagtaaattcaatatgacttcaagaggtaaaagcattaagagaacatcatgctactgcatatctgcatcacaagggggaaaaaaaggagatcactaagctgtgccagtaagcagtctgctctaggagtaaattttgcaacatgcatgactgagcatgttatttaagacattaagatagtctgctccctgcaggctgaaacactgaggtcctactcaatgcagttcttgtctggcatctcatggtcagatggtcttggcatatagcattcacttgtcagctactactacaacactattacgtactaaacatgtagtctacacaagcatttagatgttaaatacctgaataatgatcgctcacaacgtcgcatgcatattttattctcaggaataaatcaaactagctactctggccataagctcatacagtttatctttgataattttaccattaacacaaacctgtgtatgtatctatcttgcatatatcataatattaccatcggatttttgttgcaatttattcgttgtgaaagtactttggttctttctatggtactgaaatggctacatatatagatctagtctcttgtttccaaaagatcaattgccgagatttatagtcacaaatgcttttacttaggagtagagagacgtatattaggggaggagaaactgatatgcaaataagcatgttactcctacttatgagtgagttatgactattgtcatttcaattgatcactattgtgaagtgtttgtggtggggtcagtctctcgcatgcatgccaagattctcctctcccatcatttaatattccatccatccgtatctcaacgcattaactgcctcggtattcgtgcatatgcaattgcattgcattgcatgagccatgcattaatagatattgagaacctacttgtatgcacggtgcttctgtcactaacatgtgggcccgatgatctttggaccatgtgtcagtgacaggcgcggtgcagaccgactccagaggatgcagtacagtacagtagtatcatcgatggtgtgtacctggaggaggcgcttggcgagatcaatggcgatgatgccggcgctgcatcccatgccgctgaggttgtgggagacgacgccggggcgcatcccgtagcggttgacgatgagcgaggtgaaggagggcgtcggggagaggaggctggagttgaagatgagcacgccgacgtcggccgccgcgacgccggacttgcggagcacctcgtcgacgacgccgaagatgacggcgtgcgactcctccctcgccgtgcggaggcacatgtccacggggaggctgatcagcgacgtcgggaagtgggtcgcctccccgagccccgaccgctccagcatccgcttctggaacgccatgctctcgccgctgaaccgcccgcaccgcccgaagtgggcgatcgtcttggcgcgcgacgcctcgtgctcccgcggcgccttgtagccggcgaggtcgatgaggtagacggggcgcgggcgggacgcggcgtaggtgtacgccgccagcgccgccgcccagcacgccaccgccagcgccggcgcgctcgggcccagctcgccggcgaggtcggaccacagcgcgcgcgcccagcgcatggtgcttccgccggccgccgccgccgccagcagcgtcgacagccgcggcgccgccgccaccagcgccgtcaccgccacgatgtgggggaggtggcgcacggcgcggcggaacagcacgccggcgtggttcttggtcgccagcttcaccgtcctcaccagctccctgtccattgttatcaccagttcacctctcacctcctctctcttctctagtcttcaatggaagcaaaggaagaagaagaggaggaggaggaggaggaaggtatgggagcaatggcgagagggtggattttatagggtttagaggggagagggggagcttagtgagaagcagctatcaaccagcgaatgcattaactgaatgcacgcatgtacatccaacgtggcagtatacggtactctcttcgtttcatattacaagtcgtttgactcatttctttgccaaagtatttttagtttgatcaagtttataaaaaaatagcaacatctataacacggaattagtttcattaaatttaacatcgaatatattttgatacaatgtttgttttgtattgacaatttgactatattttcctataaacttgatcaatttttttaaaaaaaataactaagaaaatagtcaaaagacttgtaaatcaaaatggagatactatgtaaatgggcagttctagaaaaatgatggatggctcttatcttatctctccttcttcccttcctcttctttgattctttcccgtcccctcttccttctctcaatggtgatccagcggggtaggggacttgaatcccctagcacccacgctggattcaccctgtactgatatgtatagtctatactacacaagtacacatgagcgtacgtggtttttttgggacatgtgcacacgtgttacaagttgatcaaaatggacttgttcactttgttgtcaattttgatcttatcaaaatttagcaatagatcaaaatttagcaatatatgctaaattttggtgttgctaaattttaatagcattgcattggatatgatgtatttagtttgatgcttttccaaaatttggtagtgtttttatgagaggaaagttccgaaactatcaaattttgataggacacacattgataatatcatatttagtttgttaacctaccaaaatttggtagggttgaaagtggcaataaagtgaatatggctgatgttccaatcctactgaaccaaaacgatattgatccgtcatatagtataaaaccttatagcactatgatactaagtaatagtttcatattggatcccgtaaatcaaatcgtatcattctgatcctatagtcgtacataagtattattcaaatataagtaaagtacacagatgatttttaatcttataggggtgtgccatctaggttcccgcaaactcttacaatgcaaatccaagtcccatgacttgtcaaagtacttatatttctggtcctaaattgtcacagctccgttgaagtggcatattcaccaatcctttattttcttttcttttcttcttccttcgaatacagagaggctggggagagagctcgagggtggttgctgaggatgagcttgattgacaacaactaggggcaacgtcgacggtgtagagagaccacaaaacagaactcaagcttgctcacttgcacgaagagactgaagggagctcgtcattgcgcgctattggatccgggtggaaggtctcgagctcggaatgactgtgttaaggcaagtggtggaagttgaagaccgaatccaggggctcatcctagctaggtccatccccaccatgtgctcgtccccggtccttccccattgagctcgagctcgatgagtctagcatcaaacgagccttggcctagagaaggcgatgatagtgatggaggaggggacagtcatttgggagcttgagctcgatgagttcaatgagggaggtagcggcacccaacctcttggaagatagcagcatcaaggaagaggtcaggcaaaggagaggggtgaggaccaggccatcattgtcgaggccctccccatcctccctcatctcctttgtcacatcggctagctacacctaggccgccgccgtcgaggccctaaaccttcccctaatctcctccactgtgctagctagctccactcgggccaccatcatcaaggccctctccctttccccatctctatcacgtcagctagctccgcctgggccactgttgtcgatgccctcccttttctcccatctcccccgccatgtcggctaactacactcaggctgccgtcatcgaggcccttctccttccccgtgtcctccaccgctttggctagctacaccgggttgtcatcaacgtcccccttccccttctcctactggtaaggcactatagtaagaaggagaagaaaggggaaaataaagaagtaggagaagaaaaaaaagaaaagaaaaagaaaatttttaagtgggtcctgtagtgggaaggagaagaaagggaaaaatagagaagtaggagaagaaaaaagaaaaaaaagtaaaaaggaaaatttttaagtggggttccatttattagtcaacgatgatgccatgtcaatatccatgtggtgtaccacgtcagtgcgacgtaggatcccggagaggacgtgataatttggaaccggaataacacacattgacaagttctagaacttggatatatattttcaaaatttggagatgtagataacacaaccctacaagtaaggaccacctgtatactttactcttaaaaataatataaacaaatatacttaagtttttgaaagctcatgcattaagtttatcataatattgtgaaccctctttttacaaacatacttactacaatactttggttcttctaagaaatacttatttgaaaatgatctaacctaataagtaataacgcaactaccaataaaacaataaataaaaaaaaatcataataacaatacaagtatatacacatgtaatagtactctaaaatcatttctatgggcaaattaaaatggtcaaactcccttatatttgcggatagaggaaacacgttttatagtaattaatacattacaaatttcatataagaatatgttttttttataaaattcaatactgttagaagagaaatttactactccctccgtcccaaaatacaacaatttttagccctcaggatttgtcctaaaatataacttctccaccaatattctctttccaaccaatcacaaccctctaccattcactttttcacctacctccactacttatccaaccacaaccctctaccattcactcctacatactttcttaataaccgtgttcaactctaaaacttcttatattctggaacggagggagtagctaagtaacctttatgttctaccatatacagtactttctctgtaaaaacccactcattaaacatacatatgtcgccagaagtgcttttttttttcacacagagggaatagtatatattatgcgagtaaatgtacgtaggacagccaggaaagggcagtaggtggccgtgagttaattcaattccatcgtgcagtgaaaaagtagatattggaatttatttttgtcctttctcgtggattcaacgcaattacacacactcactactagtcacttccctttacaggctttgggaaggtggtctggtgcattctggaaccccgaaaaaaaactagaatgttgcgttaatttgacagtgcgatcaatcaggaattaatgcaagaaatatcatatgaattttatgctagtattttcacacgaactgatgaaacaatttttcttttcattacacgaagatggaataaatttttcattatgttcagcgtgcagtatattattatgttttcagcttgagcgatttagtcaaatatatatagcagcatggaccaggcatgtgttcgagcagacacaacgtacggcatctccaacgatttgaagaaagaagaaattcaacaaagacattatatctagacgtgcgtgacaacgattgcagcatgcaaaaactgtagcatgaacgggccggatgtttgtgcgggccgggcaattaattaattactcgttcatatgatttcacaggaaacataacgtttaaaattatgataacttttagtactttttagaggaccgtcaattcgttttagctgagatattagtattaggccaatttttaggaataaacatagaacctctacaaatcgaacgttcgattttaaaataaaattcagatcgtcaaatatgttttaagttgaccaccaagtaaaacatgttaaattttaaaacaaattatgaaacatggtgaaaatgcacgttgaaacatgtcggtatcatccatgaaacaatgtattttaatggttatatgggtttaattacaatgaatataacattatgatcgaatcatatattggataagtagtttacgagaaacaaatattttgaagatcattacatgcacatgggtagagtggagagagaacaagtatatggtatagtagagagagtaagggcaggtatgtcccatactttcctagtcattggtgaaacattacattatacatggagaaataaatgaaataagcattgaagcatttcatttttttaaacacagtgaaaacacaagttgaaatatgttactatcacatatgaaacattaagttttaattgaaatgtatgtttttctttcatcagaatataatcatgcgatctcttgttgtaaatttaattataatgaatacaacgatgtggtcagataaaaaaaacagataagtagcttagtagaaaaaaaatatttggaagacagtcatatgaaagtattttctcaacctatatgacatagcacttagatgtatgtattaaatagttttataaaaatatataaaatttgacaagatagattatgataatataagatattaaacaaacatggaagtctaaattcgatctacacataaagaaacaaaaataacaaatgttatttgatctgtatgtataggtatgtgctatatattcattgcctgattttattatttttatttctctaattgtaaatcaaatttagtcttgcatgcttttcataaacttatatcatcctaattggtgtttcaacttttttcaattttttaataactattaggtcacatgcaaataactggtgccatggtctttagatgtagaaaatccttattcgacaattatacgtaagtatatatggaaacaatggtgagagagcatagtatactagtatggtactaggtagtagctgagctgcaactgagtttttt

SEQ ID NO: 12093 - DNA, 3031 bp, Oryza sativa
gccttggatgtcttctggtttcatcgttcttcttggaataccagcttctttctacaaataaaaaaagagaataacaggaataaacctgttaaatgccatgttttgatcgataaggttaaccaagattgtgtacagcagggtcagaaacaacaatgcaaaatacattatatgtgacttacaccagttatagtccatttgtttctgtcctatctagtacaaacccaaaatgaacaagataaatgtgacgggcactggttgccagtaaaattttttaaaaaaattcctttatttccctagatgatgccattacctaacaagatgcacactggatggattcctcgttaatcataccaaggtgtgcctcaaattttactaacatgattagttattccatttttgagaaataaaatgtgcaagtgacacaccaaaactttttgcaatggattcattggcacaaaattgaattgaagtctaacatataatagagacaaggcatgtttgacaaggatatcaactaaaacaatccttttttacctaagactagcagttttttctccaacagcaggttcatctattgcacatatcaaactgataatatttgacagaaatagattccaaaataagaaggaacaactaaccttttggaagtcaattccagaataaacaatatggcagtttgaaagctctctgattttctcatcaattgcctgttcagtcaaaatacagtcagttgccaaaacaaaaagaaaacttcaattggcttataatgatatgaatatcccagttgactaatgatttgcacataaagttatcaagtgctcaggagtcaggacagctgaaaaggagtaatattgcttccagtttatgtttaagcagcaattagccttttatgtcacctgtctttgacgcctaatcatcgttgccagatcaacatatggcaactttgatcaattctgcactccatcaatattcctccatcatagtctttaatgtacctggaatcagcaactattgagttcaacagataaaaacctgctgtagcctagtacaataatactctcagacaacaagtagtgttatcattgttacacttttattaggagttactgactcactttatacttcaaggaaatgataaaacaatataattgacaataaattgcttacccttgccatctttctttgtccaatgtgatctcctttgtgaaaccctacaaattgccagcagcaaaggacaataaaataaaccaaattattgtttgcaagacatatgctaattgatctcttttgtttaaatcgtcaagaattcttatgatcaagaaactactaagtacagaaactgttgctgaacatatgcctaagggaactaatttatagctgaaacaaaactgtaggacttaggagataagttgaactattaaagattcaaagttagtcacctgatacaatcttacaaagactgctagacaatgttggacacaacatgtttagaaataactttataaaccatgcattgaaacattctttttgtcgctaattctatgaagtcactatttcgttaggttcaagtgtatttcgtagctgccacttgagaacaatcacaaaacaatgaaattttaagaaagaaagcatataaaagagttcagtcaaatagtcaaacctgctttacaaaatagccaacggcattgttatctgcataagttaagaaatgagtgagcccatcagcatctcgggcatgttgcttcaggtgattcattaaccgtgtcccatagcctttaacttgctcatcagctgtaattgcacaaaatgctatttctccaaacttctggctacaatttcaaaacctatattaggacagaaacttatgctgcagcagaaaaggaacatctctggcatggtgcatggcatgacgcaacagaaataatcaattgccagacaaacagaagtgtgcatgctgtcctacaacataacctttactgctttgagatcactgaacaataaatagtagaatcctataacacaatctcattatcaaaaatcaacgttagctacaaaaacttaaaagaacagctcatagcttccattagatttcattatcaataactatcagatatctaaacaaaaaagtaccacaacttgatcattcatgcaagtgcaaatacatataacagatgtcaatacatcatacaagttctagcaccaaggtggaaatattaccttgtataaggccggtaagtaatgcctcctacaacaatattattcctgataaccatcattgatttgtgagttctgcaagacacatcacaataatttcttttataagcactaacgaagagagatattcttgtcctctgcttccaaaatacgtagtaggcacattacactgagaattacctatccataacaagacggacaatgtactctttgggcatgttaggaagctgccgagcaaagatattcttcaagcctaccaacctggggaaaaacatcagtcactaacaaatctgaggttgtttggaacaataattttagcatacaaaccaaatcatatgttcatcaactccatcattagaatagcatagaaatttcagcctccctgcttcttcctgcagaacaatccaccaattttagcagaagtcacattctaaaattcaagaaacagtacgaaatgctactccaatttgactgctccgatgtctaaaccctacaaacggcctatcaaatcgaaacagtgcaaaccaaatacttcacctcacgcttgaggccctcctctcgagcgctatacgcgccactggtctgaatgttgtcagtgaacaaccccttcgggtcctccttgccgtcgccggcggcagcggaagcggaatcgggcttgggagcggccgctgcagccgcggccgcggcggcggcagacacggtcgaggactcgggcttcggcgggcggccggatgaggacgggggcgcgccgtcgaggcgggcggcggtgaaggtgtggagggagtcgtcgtcgtcatcgtctgtagtgggaggagga

SEQ ID NO: 12094 - DNA, 17110 bp, Oryza sativa
gaacaatactaaaagctgcaactcgtctgctattccgatcttcctctgattcaagtgctaccagttccttcttcaactccaggccaggcaagagccgagaagggcttcccaaatttttcccgcggaggagggagaatccgcgagtccacgacctcctactcccgagcggcctctgactgaaaaggatcgaatttatttgagtttggttttacatgcggatctggaaatgcaagaggacctagaagaacgttgctccttagatgtatgcagctgaggcatcctaacgaatgaacgatttgaaccagttccccaacctgctttctccccgagaaagccttcctgagattaaaagaaaaaggtttgaaggttctgggatcagtgatagttcggaaccagcaaagggaggctgaaaagccgtagtgctaacgcacgccctgtagttttgaagcaggcttcgacagcagcgagctccgcgtcgaaaagcgaagcgagccgcgctagcgcgctacgattattccaaaattgccccttcgctttatcaacttccagttataagttgtaacttacttcaaacgatttgagacctcttgatatccaacattgttcttaccagaaccaaaggccacaggttattgctaatgccttccactatactcaacctgcatggcaattacttaatcaaagtcaagatgcctatccacataggaaaaacccaaagtcaaaagagcaattggcctgcaaaaataaaggatttgttctcttttgtaattagaacaaacataaacaaattggatagaaaaggagcggaaaccgattgattgtacacttgctgttctcaactgggcctctgaatctcctctggtttcacctttgcgagtcgaagtaatttccggaaagacacagaggagctctcatgcgtggaccaacagtagccctgtcctctcctctttgttggaagatgagtacacatcgggtaatccgcccacgagagcccaatcacaagaggctcatatagaaagcaatcagcccatagcccaatatcgagaccacagcctattattcaaaccacaaaggatccgtctttcatcgtccaatcttctcgatcgaacatattgacatcaatactcctttccatggccattcacggcccgcgaagatcaaccactcgtgcccgagatcactatccaatcaaaaaccagacttccaagatccatctcactcagacccttttgaatgtagcggataacaacggagcggggctatcgaattgatatgtattcgaatcttaggagctggtaatcactgatatgctcatattggtgacgttattgttgctgtaatcaaagaagcagtgcccaaaatgcctctagaaagatcagacagaagtaagacgagctgtaattgtacgtacatgtaaagaactcaaacgaatgtcaaaacaaaggaaagatgattatcttataggaagactgccaacactgactggggttgttcaatcttaagtggagtgagttaaatgacttggcttgctcaattccttcccggtgtaatttcataaaaggaatagcactcaaagcttgaagataagttttgtactcaattaatttctcagtccctctaatcgggtgggcaccggccggccggatccccctgaaaaccgtacgtgcgggtctcctttttgggtataaagataaaggagtcgagtttacaattgaataaattttcataatacatttgtcttgggttaaaaatattactattttttctataaaattagtcaaacttagagtagtttgactttgaccaaagtctaaacgtcttataacctgaaacggagggagtaatatgaatcactagctagctggggatgtaatttactaatttacataacatgtgattgacccatctgctgacagatgaactatgtacttgtcccacttgcggactagtttctatagtcttgctagcaattaatggtaaaactcagttattattcagtggacagtgatctattagcctcagtgccgggttgctttattgggttcaaaagaattaattgaattgttgcaaagaggaatagttttgatagtgctaagacaatgacttgtattgtaaaaaaaaaaagtgccacatgatggggacagcgcgatgaaaagaaatcagttgtaatgacgcacaattgttttgttcttagaatatgtattgttttatttttatttttatgttgaggacctagtagcaagtcttatgctcgaaattcttggtctgctttatgtagtgatcacttgacccatcttttctggcaatgctgatttaacctcattgactccatctggcagcattagtagaatatcatcgcacccaacagctatggctaccacacaagcctcagaagcagccactgagaaaggattgcctttggggatggatgtctccatggtggatgaatatgcttcccagtccaagctgctgcaggaattcgttaaaattcccactattggcaacgcttggatcttcaattccaagactggtatgtgctgttattgctatctggttttactgaacttaggtttcttactcttcttctcgtgttgtgcagaaaacacatctagggcgatagtttctgttggccaaacagatctgttggcaaacaaaaagaggagcttcctattaaattcccacatctcaaaaaattcctcaaattctgtggatttccagtggtctcccttcccaatcgaaatgagtggagtttcagcagtaattccatcgccatctgggagaaaacttttactaatacggaattctgaggatgattcccctacaaaactagaagtttggggcccctgtcagttggagaacgagattcacattgcacaatctgttcatggatcactctatgtcgacgaatggtaaactatcctgcctcttttagaacaactttcttagttttttgtgtggtagtgggtttttttttggaagaaagacagaggtaattagggacgagagattgctccattcgccactttttgtacttcatgtttcttaaatgcaggtttgaagggatatcgtggaatcaagaagagactttagtagcttacgttgctgaggagcctcctcaaccgaagccagaattcaatgattcaggatacaagaaggctggctcgtctgaaaaagactgcaagagctggaagggaaaaggggattgggaagaaacttggggagaaacgtattccaagaaaaggatacctgcattgttcgtggtcaacatttcaaggtgtgtttctggttgttctgaaggttgaatccaaaatagctttaaaagtactgcaattttgtgaggaatagtttcattgcagcggtgaagtgcgagctgtgaagggcataccgagaacattaagtgttggccaagtgatttgggctccatcatcatcacatagcctggtttttgtggcgtggtcatctgataatggttaccaaaagacaccaaggaaacttggaattaaatactgctttaacagaccttgtgctctgtatgctgttcctgatcctttcatggaagaagctgataagccatcacttaagtgagaacacctgtccttgatgacaatatttattcagttctatttcaactatgcaccattgtaggcttcctgttctaacatattaaggtattaattgtcacattttagttattttctagtgatcgtgtgacactgtaaattcttctctcagaataattgtagcagcatatttttttcaaggaaaaaaaatcttccatatatattttcactcttttttcctcattaatcctagtcctgagcagacaaatgctaaatggattgtatgcatcatgtctcaaaaaatagaaagtttatttctgatgtcatttctgtttattgtacagtgtcagtaagggtgaaactgcacctacaaccaagttaacatcagagttgagcagtgcttttttcccacgattcaggtaggactgcattcagttttctttgctcagtactgttattcagtttaggccatatgtctcaactattatattggaagaagtacaagctacacatcctagccgtatttctttaattatgcattataattgttaggcgtaatttttcttctatggtttaaaatattttaatcaaattcccttaaagcatgtcaattgattgttcatgcttgttatcatgtattttaacctaaatatttgaacaatcataattcaaatgggagtgaatttggaaagtggagcattttgggctgatgagtaggtgtctttattatttccttgttcctgtaatcctgtggattgactcagtagatattaatttactgcaacaccaatacattttatttgcacatctacaattgaagttttcatgtctagattataacttagtactggtagctgatgcatgtagatgaatgttaacaatgcgtcgcaaaaatgatatggaatctttattgtacagtccagatggaaagtatcttgtgtttatctcagcaaagagtgctatagatagtggaacacacaatgcgacaaattcaatgcataagattgactggcctgcagatgggaaattggagggcctcagtgttgctgatgtggtacaacaatgcctttcctttacttgttaattttttaatcgatcattttgtttagatggcttccttttatatatagcttcaaagtcatggcttggaaaaatacataaatctaaccagtgtttatttgagcacattgtttgcctgttggctatacttgattaaagatatgtatttctggactttgtgaagtggaacttcaattatttttttaattattgaagtatctaaattcaatttcagttaaaagaacgaagttcagagggtaaaatttataatggtgtgtttctttttataggtgctctgcatatccgatatcaagttcttaatgtcttagctgttatgtaggtacctattgtgatgtgccctcaggatggttgttttcctggtctgtactgctctggcatacttaggaatccatggcttactgatggacaaactatgattttatcttctatttggggaagtaaggaagtaatactttctgtaaatgttgtgaggtgattacaagcatttttatccatcagttagaatgatatggctataaagtttatttatttatgaaattacctattttcttcacagccgtgaagtttcaagagttagtcctcaggattcggattattcatggaatgttcttgcactagacaaggataatattcttgcaggtaattccgtaccgaagttacagttgtatcccatagttcctttggataagatttcatattcatgtgcctttcccaccttttccagtttcaagcagccttattacagttcctcaaatatactatgggtctgaggtttgtcagactggaaaaccaaaccaatgggagtggcaagaaattgcaactccttttccgagtccttctgataaggtataactgaaaaaatgcgttgcttgttcaacttttccccaaaaacactgacaaaaattttggcagtgtaaagtactaacagtttctgtgatgtatgtttggcagatcagtgcaatattagcagaccataagttcagtatactcaaaatcccgattagcaactcttctaacaaactcgctgatggtatgtgtacaacccaaagctcctttctttaatgaaatgacagacagctctcctgcattcgaggaaaaaaaaagcctctgactgtttttttttcctggaattggtactctttggtgccttgtgttttgaatacttctgttactgcattcttcagttgacgctatgtttttcttgagatcagctgtactgtctagtacttgtaggctgatatattctgaactgcgacaaaatctaaccatgttgcatttactcaaggcaacactaaaatgcatttgtaagaaagttctcaaagctcatggtagaatactcttcttggttgtttgcatccttaaggatgcatgctaagcttcatttgcattttaatgtttgaaaatgtactttagtagaatactcacatcctctccccttcctaaatttttatattttataaaattgattcaggtgctaagctgccctttgaggctatttttgtgtcctggaaggattctgcaacaagaccaacaattgttgttcttcatggtggaccacacactgtttacccatcaagctattcaaaatcgttagcatttctttattcacagggatataaccttcttgttgtgaactataggtgagctttatttttttttcttccagtagttcttctgttgaactaggttaaaataccctgtcctttctgaattctgctttggaaatatatcatattaaacactaacattaatgtccacgtacacaccattctgttgcctagaggttcactaggctttggtgaagaagcactacaatctcttcctggaaatattggttctcaggtgcactgttgttgatttatttccatgttttaagattattttcttaagttgccagaaattttatatgaactgtcattacgtacaattgtttaatactcatgaacaggatgtgaatgatgtattgacggctttggactttgttataaagaaaggattaatagatgcatctaaagtagctgttgttggaggttcacacggtggtttcctgacaactcatttgattggccaggttcttagcatgcctttgttattctgaattctttatctatgcaattattcattacatttgcagtttatatttcctttagggattcaattatttgtgcctaatcgtttgcacaaataatctagcacaattcttgttgtaaactgtatatactcatttggacataattgggaacagtgtcttttgataatgtgtattggtctatatgaaactcttatatttgagaaatgtgctgtaaacttataattttgggagggaggttgtaatttgtaaaagagagtagtaagtttaatataagtacccaagcacactaagttatggtcagtgaacttaaaggctcaaagctaaacttggatatttcaggagctctgtagcagtgcacagctaaaaattcttttaaaaaaatgatgacaccaatttatattagctattaaattatatattacattgcaacgcttaagtccagaataatatcctagaaaaacattcttacaagagttaggatcagcatttgtttccttttcttggaagtaaagcttcactgcagtgtaagccgagctgtttttaccttttcatgattaagaagttcacatgtgatattctcaagaatatttcctgattttagaatataattatttccttgacaaaaatagtgagaaactactgctgcatgtgggaactaggtctatacagtttctttatgactatacatgcaagacaataagagttcatgataggtctatacagtttctttatgactatacatacaagacaataagagttcatgatgcacaggcaatagcacatggattcttctatttatcaggtcttcttggattctgttgaccttatgtttcatggactgcaggctccaggcacttttgttgcagcagctgctcgaaacccagtatgtaatttatcattgatggtaggaacaactgacatacctgagtggtgttttgtggagatttatgggaaagaagggaaaaactgcttctcagagtatccttcatttgatgatctttgtcaatttcaccagaaatcaccaatatcacatatatcaaaggtatgtagattctgcatacttaaccttttacaaaatctatgcttgaggaagaaagtgtagttccctcatgcaaatttgctccttgaggactttgagtaatcttttcttgacagtttaagaaaatctgcaggtgagcacgccaacactttttctccttggagcacaagatctcagagttcctgtttctaatggcttacaggtaatttcttatgcacttctgtttcatttttatatgatgaaagggttgtgaaatgattactagtagcaatgttgcattcatgttattgtttgcgtagacaagttcagtcaattttcctgaaaaccattagtgaaagcatatgattcatattgttccactatatactgcttgtatctatttatttattttcacttttacaaatgctggtttatgcctaatcataatcgcaacatatgcagtatgcaaggaccttgaaggagatgggagttgaaaccaaaattattgtctttccagaagatatgcatggccttgacaagttagttgtactttttaatcattttacctttgttaccccgatcagtgtcttctgtgttgcaacatttgactaagtcaaccttgcgtcccctgtgcaggccacagtctgattttgaaagcttcctcaatataggtgtttggttcaagaagcacatgagcaaataaacaacatgcctctgttaccacactctcaccttgcttaataaatgcttgtaatttgggtcaaagcagcccaaggaaacgtggttctgttggcattctaataaattaagcctgctgtaacatttctgtactgggataattcttgaaaatgtaaatgcatttggttataaaattttaccctcgtggtacggaactatggattacaaatatgtgatgttagattatgctttactttgaactttgaagtacttctagttcacggttgctgtcctgtagcctgttgggcttgggcattccttttatttttatctttttttaggaaacaatgggatcataatttcttttgaatttcagtgagaaaaaaatacatgaaagttcagttcaagttaggcacatggaaatgctgattgagaccactgtaacttctgcttctttgcatcaagatcccttgaagttgccttctggataatctcattttcatcagatggtacaaagagctttgttgtttcatacgattttaaaaaggacaacaatataagttattgcaaaggcttcttgtgctgttcgatgctttcttcgtggatgcggacctgacgcaaccttttgtccttattgctgggttcctcttgtctcattgtctatggtggtatgtacgatcattagtaactttttaagattccttttgttattttgggcccattctttgagacctgacacaaaaagaaaaccaaaatttgatgccatctgatcctcaccaattgtttgttgttaggtttgttgggatcgttgctaaggactgatgatgttttaaagctcaactgcagtcttggatcaaccactctgccactagactccatttgcacttcactgcaaaagcagaaaaatatatgtaagtattctcctttccttcgtctcctgaaaggctaatacgatttataatctgattttattgttttgaggcttctaacttgctgaattttgttggtcctaagttgtttcctcctgcactcagtctggtcctcttgattattgctgtagttccagaagaatctgattttgttagtagaactagtcccagacttaacatccaggatttaatattttttagtgttcatcgtattttttagttatgtttatacttttgtactacatgaaaatcaaagcatttagtgtcagagttctccagaaaaggattttggtgggaaggaagaatgaaagatacttcattttattaatcttaggtagccattatagaagtttccatgttttgtttgtctaagtgattcaatattttttcttgaattggtgcattgacaacgtcaaatctgtccatggattgcaagatgaacaattgggactgttgttcttgagttgttaatggaatttatgaagtataaattaaaaaatagtttgtgtctgaactacattaaagtgtatgaaatctgagtcttagtacggtagtacctgaaatttttcacgggtaactgcaatttgaattatgaaagagttaaggtgatataggttgagtggtgtgctctaacctctaggctcttttggcattgaaatgtatacccatacatcatgaagttgaagtcaggaattcaggtttctcagttttcatcttatcagtggaattgacaacaaaatatacttgagcttccctgcagcttgtttaacatactatattcttgagtttcccttcagcttcctcagcatattaacctttgtgacaatgcagatttagcttaacccagtagattgtgtctttccaaccgaccttacaagtgatttgaatcttctttgagaaagacaatccattgggaatggatgcactggcatctgaagaatacgcttcacagtcgaaactacttcaagagttcaccaatgctcccagcattgacggtgcttgggttttccagaccaacaatggtagggatgattttcgattatacctcattagtaatcatcattttactattttccagaagtggcgtaaagcaactcttgtgtcatgtttgcagaagacagatccacagcaatgtattcgattagccaaacaaacctactggcaaacaacaagagaaaatatattttgttttctcatattatgagaaatggtactaaccttctggactttcaatggtctcctttccctattcaaatggatggagtgtcggctgtcgtaccatctccatcgggatcaaagcttcttgtggtgcggaatggagagaaaggttcccctacaaagcttgaaattgttgatcaatcacatgtggagaaagagatacatgtagctcagtctgtccatggtccactttatactgatgagtggtaaaagtacagcataatacctgcacttttcagtccattcaacctatctgtacaatattctggatcatgatactatttttgttggcacaggtttcatgggatttcctggaaccaagaagagaccttaatagcatatattgctgaagattcacctgaaccaaaaccagtttttgatgatactggatatagaaaagaaggttcttctgagaaagactgcaataactggaaagggcaaggggattgggaagaggattggggtgaaacttactccaaaaaagggagaccttcattgtttgtccttgacattaataggtctctcagcaccttctaattaatacataatgttgacctgaccatagatctgacaatacgacttactgaaaccgtttatttgttgtattcagtggagaagtacgagctgcaaaaggcatttcaagatcattgagcgttggccaagttgtgtgggctccaccatcttcatgtggaaggcagaagtatctgatttttgttggatggttagagcacaatgggtttcagaatactcctagaaaactaggcatcaagtactgttctaataggccatgttctctatactcaactctttgccctttcgaagaatcagatgttgataatgcaccagctaggtaagtaactgagcacccatcttcagatcatgctgtaactttgtaaagtttacaaatttactttatttatcactagtttgttgaaataagaaaatgtaaagctctgaataactatgcttatggggcagttgtaagttgatatttccatgacatttttccagtgattctaaattagagcctgcttcagtagcaatcaacttaactccaagcataagcagtgctttctttccgcggttcaggtatgcccgcattagtatttgcgtattttcttgaaggaccttaaaccatgctagaaaaattcttcacggaaaatctctaattattttcaacagcaaggatggaaaacttctggtgtttctatctgcaaatcgtgctgtagacagtggagcgcacaatgcaacagattcactgcataagatcaactggccttctgactggaaaatggatcaatacctcgaaatcactgatgtggtatgtcctcagatttgtcttgaccggtacttatctgctgtctgcagtcaatttatttaacttctgaactgtgccagattccaattgtaatgtgtcctcaagatggttgttttcctggtttgtattgttcttccatgctatcgaatccttggctttctgatcgatgtacaatgattctgacatctgcttggagaagcactgaagtgatattatcaatcgatgtgttgaggtaaacaaggttgctcacatatgcctttctactgcttcaaaaatcattgcaatatcccatgctatttccttaattcctcctgcagtggaaaagcaacaagaataagcccagaaaattcagagtactcatggagtgctcttgcagtagatggccacaatgttcttgctggtaattctaggtgcacataatcagttaacttatgcatcaaattttattattttgggtgtaataattttattttatttttgtttgttttctagtgtcaagcagtcccatcgacccacctcaaattaagtatggccatcaagtgtcattgaaggatcagacatgtacatgggtctgggacgaagttaataataatccattgatggcagctaacaataaggttagatggtgtacaatttgaagtatacttaggtgttctttgatgctttgaacaatgtaatttactaaatcaggcttttttttttcattctcacattaccatctgctgcaggtaaaggctttgttgtcacatcaccaattcagcatactaaaaattccagtcactaacccctctgatgacctctctgatggtatagtcatggacacaaatattttagactatcatatgtggcttatcatcattcaccaagcaaatgttttttatatcctgcaggcagtaagcttccatttgaagctatctttgtgtcctgcaaggacagttcgcacaaaccaactattctagtccttcatggtggcccacactcagtatctgtatcaagctattcgaaaacatcggcgttcctcgcatcacttggatttaacctacttattgtaaattatcggtaagtttgctgaaacatttctacagttctgatcaattaagcttatggcatcatctcactatcatctgaaaaaaaaagagggacaccgggttttggagaggaggctttgcagtcacttcctggaaaggttggatctcaggtatgtaatccagctaaactctgagtctttgtttctcatgaaccaacctaatttctgatgtgtgtcaaactgtcaagcaggatgtccaagactgccttacagctctagactatgtcattgagggaggacttatagacgcatctaaagtagctgtcatcggaatttcgcacggtggattcttgactacacatctgattggtcaggttagcatcctaacagattttagcctctcaaaggaaaagaagaagaagaacaaaatcctaatagaagttagtatatgtttcttgttcagcttgtaatttgttgttattttgtttcaggctccagatagatttatggtggcagctgctcgtaatccagtctgcaacctatcactgatgattggcaccactgacattccagattggtgttatgcagtggcctgtgggagtgaagggaggcaacatgcctctgaatctccttcacctgatcatcttcgcctcttctatcagaaatcaccaattgcccatatttcgaaggtgcatttctgttctcgccttcattcaaagagcaaaaaagaaatgttcttactgatcaagtcattgttcttaaaaacaaatgaaccagagaaatcaagtgattagctactcaaaaaggctcactgaactttgctgattttttttttctaaaaaaaaaaactttgctgatttcaacaggtgaaagcgcccctgcttatgcttcttggaggagcagatcttcgagtccccatttctaatggcctacaggtacatcaatagccgtttaaatttgcctcagtagtttccactttcaattcgttgtagaaatagtccataacaaaaaggctagatcctgaaacaacctaacaatcccgtgaaaagaaaatcaatcgacgggctacatcaaacagacattctttaaattcatctacactcgattaataacctaacaatcctgcatttgcttcactcatttgtcggatttggttaaactattcctgctcggatgatttcagtacgcaagagctctgagagaaagaggcggcgagatcaggatcatgatgttcccagacgacatacatgaaatcaacatgtaagcaagtaactgaaccgaatttcagctcatctgctttatataaaatgtcggcaacagccgttcggaaaaaaaaaagacattcagatgccattgtactattgcttttgtgcctaattttctccctcatactggaatccatgcttttgttcagaccacaatcggattttgagagcttcctcaacattggtgtctggttcaagaagcatcttagcatatcagcatcagatgcatctgcatgaagtcaacttgaagaaggggaggaagaaattacgtggtttaatctagtccaacaggtagatgccattgtaagccttgttcatggagctcgtccgtagacgagtgctccaaaatattagagacttccctattgaaaaaagtaaatggagactttaattggtttgagttctttccttttcccttcaattcacatgcttgatgattggatgcaaattcagtcggatttactaattactactagctactgctctgaccgtgattgatgatcagtccaacaacaatacttgcaaaatagtgcaatccaggagggtgttgttctttatgcacgttggcccatgatttttttttttcaaacaaagtcaacagccgcgcgagcaagtacaaacctgattcattaagtaaagtgtggttttgtgaattttactcttgcccggcgaaaaatttactgccccctgtgaattttcctcttcattctgaaatactttgcacaagccaactcacccatcaacatgccaacttaatgtaagcaattaaattggtgaaaaattaaacacgccatcagattgctacgttaaaactacaaagctggaaagcacaacaaggggggcgagagctataacaattttacaacaacaattgactatatcagatgtaccaaagaccatgtcagttcttcgttgaggcttgggcaagctgagatgctactttgtttgagaagaagctctcgagcctgcacaaaaagaaggaataaaaccaaatcaattagacaaccaggtgactgagatgctactttctttgaactctcgagtatgcaaaaaaggaacaaaaccaatcacttagttagacaaccaagtgactatggccttgtttagtacgcgaaaaaaaaatttttgggtgtcacatcggacgtttgaccggatgtcggaaggggtttccggacacgaatgaaaaaagctaatttcataactcgataggaaacagcgagacgaatttattaagcctaattaatccatcattagcacatgtgggttactgtagcacttatggctaatcatggactaattaggctcaaaagattcgtctcgcaatttccatgcaaactgtgcaattagtttttttgtttatctatatttaatgctccatgcatgtatccaaagatttgatgtgatgtttttgggaaaaaaaattgggaactaaataaggcctacgtttcaaacacggacgataaataattaatgccagatttcccccaaggtgaatcttctactggttatgatagaaagacattattgagtgcacataaatccaacatgagatgtaaccacccacgtttctattaatggttaggctaaatattttcaaagaaacattgacagatgcctgacttacaggtagatgaatatgcaaacacaagattgaagttcattgctcaccgtgaggcacacttgtaatagattgtatcgggagagttataagtttttgcattgctgaacattctcttcatgtcagctacaaacatctctagcgtcacataatactgctcagactcaactctttttgacattgtcttcaaatctgcagacaagcttagtgttcagaaactgaatagcttagatggcacaaaacatagcttcgccaagctgggaaaagaagggaaaataatcccctaaatcattccagcataccaataggatctttgataatgtcataatagtcaggaacatcacgtgaatccactggctctttgaatggccaagcatcaggatgctcattcatattctacaagacaaagctcttatatcagaattgataaaagtatgaagtatctttcgtaagacaacagtagatccaacacatcaggtcattgcagatctacaacatctttggaacataatcctttgaaaaaattgtctatagagcactgtacttggttgtcatgttaactcccaatcacaaaacaaaattagctatatctgctggcagatactcttttgttgccgatacacactaaaagatcaggtctgtttgcccatagttttgtttgctggtggccattgcaatccattagcatagtagcatatgcacatgactttaaggtgtgttttgagtaatgacatggatccttagtgttacattggtgtagccagttttgcctaatttctaaaccacactggactgatggttgagaatcactagtggctcacctgacaatcagcttaacgtttcaaaggataaatatgactaatgtctgaccatatgaagtagagttcacagtgaagtataccagaaatatttgaatattaaacttataaaatgtggccatttcaatcattgaaccattgaacagaccatccagctggtctggctttagaaaatatgcttgaaacagaaagggtgcaaaaaattcaaaagggagcaagcaaagtacaggtttatccagtgaggtcaaaccaaatggttgcatgtcatataaaaagatttgcgaagataaaagacttgccttcaacaatgaacgcattagattagtaagttgttgcctgtaagtactgtaatcaggagaaaaggctgatcttgatttggaatgcccccactgatctggcgtccacccagcttcccctgcatcacattgattgttctgatcaggcttgcatcatagctaaaccagtaaacctaacaaggcggcaaaacaa

SEQ ID NO: 12095 - DNA, 925 bp, Oryza sativa
tttcagaatcacattctgaagacaaatgggtctatattgctttattgtattagcatccttaatttttggaagcagagaaatcaccccgtaatttatcctatcactgtctaaaattcctttttgaagatcatcaagcatctctttgatcaaccccgtaaattcaggccagagtttcttatagaaacccactgggaaaccatccggtcccggggccgtatttgttttcatgctcttcatgacctgatcaatttctgacaactcaaaaggtttcatcaagctttcattatccccctcattcaaacttaatttgtcagcccaaaccccctgttccaaatgaatgtttctcaattcttccctcccaaacgactgcttgtaatagtcataaatatgagtctgaatctgttggaaatctgaaagaacctcctcccctttttgtatagagaaaatgtgactttcctattcctaccattagcaatcctatggaaaaaagaagtattgctatccccccttaacaaccattgttcaccccctcttctttgccaccatatttcttcttgtagatagatctgttctacttccttttctagctcatatctgacctcccattcttgagaaaacaaatccctctcctcagcaatgctgtcaatttcaatcagcttttgttctatctctttccttctctttttttgtttgcttaccatattagcactccacccccttaaccatctcctcagataaggcataagaagatgccaataattcatcactttgctctgtattctggcaggccacttctcaagcaaatctttcttaaaaccctccaactcaaactagcccatctcgaacctaaaattgtttcccctaactctctccccctcctagtatttaacagcaaaggaccatggtctgaaccaaccctcaaaaa

SEQ ID NO: 12096 - DNA, 3282 bp, Oryza sativa
cgcagccgttgtccgcggcgccgggccgccgagcgcacttgtgccgctcctacttgtcgccgtccgccgcccgcccccgtgcgccgccttccaccgtgcgcccccacgcgtcgccgtcgtccgcagctccgcgcctccgtgcgcacttgcgccgctcccactcgccgtcgttcgccgcccgccccagagcgccgccgtcgtccgaccgccgctccgcacttgcgcctgcatgcacgagtgagagagaacggagagagaaattaggaagagatagagtggaggcatgacaggtggaccccaccattttttgaaaaaaaatgctgactggactgccacgcgtacgccacgtaggataaaaccgctctgaattgggtcgagggggtatttcgtccggtattgaaagtccagggtgaagaatgttcgtttttgtggttcagggggtaattcggacaaccacaatagttcggggggtaattcgtactttttcctttattttattatgacttgatttatcatcaaatgttctttaagcatgacataactatttttatatttatataaaaatcttgaataagacgagtagtcaaacgttggttaaaaagtcaacagcgttatacattaaaatacggagggagtagatttctgaacttataaattttgtaactacttattcttataatccgagtggaaatatgtattattcgttagcttgagattctagaggaaacagtaaccggtaaaggcttcttcaaacatgcctcgattacaaatttacaatacgaggtcatcgtggattcatggtggactttgccatcatcggtcaacatttctctttcccgccgctgacaacatttatttccttctaccatttgcatgcttgcattcaacacaaaatgtcaaacttgtagccaaaacagttgaggccaaacccaaacatttgaattcaaatagcaaacattctcccaagcacctaggccctagcatctctagcagtctcagctagcactagaagaaatcaagaaatcccgttcaccttcagctagcactcgaagaagaaaaaaggtattttcaacctgctagaaaattaaggaaaaaggaaaatagttgttcctttttctctagaaaaaagatagttgtaaaagtttagaaaaaaacttgggacatttgtgctctaccgataaatttaaaatccaaattcacccgcacattgagaaacaaaataaaattttaaaaaatgacattgtattcagacttgtatttatcttatttatttgtcgctctaagacttgaagttggtaaaatgacattttttcctccttttatataattgtttggattgttgtttcgaagtgtcatttggaagaaaaatgtggcattccagacaaactatcaaactgtttccatagacggatctttccacatttgtgctctacggtcaaatgtcgacataaaaaattccagtctttgactgcgattccaattcttccgtgactagattttagtattggatataatcacaccttaagattacttagctaccacaaacttcatgggtactcttggcttcgttcggtagcagcagattgagagaaattcactctttttaacgggcaaagttcccgaattatttaatgatgcctttttttgcaaaaatatttatataaaaactgttcaaaaaatcgcattaatcttttttaaaaaagtttgaaataattaatactcaattaatgttgcactaatcgcacacctcattatcatcattttacgtattttcccaatcttcctcttttctcacctcttaaacatatcttagattccaaattacactactcccttgcacattcccattgttcattagatacaacctaactatacttttgtgtatgattattgcgtgagacatacggggcgaggaatagatcttgctgccataagtgtaagcaaactaagggctgtgtttttttttttgggaaccctgccctttacacacaaaacatgacaattgattaacacataattaattaagtattaactataaaaaacatgaaaaatatattaatatgattttttaaagcaattttcgtataatttttttttaaaaaaaatacaccgtttagctgtttgaaaagcgtacgcacgaaacataaaagtgatgagttggaaagttggggaaagaacttatgggtgcttaccgaatttgagatgatgctgactcaacctgcggcatcctcagtcatgctgactcacaccggtctacagtccagtcaacctcgtattcacgatggctgatcatatgtcatggctcgccttcaccggtcaacattatctccttaatttaacttcgcagatttcattcaacgccaaatctcacaagcaatctatccaaatctcttttatatatactagttttcatcatccttgctgcaaaatttgacaacgcaacgcaaagcagctgctcttccattccatgtctgcgcgtcccaaccctccgcccgtgcggcggccgcgctggcgccgggatctcaccgtccggacgccgcgcgccgacgtcgccatgtcgctcgccgcgccaccgccgccgccgtccctcgacaccacggtggagcccccgctcgctgagatggagctcgtctgcctcgtcgacagcggcgaggccggcgaggtgtggctggtgcgtcaccgtggcacgcggcgggagtacgcgctcaaggtgctctacgagcgctgggccgccgccgccggcggcgacgccgacgacgacgaccactcgtccctggtgcggtgccacggcgccacgcgccggagcggcggcggcggcgaggagcaccggatcgtcctgctcgagcacatgcgcggcgggtctctctccggccgccgcgtcgcggacgagcgcgccctcgccggcgtcgcgcgccaggcgctctccgggatcgcgcacctccaccgccgcggcgtcgtccacggggacatcaggccgtccaacctgttcgtcgactcgtcggggcgcgtcaagatcgccgggttcggcgccgaccgcgccatcgaccggacggccaacggcgggccctgcagggcgtcgctcagccccgccgcgtacatgagccccgaccacgcctgcggcggcggcggcggctacgccggcgacatatggagcttcggcctcaccatcctcgagctctacacgggcagcttccccttggtcgagcaggggcaatcgatcccgctgacgtgttactccgacggaccaccggaggcgccggccaccgcctcgccggagttccg

SEQ ID NO: 12097 - DNA, 628 bp, Oryza sativa
ttctcttgcaccaccgcgactgccgatgctgcgattttttcgactctctcgagcgcctcccccgcttgggactttggcgcgaagaagttggggaagtacaagctcgatggcgcgggttttggctccccgtcgtcgccgctcacactcgaagagaggtcatgcgcctttgcttgctcggccattaggctgaacaagggaaacttggcccacacggaagagtatgagagctcagaaaacacacgctgagccccttacctggcgcgccagatgacggagctcggggctcctcaccgggagaccgcgcaggcccccctttgccagttcggccgggggcttagggtgagatctcaagctctcgctgtgtgtggaaagatcgcgtgccaggaagaaacgcgagacacggacgatgtatacaggttcgggccgctggaaagcgtaataccctactcctgtgtttttggtggatctgtgtaagagcaagttacaaaaaatcaaccagccctctcttctctcgggaaaatccagccccctctctttgtgggcatggtcctccttttatatcttaaggggataccacatgtaccctttcctttccaaactggacttttcttctctttatggacggaga

SEQ ID NO: 12098 - DNA, 1774 bp, Oryza sativa
taagtgtcatctgtcatttcatccccgatgaacattacttattacttcacttggtttcatcattccatattacaggaaaaagttatatgtttctatagaaaagtcaaacaacaagcaatggcccatacaacgccccctcctgttgtcacatgctgtagggttctgttggcatgtgttttattcaactgactattgcctacttgtacaggtagctgctatgtctggtgatgcaaggcgagccttagaaatatgtagacgtgcagcagagtttgcagattaccgcgttaaacaatctgggcacacttctgtgaatagaggtacggaccacatatctacaagccatttattgcagtcatggattctggatttatgtaatcttgatgaatatatattcaagtactatggtcttatgacttcatcccttcattcgtatccaattccagctgtgtatagtgatcaaactttaatctgatacctgtaggaaaaaatgttgtttgcatgggtgacatagaagctgctattcaggaagtctttcaggcaccacatattcaagtaagtgggcactgattgcttgttttaagaaatcagactcctagttcactttgtaatgcagtacattattcagttaggggttggttactgcacatacttagcttgcccttccctaacaagaccaattactttggctaggtacaccttcaggtgtagagaccaggagttatcgtccattatctaacaaaacttaaccaattactaatgttagctgaccttctaagcctcacctgtaacttttttcctctaacaggtaatgaagaactgcccaaaatttggaaagattatattggtcgctatggttcatgaattatacagaagtgggctaggtgaagtgatgttcgataaggtgagcacccactttttgttgttttaatttatagagcactgctacacatactagctttttcttgctaaatttttactaacaatcatcttaaccgtttgatttaggtagatggaagttataaaaaatttagatactcatagaatgacacatcagtgttagtaagaaaaaaaatagtacatagagccttttcctaatttatatgttgctggcctagctttgtgagcataaagaaaaagcaaggtagagattgacttttctctgattctaatgcaaaaatatcacctctgtttattctctagtaggtgattcatcaaacttattaggcctttttagacagctgtatccactgtctttcaagtttcaatagtacagcatattaccgtccttcacatgacttcagaattcactgtaacagtattactacaacacatactggttatttccctgaatcagtacaatggcctgcagggctgaaacgtgcaagtgttttgtactttgtcatgtattcttcattaacattttcaatgcatcgttttattttaacagcaccttgtatttatgtgaattgaggcagatacaaagtcttgttttgcttaagaagttcccttggtgtcagtacttttaattctttagtgaattacttttgagatgtcaataatcctaattgatgttatgctcatgcttaatattgttggtggtttgaaggaagaaatctgatgggctttcctattatgctgtaactggcagcaactgtcctctcttggtgccatgtcaacagagaaatattgcctggctatgatactcttctgaaaatctggtaaatgaatctggttttttgtttacttcatattacatgattttttccccaaatgt

SEQ ID NO: 12099 - DNA, 5393 bp, Oryza sativa
cactttgcatgtcggcctggtaatacaccaacgcaatttgcatatcagcttgataatatgccaatgctctacttgaatagaacacagtcagttccacaaataaacattgatatccaagtcacatatcaacacctaatcagcaaatcctgatacggatctttttccatggaatatagaatcataaatcattgaataggttaaaagggcagacatttataagctatttcaactattaggattgctctagctcccaagcgttagaaaatgcatgcatgggatagtcatatggcatatttcacctattccatggttcataaagaataccagctagagattttatttaagattgggaaaaaatgaactaacaacgcattttactgcccaagtaggaagcactcaaaatggtgtgctatgcatcggttattgattatatcacacacatcttactggattctgacgaaaaatttttattcaagctccaaataggtacactacttgcaaagggaagttagcattgatgattggtcctagaaaattttttataacacgcaaagtacggaacttagcagtttgacatactataaacaggcattaccctattacattgaacaaatgcacatgacttgtgacatgaatacacaaagttaaatatataaataagtgtgccgctgcagcaaatcatcggacgtcaatgaagccccatcagcctcaaaatggcacaataataccaggctcctgcacagcatattatcatagagatacatccaaaacatatccataaacttgaaccccaacaagcagactgtgaccctacctgattcaactaagaacagaacaaccatttctcagtacatttacaacacaaaccgtgcatgcgatctctctaacaacatcagctagcgattccatatccgaacaatcaaatcactccaaaaaaaaaactgtactattctattccatccacctatacccctctattccatccatctcgagtccacatatatacagtattttcggatcaaacgcgtcaaaaacacgccagggaagaaaggattcccctccctcaaacaatccagcaccaaaacgcgccgtctcgccgccaagcattacgaatccgacgcgctaccacctcatcccccgatcaaaacccaccaaacggaatacgagaacacgaaacccccccccccccccccggatctacctgctgctgcgggggcggaggcggaggcggcggcgcgggcatctggacccccgccttggcgcgcttgctgagcgggccgccgtcctcttcgccgccatgcagcatctcgtccgcctccagcttcaccgtagcccccgccgccgacgccgccgccatggccggctcggccggccgcttcccggagctcggcagctgcaccatgggagggatcacccccggaaaccctaaccctaaccctaaccctaactccccccaaaccgacgccgccgccgccgccgccggccgaatcgaagtcgaaatcgaagcagaaggcgaacgcgaggcgaagcgaagcgaaatcgaatcgaagtgattcgagaggaagggaagcgaggaggaggaggaggaggtgatggcctttggggagagaaaagggtccaaaaataggcgcccacgcggggtgcgcagagaggcggcgcaccagtggatgacaggtggggcccacgcggagtgggcccggcgtgtcggcggcgggtggtgcggatctcggtgtggataaagtggcggggccggggggcgtggaggtggaggtgatggtggtggtggacgggtgtcagtggctagaatggatgacaggtgggggccactgcgttgatggtgtgtgagggctttggctttcacgtgcaaaacgttttcccacccaacctactctcgtatacggcactactactctactggtcctctacatcctatacatcctagagtatttactaccaccgtactacactactactagcatgacaaagtcgtcgtgggttcattttatattatagatatgtaacaagtatttaaggtatataatggatttaataaaataataaaaatatatatgtaacggatatttcatacatctaaaggattagaatctagctgtcgtctcgggttgcctcccgcggggtaactacagaggcgcctaaccctagttgtcatcaccattcccaaaatcttctcatcgttgtcactggcgccgcctccgacggggctatggcgatgggccgctctctctccatccaaggtaagattaggcatatcatagttctcatcaccaaaggcgatagaatggataaattgaattaggaaatggtttgttttgtcgccgttgtcgtcatggcctttctccgatgatgttccgtcgcctttcattgccagatgatttgatgaagggcgtaatgagattgaatcaactattagtgggttgtgaggtgtcaccgccgctatcaccgaggtcaacaactctttagatggggtggcgttttgttcatattttgaccgctaagggcccctttgattcacatgataggaaaaatataggaataggaaaacacaggaatcgaagtagtaggtttctcaaatcctacaggaatcaacaaacacatgaaagacaataggagtccttttatagtgctgtgagaaaaacaaaggaaagttcacaaagaggtcatacctcttgctatttttcgtatgaaatgcgaagcataggaatacaatcatatggaaagtttactttctttcctatgaatcaaaaggacatgtaggaaataaatccatagaaatttgaatcctataaaagtcctttgccaatcatatgaatcaaaggggccctaaaggggcttggtgcctcatagtcatgtcaatctgaacaataatcaagaggagatccgatcgactggtgaaggggcgtggtggcgctttcttgtcaagctggcatgatgggttctatgtagatatcgcatatgattggttgggatacctattgggtgtatgcctcactacacttggtaggggctatgggtaggatacttggggaaccaccattgtcattgttcctatttgggacagcaaattgatgataggtggagtcagaagattcctaaataggcttatttcattcatcaatgaggtggatagatgaggtcagtgctttgcaaatggtgttcaccctttgattttgcttggttttagcctttggtgatcggatgacagggactacatagatggtgaccgccatttggatcatgatgatcggggcatgaccgctgaattgagctcgccacaatcaaatggcaacatgaggtacaattggcggaggctttagggtgaaaaccccgatgtggtcatttggatttgacaacgtagtgtttgttttgtcattcctttgttgaaggtgtcgtttcagattttggatgaaaatctagaccagacttaatatgacaatggtacacattcgtcggatccttcttgaaggcgttcttttggattagttgtaaacttttcatactcattttggtttgtactagagtgagcttccacagaactgcatgatttgttctcgatgtccttttttttctatttctaggccatgtgcatcttggtagatgcaaaggtcgagtgtaattttgtttattaatgaaatcttcccattatataaaaaaggatttgaatctatacatatgatgggtattttaggtaatcaaaaggatttgacaatacaattggataaatccgaaatacagcttgtagatgtcatcattgtcgttggtcatcctcgctcgtatattgggcaacctctctttaatttatatctagtggtttataaagtgttataccaatgtgaagggggaacaaaagggtgaatcttcaaatatgcaaagtcttacacgggcaattcacaaaatgtattgaggagacgctgcgtggggtaaggctaaatttatggcgcatgttctagatccaacggtctacaatcttgttttgaaaattttcacataggtatagatttgcattacatatttcccccctaatacgcaatggacatttcaggcgttgaaatgatttggcagtacaatgagaaataaatatattatataatggtcatttcaggcattcaattgatttgggaatacaacgagaaaaatctatattatataatggttatttgaggcattcaatggatttggcaatacaataagaaaaatatatgaacttgcttgttatgttacatgatctaaacaaaattttaggttgttattaggtctaaaatctgtttaacgagatatagttttgatttttttaaaaaaaaaacagaatggctccaatggatatatggggaagagtgtctgacaaaaaaacctttttagtccatgacaactcatagttaagagtgcatctaaaaaaactatagttaagaatgattgcatatatctgaaaaaggtttaaatttgacttcgagttttaagtggttttaccgccccattgtttcgcttatttctcgaataagcgaaacgacatatttgcaaacgaaaaataatttgtgaataaattttttatatatgtgtttttagcgatgtaaaagcaaaagctaaaaaataaacttcgatgaaataaccccaaaatcaactccaaatttaaggttgaaaattaaaattttggctaataagcataagcataagcaaaaagataaggccgtgattccaatcaaaatcaatatatctacctagcctgaaattcctgcttctaagaaagaaatcatataattgttttagcatccaccaaactgcttgcacaccgttcacctgttcatgaaaacctctggttcactggactatactaatttctcttcttccatcctgcaagcatgcagcagtagagcaggaagtgcaggactacctagttggagaagggaaaatgcttaccttaatgaggaagataaattcacagttggtaagaccataagtcgaaaattgctggagcagttcaaacatcccaagatcgaaatttcgggcattcgatttttgtcaaaggaaaatgttctgagtacaactgttgagtatctaatgtgctgccgtaaaatgaatgaatatggcacaaacaacaaaaaaacgtaaaactaatggtgtgattttctccttttctatatatcattttcaatcttgtcctgaaatgaatccatgcatataacctatcaactcctgttggcaagcagtgaagcctcgtcatcgtcgttttcgacaacgtcctgatttttgcattcttggtgcaaactaccggtgctcgatttcccatccactgtaagagaggttaactcaacattgtccatttgatattgggcagcatcatcctcaggtagcaagtcacctggaaggagattagagtt

SEQ ID NO: 12100 - DNA, 1393 bp, Oryza sativa
cttaaagtttatgttgactttctttttcggagctgtgagctttaaatatttcttatgacctttttacctccagaaagaaatcagagttccctcagtaaatctactaatagaaaaggcaccataaaagtaatcttaaattaaaaaccagattaaggatgcagtaaccatagactaatgtactacaagacactgataagtggtaagcatagttcgtgttctgtattaccctacttatagagacaaaaataacaatacttgctgtcctgttactgtaatgttgggttctaagatgcaattttctatataggagttattttaaagaatcaataaatccatttttcaaatttataatagttaatacttaattaatcatgcgctactgatacgccccattctctgagacaacaatagctacaggcaaacatccctgccaaactcaccctaagatcccattacaccctagcacctacccaaaagaaatgcattcaaattttgctctagcatacatttaatgctttccttacctgttcatacttgcttggccacctgtgaaatcagatgtagcttgccacagtgtgtgtttccttggttgaggatccgtctctttgaagaagagaggaggtcgggccaacttcattaataatagaaacctctcagaaaaaaagcaagataggaaagtaacatgaaccaataatctttaaaataacttaccaccacatccaaggttccctgtccattttcagggcaagatgccttcaatgcagtaatatccgaccactgaatttctatcttactcttcaaaccaccttccagaacttcccatacaagcttatgttttgcgaagtaacattttgccaccaaatcaccttcataccgtgatatatactgctcagagatagaatacagttaagattatggccaacaattgttcaggagaactgctctaaatgtgactaaacactaggtcgtagattcaacaacatgcaggaataaggcttttgggcaaatgactacctactgtagcaaataattggccattaggacaggatataggatgttttaatgttgcattaacatctcacagtggtgtacaatataaactatagtaagtactatgcttacataagatcggaagtattacatgcaaacagcatcaccacaatgagactcagaaactaagaatgtacctcaacaaaagaatgtttctgtgtagatagtaaataattttgattgaaagaaataaaaaagcaacagaaaaggaggacgccaaaattaaataaatgtcaaggttgtggcagaactactaaaagctatatctagattcttacctccatgtgccaattctcaaaatatttgcaggaaagtttgaagctttcaagcgctccccagctgt

SEQ ID NO: 12101 - DNA, 17942 bp, Oryza sativa
caggactcgtcgggtttgccacaaggatcgatttattgcgtcatcatcgcagctccagtggccgccgtagtccccgtcctcaacacggtcgctggcaccgccaccgtcgccagccccaccatcgcctagggttagggtttgagactgggaaatcgggttggggagggagatggacagctgggcgcaggggtagattgatcttttaaaaaattatttgacctctttgtctcggaaactataaaatattgcctccggtgtttcacagccaatttcacaaatttcgtagtgtccgttggcaaaaccaagattttacgatgtctcaccgccaattacacgattttcgggtgtcctataccaaattttgcctacttaataagttattcccctcgtggtctctcgtggagtactggagtggtgggctcacctcacctgcgatggcgaaatgattggtgggtgggtggtacggctgtgtgtgtgtttttggtcgctcgccggcggaagcaaaagaggaatttttttttcgcgggaagaaaaggaggaatcttggggcatcatcggcgatggggacgtgcgacttggcaattctttttttcatttttcaattctactcgctttgtaaaaaaaaaaacttaacttctaaaatttaaattttatccaaaaaaaatacaacctctatcatcctatctacccttagcatataaaataagggtgtgtttggttgggtggatgagtctggatgggagatggccgccggattttctgtggtgtttggttggagggcaaggtggatggggcggcccggaatagggaatattctctcgatatgctggatgagtgcatccggccgatttggctggatgaagccattcagttttggtctgggtgatgtgtcttattctgattaggtgtggttagtttgattttctgttaagcaagctccaaatgatttttttctcctaaaccgtctatctaatttatgatttgattacaccattatatttgttataattaaatattaaaaacaagatctcggatgattatattttgataaaaaaatatatatgacaaatgggtcccactaacttatggctttttccatccatgctatatccctgcaaccaaacaagaaattggattgccttatccatacaaatcaaacaaaaaattggattgccatatccaacaaaatatggatggccatatcccatccatgcatgtccgtgaaccaaacacaccctaagatgttttatcacttcaatacattttacttcatccgtttcatattataagattttataacattatccatattcatatatatagtaatgaatctagccatatatgtgtacataaattcattaacatctatatgaatatgggcaaagctagaaagtcttacaacctgaaacggagggagtacctatctatcactcttactactttttttaatgattgaggatatttttgtcattcttacttttcactaattttgccttgggatgctaagaatggatttatttttttaaggactgagtgagtaggatcgaaggtgggacacgtcaaacaaactgacagccatagataaaatgaattcagattttagcagatattcagatataatgtgaattcaggtttgagcagatattggcccggcttgaaacagttttttattattttttttacacgacagattgtttacttgatttaacgtaatatcaagtggtctaaacaaaccactggaagaaatgttcttgagaatcgtattttcacgaaaatgacacaaatatccgtcgcaaaaatctagaaaaagaaaagcgaagacaacagggatattatgtgaattcatatctttatggatctttttctttcatagaaaatactcacacagaccactaaatacacaaacgctcaacacatgtttaaatggacgaaattaatactacgtcgagaactaaagattctaagaggatgataaaaatataaaaaaaagtttctcatattctaaactctacttcattttttaatttattgaagcagtttaatactccctccgtctcataatataagggattttgagtttttgcttacactgtttaaccactcgtcttattcaaaaaattttagaattattatttattttttttacttactttattatccaaagtactttaagcataacttttcgttttttatatttgcataattttttttaataagacgagtggtcaaacactataagtaaaaactcaaaatctcttatattatgggacggagggagtactagagtaattactagctataagtttgtattataggcaatatatatttttaagtttgtattactagctataagtttgtattataggcaatatatattttgggatggattgagtatttgtcccggtaggtaattggggttaccgctaggtacatgagtagtggtggtggtactaatgctaccttctgtattagtatagatttgtaattactaagatttttttctgtattagtatagatttgcaattactaagaaatttctcagataggatttaaatcactaatatcactaaattttgttgagagtgtacccatagatttagtggtggaagaattgaaaaggacatttctttaaggaaaaaaatccgtgccaattgaatttctacctaaccagaaaaattactttagagcacccctttagaaactctaccctccaagatttttttttttggatgatatttacctatccatttcacattcaccacgttagcatcgaaccaagtacatcaattcaactttactcgataccaccaaaacaaaaaaaaattgataatatctacctattcatctcacgtgcaccacgctagcatcgaaccaaatacgtcaattccaatttactcccttggaggctcattcgatttaaataatatccaaataatcattattgtatgaattgaaaccttacaattttttctatatgcatcattcatagatccttccaaattcacaagaataatggtaggattcttagcatgaagtgagatctcttagaaaaattcatatggattagagtagtgtcattctgttttttttttctattcctataatttgaaaatcttatgaaccgaataagcccctaggcgtgtttgagatgacgaaaaataacaagatacgcaaaactagatgagtcattacttattagcgcacgattaattcagtattaactatttcaaactttaaaaatgatgaagatgattttttgagtagcttttctataaatttttgggtaacacgtgtataaaaaagacaaggctgggggttagggagagtgtatgactcaacaaactgacttatcgaagtcggtaagagagaagacgctcatatacaaaacattggtctgtaaatttaactcatttctagttttccatacatattataacattggtcaccctttgagcattcgctcgggggctatttctatctaatattctttcctgagtattgatttcaggaaaattctattcgacattgacgaaggctccatgtctctatggttctacaccaagatcgactaagacgagtatgacaaatgttgacaaggcttcgtcgcagattctacaccttctcgatcgctcaagaacggttggtggatctcgacaaggaatacaaaatgaagaaatggtgtacccgtcgagataaaatttcttgacttcaatccaaattctcgattacagcaagacgggagacttagtcgtatgctatgtactttcttggttgacgtcggagattgactcagacaaaccctttaggtgcccgcacgaggctgataaaggaattctaacgttatctctgaactcaccgagaacggtcacgtgagcacgataacagttactccaaggtctgcgcgcggttgagaatatgaattcgttcatttgcatcgaagtcgggggctactgtcagggttatggataccacatacctaatagtagttgactaaatctcgacaggacccaccacataccatgtcttatacggatacaaccttcggatataggagaagtttcgcataaggaaggatgactagagttctacatggaaacgacaaggactactcggaatgtatccatattagtttccctaattctacttggacaagaggacacctatgggtataaatacaaggccccctaggaggagaggggacacagacaacatagacgccacaaagccacaagccaatacaagccaacaaacgccaagacaagccatcggatatcgacatcagagatacgcctggatcgaccctatccggtacctacagaggctggtcgtagggatctagcgttgtctctgatctcgccggacacgaactcgaggaggaagactgccctgttgtcgactacgagtcaaaccttcagaccgccatgtcgacaacagttagataggctaccccaaatattgtattggtgtgattatggtgaataagagcaataccggctttggccaacaggatgtagggttattacctgacaattcaagggcccgaacctgtataaaaatcctcgtctccatctcttttacctcagtctcgcatataccctagtaccaacgatccccatactttgcaaataccggaatcgcgccatcaaacgtcgacaatagttactctctctcttttttctgccgaacgcagccacagagctgcaaccgcatagcatagttttgctactcttactagttattatgatggcaaccaggggtggatccagcgtgggtgctgtgggggactcgagtcccccctaccccgctggatcaccatcgatagaaggggagatgaaagagaaagaataaggagaaaataaagagtagagagaactgaagaaggaagaatgagatgagtcccccttaaatcttaaatcttgttctaatccaccctgatggcagctacatcaatatagccgcagcaacatacaacaatcttaatcgtaacacgcctaagtatcgaacaaaactgactcttaatgtgtcttccctcccacaaatcgaccctgatgcatgagcaacgttacaaatactaagtgggttcccacttattcaaaacgtttatattcgatactctactttggttgagtttgttacgaggagatgggaacaattctcctgcgcatggagaacggagcggtctattaacacgtgattaattaataattactccctctgtcccagaatataagcagttttagagttaaacacggttattaagaaagtagatagaaataagtggtgaaggtttgcgatttgatgagcaatggaggtaggtgagaaaagtgaatggtggaggattatgattggttgggaagataatgttggtgaaaaagttgttatattttgggataaataccgagggctaaaaattgttgtattttataacggagggagtagctttttttttagcggtattcctgcaggtccaccctcgaagcaaagctgcaacagagagtgaccgtactgagctaatcagaaggtggtgtttggatccaggaacttaactttagaccatgtatttagacactaatttaaagtattaaatattgactacttacaaaactaattacataaatgaaagctaatttgcgagacaaattttttaagcctaattaatccataattagagactgtttactgtagcatcacataggctaatcatggattaattaggctcaatagattcgtctcgagaattagtccaagactatggatgggttttattaatactccatgtttaatatttataattagtgtccaagaagaatgcgactttctttggtgccctgattatctgtccgtagtccggactggtaattcgttcttaaagattaagttaggttttatcggtacagtagacttggaagcaacctgtatctgtgttaacaagggattcgatctggtaagctctctgcatcgtagtgctgtttcgtatagaagaaaaaacagattatagcaagcgtaggagtacacggctctctcacgaaattccagcttctaacagtatgttgctgaaattcaatccaatcaacagcatggacgctccccgcaaaaaaaaaaaaaaaaaaaaaaaaaaaaaaaaaaaaaaaaaaaccagcatggacgctgggttgtagttgagatcacattcgtttcgcatgttttccacaatgtttttttttttaaaaacaaactagcaaaggcaaaagctttgtctttttttgtattgatagagcaaggacatatttccacatttgagcctgtaatatttgaactttggcaactccatattgctgcagtttggcgttcaaaaatctctattgtgagaagaggatgcacgagttaattagttttaaaattagtaacatactcatacgcattacaatacaatacaatagatccatataataattagaatggattgtacctgaacgcgttctataacttaggaatgaggatatattaagagtatgaatacatggtggcacgatgtggtactctgatttggcaaacaaaagcgccatcaaaggtgaaattatttatgtggttggccgaaaaaggacgctgcctcacggcggataatctaagtaagcgtggttagtcgcactaacatgtttgccaactttgctgggtgggtgatgaagattgtgagcacctatttgtgtcttgcatctacatgaccaggatgtggagaatgatcaagagctagattggggttggcttcctgctgccatctgagtcatgcttagacctaggagaatggtggttagcaatgtggcaaaattttcagaacagctacaaggacgccattgacagccttatactgcttgtttgttggatggtttggaaggaaagaaatacgcgtgtgtattttagaatcagcagcgctcggcaggtttcctgtttggttcaattaaagaggaagtggcgatttgaaaggaagttgtggtttttagaaatataggagagcaatcccttagtgtaatctgttttcttttgggaggttgctcttgtgacaacttctatttacttcgacagtttattgttgaagtcaaaactttatatatttgtttatattcctcagtcttaagtaaatcaggttggcctatcttgaccggcccggcaatatcaaaagtatgaattgaaattcagctcctcgcggataggaggaggattgatatgcgaccgattttctgggtggtgggaggagaggaaggcggatgaatatgcaagtagtactacttgaaaaaaaaagtaaataacaactcaaaaatattttttttctgctattttatattggagtagtcctccccccaccatcgtagtttcctcgtgtaagaaaacaactccctaaaaatactaaaccaaagaaaatattattttcatgcaaaaataaaaaatatatattaaaaaactgaaccaattataattccattgctacacaatgtcatggtatctctactatcttaaaaattcgtcctcttttcatcccctcctctcaagtctcaacgtgcgcagcacgtccgtatacctaaaagtaatcactgtccatccttatcacatggacttctcccatcaatatacggatttcctgtctatcactaatcctatatacttatatagttcattcccactaaatgtagttaatgaaatttctctcttctctcattaatccacatcaccctaattatttttagcctttggatgatagatatatgattcaaattgtctcttctttattctgtcataaaaccatgcaatctcaattatttttagtctcaaaattgtactatcaatttgttttagttttgataatcatattacatcttatttgtacatataataatataacttaattttccgcagcaacatggcgggaaattcatctagttatattaacctgacggacatgtaaactagtaaaaaaaaacggagcatagggccaaacgagtgatctactcgcattcgctttattgggcctccatacccttatacatgggccgcaaaatccaaccattgggccctcattcccgcccacgcagactactcgaccacaccactttttttcttttccaatttcacaccggatccccgaaattctctttggttcgaacgaacgcgacgcgaaaaagcacaccaccacttggcttcggtttgccggcgggcgggccggccccaaccaccaccccaaccaaccaaccaaccaagcgccgccgcggttgcggctgcggccgccgggagacgcgggcggcggaggttgccgggcgagaggcaggcgagcgagcgagctgctgctgggtttggaatcgggaggagatgagcggcgcggcgctgtgcgcggcgctgacggagctggggttcgacggggaggacccgctggacgcggacgcgctcgagtggccgttccagtacgaggaggcgcggcccctcctcgcctggatctgctcctgcctccgcccctccaacgtcctctccccctcccacctcgcgcagtgagttggggtctcgatttggcggttgttgttgttgttgttgctgctgctgctgatgcttaggatgaaccagctgtaatgtcgtgattctctgctagttggtgtccacagtggatgcttgcagcgcggaatgggggcatatggtggtgttggtggttgcgggattcggagagctgatggaggtggtttgctagggttctagatgtgggtttgtgcttctatgagaaacaatatggggggattagtgagaataggcttttacagtagctttttttttgaagattttgctgtagatcttgatcgggttgattagttgcacatttgaatctagtgtttggcatctcggtaagttcattggtagctgcatttttgcttgttggcatgtttgattctgaagacagaggattgttcactcggaaagtgtgcccatttgggataatgaaaaaaatggattgtacaaatgtgacatatggcaatgccacatcgaaattctactggcatctccttttcctggcacaatggggctttagaagtgacctatgccacatagagatcatttatgatagtttctacgcttttgattccttgccaacctcattgaacctgcagctaaggttttcgtaggattcctgattttttacaaattcattttgatttgtcatcttaaacacatagcagtactcaacatcctgcggaactattgggcaaactctatcaaatcatgtgcggcattgtgttgaaaaacttggtttttactgtatcactatcgtgcatgagatgcttctaaatttacattttcactcacacctgcatttgtattgtgtaatcttggatgaaccaggacaatttaccattgtttggttgccatatttaattagtaacatatttgcatagatgacttctaaagcttcccctgcttcttttgcttgagttattctcaaatgacaaaatagattttgcattgcaggtatgagcaacttgtggaagagggtaggctgctagaggtatattcaccaagacctttctggaacgtataatttctgttatctttaacagtataggatgttgcggagctgctcctgtcagattgtgcaagcatggttccaacttccaaatgttggatgcctctaggacaggagttccagtttgtgaacaactaagatattaaaaaaatttcctagattttctggcaaaatataagatattagccagttttcaatggttgtcatgggatgctgaacctcaaggaactattcccatccaagatctgggactctgcttacaaactataaactcaaaattgggtttttgttctttacattctataacataagctgtattgtccacttgtgtttttgaacacttatatctgtgatcctgctaaaccttaaaactcatgctatcattggcattgttttctcagggtgaggatttggactctgcttttgatagtatttcagccttttcaagcaagaaagataatcaagaggctgtatttggatcagaagaaacaatccttgatatccggtatgcttggaagttcaatcttataaaattatagtggaaattggcatcaccattgaacacttactacatttacattgattcttgggctcaaatcctagaacccaactgaaatgcgattatacctcagtttttataggggaaaaaactttgtcctttcagaatttatattccaaacggagcacactactgagaaccaatttctcaaaaaatcatactaggaccagattttgaatcgtgctggaaatgataatttaactagtataaaacattgaaatctcaaaacaaaaaacaataaatcaagtaaaatagctgtttggtgaaaaagaaactagccaggtaacgcagaccataccactcaagtccatgactaaaattccaaaatgtggagagctatgtcaagacactagtaatttgtagtctggtttaaactttaaaactcctgtgcggagcccggttcctgccaaatgctagctagttgaagttaccaattggacattggatgtgcttttcctgacatgtattttattatgctaatgctgcaaaaaagaaaaactagcatacagagctgaggtttttgaattacaaaagcagcttgggcggcaacaagcacagtttgatttgcttgcagggcaagcttctacttttatccaaggcagacgggcaagtgtaactgccaagtttgcagttaatggaccacttatatcattggatgaacaactttcttctagaaacttaagaggtatatttcattatgttgcatcttatatttttctttccaacaatctccataattttgatctcctattagtatctccttaaaaagattgaatgtggaagttctatctcaatcatatgctttgttaaccatgattcatttccgaacagtggcatatatttatttatgcaataagatatttaagatatctagagtttctttcatgaggaaattgttcaattaagatgattcattatcttctaactttcagatgaatgcagttctcggaagaatcactgctactacccaggaattggcccattatcattcaggagatggtatgctctttacctatagataatagttctgttgtttttttagcttattttgcagaaaatagtaagggagtattctactggtataattatacaaacatatacgtaaactacatatatggaggggtccaggactccaggattaatgctacctttacatgcatgcaacttaagaaagaataatgcgccactgatggcttacgaatcatcagacaacaagagcatagagaactacagtaatcagaatggaatcctcttattatgtactgtggctaagaaatttgaaatcttaaaaacaagtacccatcccaaacagctgttaacattccatgttttcttagagctctctttcatatttatctatttcttaatactaacacttatatgaacattgtgttttatccaataagattcctctataactcattcatcattcatatgtgcagatgaaagtatatacttagcatattcagacttccacccttatgttgttggagacttggcttgtacaaaggagctgaaccgctggttctcgaagcaatttgagaaggtaggttctctttggctgtcatgttattctcagcttacttatttatttaacacttattctgcttacttatttatttaacactttctgtcaggggccatttcgacttgttgctgaggaagggaagtccaaatgttcctgggttagtcttgacgacatcaccaatggcttgataagaggtaaataccagttatagtaaattgtatgcaatgaatagattgattatattatttaaagagcgtaactctgatcctagattagtatgatgtgctttgaatgaactaattatgaaaaactcattcctattatgcaggagattctgaaaaatcacatcatcaccagcgtgtggctgaattgcaacgacttcgttcaatgtaactatcccttgatttatcgcttatccaaagttccaaacctttctgtttgaacatatcatagtttttttttttaccatgaaacagaaggggaatcctttatgttgaacacatcatagttgctaatgtttcatgcaatcttgttatatggtgcctattgagatattcaagtgattttatttttcttcctattgcacttctttttgcatcagtctgctggaattttgtcattgtgctatcctcttatatgtctagaatttgctttatatctttgtggtgattctaatgaccttgaactgtaaacttgctctaatttgggaacagatttgctacaagtgaaagacagtggattgaggcacaagttgaaaatgctaaacaacaggccatactctcgattttaaaatcacaagtgtcatctgacgaggctcatatacatagggatattcattctcttaggtatacattcgttactgttcatcactattattttatcagaataactgaaacgaagaaaagatagatcaattacattctccgtatcttatttattttaggagaaaaggttctgagcttgctggagaactctcgactctttctcaaaaagtacaggcttttgtatctgaggtatgctctacccatgtagaggcactgccttttcttgcaaaatacttacattatattccctagttacaaaaattggcacttcatgagtctgtttagctggatgcatatgggtttgcctgtcaattgatgaaatgtatatggttttcgacagagttttcatcaacgtaatgccacatccatttaataccataagggttgaattgcatacttgcatctggtaggatttaatgattcattgcagattaaattcctatttcagaagaaaaagtgttccaagcactgtcataaaatagctttcagttgtgaaatctctaaaccacgggcagctagaaattataatctgttatgcagatattagctttgttctgctataagttctcaggaaaaagaaaaacactcatcacttataagatactttcagcacttagaggataatatgccaatagtaattcttactgcagtgcatcagacatacttcttttagcatatggttaaaattttcccgagataggcttgtttttcccagtattcactcgttctccccctccagactataccatgcctctgctcagaactcgctcaacttcaaggcacatatattttgcaaggtttgttgatgatatttacattactttcgctggcttacatgattctgttgtatcatttccttgatattctagcattcaaatatgtaggggactacgatttaaaggtcatgcgccaggaatactacattaacaggcaaaaaacggtatgcacattcatcacatggtatatatgtcatgtacacttatttattgtcagcagttcctttgtttgcttattggtggtatcttctataatgttatgaaagtttataatcgagataactattcagatagtgttattacctatttttccttctgccttcaaatctatgggtggtaagacacttgcaccaaatagcctagggggccaaatattcttgtgacaaactttcaatgtttagatttagttggcccctgggagtattcattagaaaatctggttggtctacaccttgttgaccctatttgtttttcgtatacactcagaagacaaatttaagtgatcagtgaaaaatgtgctgctagcttgcaccaatacatgctgagatcaccttaagccagctacttttgcatttgatggaacagtgttttacatttttctgccaaggtcatacatactgccaggcatatgattgttttattacacatccttctgattctgcactgtcttcattctgcagttcatcagtcacttggctaatcagctagccagacaccagtttctgaagattgcttgccagcttgaaaggaaaaacatagctagcgcctattcactgcttagagtaatagaatccgagttgcaaagctacctatcagctgtcaatacccgtttggtaagcaatctcatttgttgagaacctcctatgttgtcatttcttcttttttatgtgtctacatgtttcatgctacactcggtagtttttgttcaatctgcccttcttagttttccaagaaatgattcttagttgacctaacaaagaaatgttttttttaattctttagggccattgtacttcattaattcaagctgcgaccgaggtgcgtgagcaaggtgcaattgatgaccgtgacactctcctccatgccgtacgggatctcttatgtgttcactcaagtaagctgacaagtgacaactctactcagatagctgtttgaacgttttaatttcgatattcaatgtttcatgtcacttctgtagatgtccaagcaacaatgccaacatacatgtcagcgcatgccttggttcagcagatatcagcccttcaatctgatttgctttctcttcagtctgaacttgaaagtgctctgccagccgatcgcaaaagatgtatcaatgaactgtaagtgatactatagctcacactatgtctaaatatcagttgcctttactttatctcctgcctgaaatacgcaaaatcaaatttttgaattgttgcttttagtgtttcttctgatctaagcaaacctacccacattcttggtttagtgaatagaacagtagtgtcccatgttgttaaggcggtaaggcatcctaactcctggcagtccataggcagtatggtaaggtgggccagacgccattactcctggcagcgccttacagccatagcgacgctatggtgatgccttgataaccatgagtgcgtcaactgtgactgactctgaggtcctcatgtataatcaagttgaatattgagacaaccatgagtgcgtcaactgtcactgactctgaggtcctcatgtataatcaagttgaatattgagacagatgatacttttcaagtttgcaacggatctttggttggtacggtttgcttgttggcttaactttgcgtcttcacctatacatgatgaactgttgtctcagccccctcatctactgctcaaatataaatttccttttagctggtggtggtgaatcttccacggtgccaccaatcctctacattacattttctaaaaactagcccctacagtttttagcattacggattatagtccatttatatactgatttggcctccttaaattcaaatttagcagtcatttttcatcctttccactcttgcagatgcaccctaattcaaacagtggaacaacttctatttgcatcatcgacgactgcagaaccaatattgacaccttgggtacattctttcatccttaaaattatcccatttcttatatctcccgtgttattttcagcactccttccttttccttttgaaagttatgaattgtttttacctgtgcttgtgaactaaatctatgcttggcacagcctctgatgcgagcactcgatgatatggaaaatgccaacgcacaagttgaagtttctgtggaagaagtaacgaaggctcgcacccaaaagataaaggtattatcatgtgcttcttttccctagtccctaccaaataacatggcaaagcttgtgcgttacatattcatcgataagcatcatggtctcaattgcacattagatctttgagaatcgcgctcatgaagttgggagggagaggcaagtgttcgtcgatttcttcagcaaccccgagcgactcaagaatcaagtcagagagcttacctcccgtgtgaaagctctccaggaataaatagatagatagatatccctcgtctagtttggtaagcacatgagattcaatctctacccctgttgctcatatacaagccataaaatctcaccctctgtttctagcatttgtgtgccaggtcgtcccgcgaaatgggaagcaacagccaagctcgcaatgatgctgttgcttgcaaagtttcccttcctccaatgcgaagtttgggggaaccatcggttagtttgttggatgttgaggtgcacagctgctgttgttatattttggggatgcagtcgtgattgttgtaaagtaaccacgagcccgtttcgtcgtctgattgatattcaggctagatggtggttgtacatttgtgtactggtgttgggagactcgaaaactagcattgcttagtgtgtatattagattgatcttcaattatttgaacactgctaatgagccctatattagattgatcttcaattaaacactaacatttgatgccaatgtgcgctgtgagggttccttcatatttagactgaaaaataataaataattgggacttgttcttgctcgccggtggcgctggaagtttcatgctccgggattagagatcaggtgaccaaatcaaagtcaatatacctcagcattgaagaaagttgtaaacaatttgacttgaattctaattttgcacaagggcaagcccgagttaaaaagaaccaatgaacactttatccacgacccatagcaatcctgaaagataccgacacgatccgaagcaacctaatcgattacacatttacagggtggatactgaagactaagaacagctctctcatctcatccacagaagacaagagagggggggtcgggctggcttattgctcaggtacaaatctctttttacagaagcttccctcatttagggaatgaggaattgaggatcgaagtcctgggatatccagactcaattctcagaatcctcgggtatcttgaaaaggaactggggcaacgaggcgatgcggggaagattcatcagcagatctccgaaggagtccttccttgacatggctggtggctgagcgggacctgtagttttcactgtggatgcagccgagctaaattcttcatcggaaccttcggtgccatcgcctccaatgctatcactgtcgtttggttcaggctttggctgggccaccggtggcgtatctttctgaatcaaacagcagagggagtccaccctcgccatcagcgatctctcgtcggatgtcgatgccggtgggccctgtgcatctccgagaaggtactgagcgatctcctccagtgtttcttttgttggcacctcgttgctgggcaatgtaggattgactgatgtgatctgctccgagatgcagtttcccaagtggtttaccaaatcatccactgacatagacggtctaagcccaggcactttcagttgactccaccagctggggatatttaactctggagcaccatttacgtttctgctgactccctgaacgttcactgcactaggtcctggtaaataactatagaattagaaaattcaatcttgaacacaagagaattttgtgtagaaggcattgtaacttataatcatattataactagaagtactaggtcagcacatcagtctaactacatgtgtaatttaattgaacagatatgacgcatctcagatgaccaaaaaaattgtggtggagaatctattgaagtaactaaatgtagtaattctgagaaaaattgcgatgcatctaccagcaatatatctagtcaaagacaggaagtgcaagaagagggacagtggaaatggcatcatgggcaatttacctgggtttcctggctgagcaagaaatcctgcttgcgttgcaatggaatcattgacttcaatcttagcagacatggatgaaccagcacagggtgacaaagaacctgaaaacccagataattcatgttcgtccttcaaattagtaaaaccttggcacttcgattcaactgggtcctcaaatatagagcatctgggttcaaaaacgggagagtccaatatgatgtctggttgctgactcaattggtttagccgctgatcacactggagaagcttttcaaagtttttg

SEQ ID NO: 12102 - DNA, 3347 bp, Oryza sativa
cttcctttttatgaagaaaagtatccaagttcatcctgacaactagtagtagggtgtatcaaaatgataaaaataagagaagacgataccatataaaggatttaagttagtaaaggcaattttgcttctgttgaatattaccttggttccacgaatagggattcagatgtacaccctgtccatctgcattaacatgaaaaggtcccacttcttccgcaacgccatatgcaattgatgagcaacctggccctggaagattaaatgcagtaaaatcagtagtgtgctctcagaactcaaggatcgtagcactgcaaccaaatgaatttcatggagaaactaatgcataatatttcagttaaggttcttaattatcatttatcaataccacaagaaaaaaaaatcagattcaccgacaacatcttgcctcatgtaagaatagaaaagttgtcctggtcatcttgaaatatttaagagagaaaccattttatgccactgagtttactctagttcaacgatttgccatcgactccatctacaatatgccactgactttttcaattttttatacaatacaccattggagtgtatatttttcaaaaactgcctaaaatgcctttcaagacttacaagaggttacaattgattgacctacaaaattttaaaaaaatttgcgtaaactccttgcataatataaaactgtgtgtatatatcaaaattttcattttgcatgtattatctttaaaaatatataatttatgttttatatgctaatagaatactttgtgttaatgttctttttgtacatcatcattcacatgttatataattttttttatgcaactatctttcgtgtatgtgattcctctttcatatgctatataaaatagttttttagaaaaaaaacatgaaagaaaatcttaaaatatacacacaaactttaatattttgtaagaaggctaagtacacaaaaactttcatgtttttagaacttctagtgggtcaaataattgtcttctcttgtatgacctgaagggtattttaggcatttattgaaaagtatccaccccaatggcatgttgtaggaaaaaaatgataaagtcagtggcatattatagagggagacaaagtcaatggcaaatcgttgaaattaaggtaaactcagtggcatagaataaattctctcatattttaactataaaaaattataataagctggctttagaggatgtatatgaatgctgtgtagtggaaaattttgataggtattgctggaagcttggaggttagttcagtaaagcctagtacatgtgaaaacaaaagggaaaaatcacaaaattaaactataagagttctagataagtgctaattgtggtgcccaaatgtgaaatatgatatgaatcaataataagaaaaactataccaattttaagaacccgagtaccatacaaaaaatatttgccctttcgtatctccaaaataaaaataagtttttttagtaagaaatgaaaatgagtttgatccggaaattgtgtagagacaacagcccctcctcatcggaagaagatccactgacgttactgttcaccgtgactgacatgtggacccatcactctcgggcccacatgtcagccactatgtctgaggatctcaatcctcctccgtctgcggatacttcccccctcgaacgaattacagttacttgtgcatttctaccacatcagtaataactaaaaccctcgagatatcaaatcgactaatctccatgtactagtcttagcataatccccaccccccaaaaccccaaattgtgcatccgaatcctgcagaagaaagctgctcatcagataaggaatcaacggaaggtagcgactttcccccaaccacgaacgcaacagctattcgtcgtgcgtctcggactcggatgagaaaacagcagcagcagcagcagcagtacaagtcaacaagagaccaaatcggaaaggcggggcggtggcggcggcgggcgctcacctccgttgagccagagcacgaggggcttggacgccgggtcgtcggcggcctcgaagaaccagtagaagagcgaggcgccgcgctcctcgctgacggcgacgtacccggcgtactgcgcgaacccgacgtcgaagtcctgcccgggcacccgcgccacccggtcccgctcctgctccgcccgccacgccttcccctccgccgcagccgccgcccacggaggcggagcacaccctcccaccaccaccacaagcaggagcacgaggagggagccgatggcgctcgtcgtcgtcgtcgtcgtcatcgcggcgatctcggagaaagtggcttgcgtgctaccaatgggggtaccagtagtagtagtagtagcttgttataatgagctactattcccctcgaaattttatttgattactacttacaccgtttcaggttataagacttttatcaatgtctatattcatatagatgtcaataaatctatatatatatatatatatatatatatataaaagaatgtgggcaatgctagaaagttttataatataaaacggatatagtatttttttaattttaaattttaaaaataaatatttttaaactactcgctccatcccatgataagctcatttttagttcgtcccaaaataagtttgcttttaaagttatatcatatcaaagtctgtgaaagttggaaataattgtatcggaatttgatcaagtatggatgagtaggatgagtgaaaaataaacttattttatgacggagacaatataatagagtttggttttatgagatatattctaatactagatcaaagaaagtgtccctttcattctataaaaaatacaatcctaactacgaatctagattttaaaaataaaattttaagtagcatatttttaaaaattaatacagtacttaataggcaaaattgctacaggacacccgaaaatcgtgtaattggctgtgagacactgcaaaatattggctttgcccacggacattatgaatgttgtgaaattggctgtgagacaccggaggcaatattttataatttccgagataaaagaggtcagataattttctaaaagaccaatccacccctgcgcaactggtatgccacggcatgccggcatggcgtgtgcgcgccgcgtcgcgccgcgcacagacgcgaataggcccgttcctggcgcgttcctgacatcaagctagcaggagattccgcatacaaagaaaatctctcgctcgtcttttccggctgcgccattactgtttttggctgcttcttccacctcaatcctgcacggcgatgatgcaactccttttataatccact

SEQ ID NO: 12103 - DNA, 3089 bp, Oryza sativa
aagatagagccgtgcctgtgcatttgctgcttgtttgtgacaacacgtactagtgataaaccagcttagtgtaaaatatcataattttatggcctattccctctgtccaaaaatataacaacgtttagttatgaatctgaccgaaatatttatactttgggacagatgtactccctccgtcccaaaaaaaaaaagacaaaccctgggtttccgtgtccaacgtttgaccgcccgtcttatttaaaaaaattatgaaaaaaattaaaaagacaagtcacgtataaagtattaatcatgtttattatctaacaacaataaaaatactaattataaaaaaaattcggacagtcaaacgttggacattagtagtattcgcctagttgatttcttttttgtgagaactgcctagttgatactcctacttgatactgagtggctctgttgcaagtagaaaccaaaacatgccgtgaacattaggcaaacaaaaagccatggacacatctggtttggatgagaccaggacaatcgacgaaagaagagatggaatggaatttaagggaggattgtactgagaagttaggaatatgacaggtgaaaattgtaccttagctctcttctttaccactgaaatgagacagagcttcttcagcctttgtttcaggaaaacaaaaaaagattgtgcctagcatccaaagcggaaagaaggagaggagagctccgtttttgtatttaggtgtgtcaccgtttggaaatttgaagtttgatgctggcagtggcagctacgggtcgtcgtgatctcgatctcacatcttgtcctgtggatgtgaatctgcttaactatgacgtataacctccgtcctaaaatgaaaaatattacggagtaccatctaaaattggatatgatatatgatactaccacctagagtagaactagatatgatattacctaaatctagatatgagcatattcagattcgtagttataggtaatatcacatctaattacaggtagtaataccaattataggtagtactccattcgtcccagaatataagagattttaatattttgcttgcaatgtttgaccactcgtcttattcaatttttttaaaaattattatttattttatttgtgacttactttattatctacagtactttactttaagcacaacttttcgggttttatatttgaaaaaaaatttgaataagacgagtgatcaaacgttgcaaacaaaaactcaagatctcttatattgtgggacagagggagtaatattttacgatggtgccatatgtcatccaacatctgctggaaacaccatggcacgcttgtttgaggccctgtttagatgggactaaaacttttaagtccctatcacatcggatgtttgaaaattaattataaatattaaatgtagactattaataaaacccatccataattttggactaatttgcgagacgaatctaatgagcctaattaatccatgattagcctatgtgatgctacagtaaacattctctaattatagattaattaggcttaaaaaatttatctcgtgaattagcttttatttatgtaattagttttgtaagtagtctatatttaatactctaaattagtgtctaaagacagggacttaagttaagtccctagatgtaaacaccacctgattcacggattgaatttgaattgcacggtgaatccaacgagacggcgacgagcacagaattctcactgctggtatcgcgtcaggtcctggcccgcacgttgcctgatcgcgaccagggggaggaagaggaccggagtgcagcagcgccgcggcggcgtggcgttcgtcagtctgtggctctgtgcgtgattcccttgccgtcgcgcaacctacgataacgccgggcccaaagcccatgagcgcacagcgtagagctgggccgaaagcctgcgatgtttcagcgacgagttgggccgaaactgggtacccgccgtggtttatgggcccatgcacttatgggatgctgactttgtgcaaatgtgtaattgtgccgctaatacgtgagccatagcaaagtgagactcgtatgtcagtgactcaacttcaaactgcacattcacttctccgctcatgcagacctagatttggatcaactgcagtcagattcgaatctattgccggctgttagatttgaatctaatggtcaaaatacgtttagggtactgtacctaagaacctaactgtagcaaaaattggtgagtagtcttacattcacactgaagctaactatacagtgttcaatatcaaaatggatggttgcagttgcgtacagtagcgtagcttgcaatctctattgaaactttaggggatcccaatcttacacaaccacagcgtggtgcaccacacttatgggattaagataagccgggtgatgattgcttttgtgagcttaagattctgtgaagattttttttttagaatatgaaaaaaccacccccttcgtattttaatgtatgacgccgttgactttttaacaaacgtttaacctttcgtcttattcaaaaaatttatgtaactataatttattttaggaaaaagtacgaattaccacccccgaaccatcgcggttgtctaaattacccccctgaaccacaaaaccagacattcttcaccctgaactttcaataccggacgaaataccccccctcgacccaatccacggtggttttgatctatgtggcatacgcatggcagctgagtcaacattctatttattaaaaaaaatatgggacctacatgtcatactcttcctctttcttctctctctcacgggcgggaggcggggcacacggagctgcggccggcggtgggggatgagggtgacgcggaggcagcggcggtagtgcggcctcgccggagtcggacgtcattgcggcggaagcggagaggtcacgcaatgtggaggcgaggtgggtcgcgtcacggcggtggagcgcggcgtgggcctcggcgaggagctgcttgagcgacggccggggtagcggagggggaccgaggacggcaacggccgggggcggaccagttgggggcga

SEQ ID NO: 12104 - DNA, 9739 bp, Oryza sativa
caatatctagctgggaaaagaaagacagaaaggctactgaatgtttgtgtttgttgagctcagaatgtaatgaattgtggtgatatatttacatagtaagctttaagacataacaattgctaatcaatgatataatgtttatatgagctttaagatataatattgataatgtactgtgatgtgatatgtttgtacgttgagttttaggatgtagagggtcaatcttgtatataagatatatgttgtaaatataagatattataggtgccgacacccatataacacaagccgagccagcgggccccaccacgacgaggtgacgcgagaggagataaggtttccttctctcgctcccttctctctctcgctctctctctctccctcccttctctcgctctcttctctctcttcctcccttctctgctcgccggcggaggcggcagcggcgaccacgccctccactccgccagatccggtaggaggggaggcggcagcgacaggaggggaggcgtcaacggcgggcagggtggttggtttcggcgtcagcggcgggcgaggtggttgtttccggcgtcgacggcaggcggagtggccggatctggcccagaggggagtcggcgatagcgggaggggcggcaacagatccggcggtggcgtggctcacgggcggcagcggcgacctcccctccgccagatccggcgggaggggagacagcggcggcggcggagccctcccctccgccagatccggcggggggtaggcagcggcaatgacggcggcgggctccccacgggcgacggtaagcacccccaaccatctccttcgcttgcgatgatgtttgatgtgagatgaatgatgattcaatgatgtttgatgtgagatgaatgctgattcaatgatgtttgatgtgagatcgatgaatgtttgaaatgtgagaatgaatgttgccaatttttttttgtgagatgaatgttgcctgattcaaatgtttgattcagtgatttattttgtgagatgaatgttgccaaactttttttcttgcggatgtgggaggagggactgctcggctcgatcgagccgacgcattgagccggctttttttttattcgtcgaacctaaaaggtgccggttttaaggaaccgacacctttttgctacctcccttgtgccggttgagaaaaccggcagggaagggggtttgctaaccggtacataatatcttttctgtagtagtgacaccaagcatatctatcatgaaccttttgctataccaacattagggtactctacataaaaaaatcacaaagatattaatttatattatatgataggatttagaaatagttaatccctccatctaaaaaggttctttttttcctactatataagttgcccacattaaccataagttgggtttacttggacagagggagtttttgttggaagtgacaatgagtgagagacattgagtaaagccccgttttaatctacttaaagggagagcgacttcttcgttaatcatgagtcgctttctaaactattaaatgatgtgtttttagaaaactttatatattaaaagtttctttataaaaaaataaatcaattttgctacttcatatataagaattaatacccaattgatcataaactaatgggccagctcatttcacgtgtagtcagccaaatagctgaaaataactcggcctaaggcatgttgaatatataggttggtttagcataggtacacataggatgcccatgcatcaaccattccatgtgagaagaatgttggtctagatttattatgtgaatccgatcctttttcccttaaaaaaatgtttcgaaagctaagttcctaaacatatcatagcatccttaaattgaataaatttattaattaagtttgaagttgaacctattacagtattacacaatattaaatttagtcgcacaaatacaatattaaatttagtcgcacaaatactcagaccactgtataccagtatagtaaaattattagtacaagatatattttttaattacaaggtaattaagcaagacagcacaacatatattgctgctaatcactcttctcagatcctctcctcctccagcgtgaaatcgttctcgatcttgaacgtcttccagctggtctgctccagcgacggtcaggttgagcaggggccctgatccactgcacacacccatggagttggctgccatgagcaggaggtagtacaccgtgtaaatttcagaacatgcaaaagtgaaaatgaatgtaaatcactcagaaatgtaaaaaaataaatgtccaacgccgtccgtgggattcgaacccacgaccacacggttaaaagccgtgcgctctaccgactgagctaggacggctattatgacgaattgtataattacattttataaaatgttatgaggccattcgcaacaggggacgatcatccatcacttccagaaaacagaagtattagttgaaacaaaatctctactagcatcctcctcctctccaattaatgtagttcacacttagaaacccaccccacctaaaattcaatctttgaagatcaaactaaaatcaacctaaagaaaaatcgaatagaaaaaattgaaccataaaaccattattcacaatcttattacaggcttacagcttacaaacatgagatgtcgctagtcaaaacaaaggcaaaattccgcgcgtcgttttgatcgatcgatttggtgaaatcacggcgagcatatatctatccagcgtcccagcagggcagtgacttggcaaactatgcgcagtaatatcagcactgcaatgttcggacttcaggaaagatcaaattttagcagtttccaaaacacatttttgtgaattctacatgttacttttacagattagtgaaaaatatttcatgattgtagaaataaattaaacattttaaaaataaaattaataaatatatgagtaaatttaagaaaacctcatttttatgattaaagttgtaaaagatcacacgtatcatgatatgtggcacctaacttaagtattattacttaatggttttaaagttttacagaacttcacacttatgcattttgagcgtgaatttacttataatttaaaaacatagtgtatataaaatttttaatttttttagtaattgactaagattgataggttaattctttactactttcaaaaatttatttaagatatgctaaactttatcaaggttttaattttgataaagatggagttttgtgaaacattaagaccatgaaaagtatgattatataccacacgttataatacatgtggttttccacaactttaacataaaacatggtttttttatgaaatttactctaaataaatataccacacttgttaaaatctcttatattttgatggagccttcatttcatatcataaatcactttaacccttttctacctcaaacttctataaccttaataaatttttttaaaaaatattaatattttcaactaaaaaaacataaaaactactctaagactaaaaacagatactcccttaattttcgttagatttaggttacatccaaccaaaattatattcgggaacggaaggattaaatgccagaatcaaattctgagtcctttcctttcgtcgtgagaaaaccgaaaagtcgctccactttgcttttgcacccaccggtttcaaaaactcgccccccaaaattcctcctccttcctctcgaaggcggcgaaccccatcgattcctcttcctcctccgccgcacgcgccccaatccgattcaaccgccggcggcggcggcggcggcggcggtggcggcgatggaggtcggggacctgcacaaggtgtgggagatccgcgcgctcaagagaaagcccgacgagcccgccgcccgcgcgctcctcgaccgcgtcgccaagcaggtccagcccatcatgcgccgccgcaagtggcgcgtcaaggtcctctccgagttctcgtaagcgcgaaccctagccgtagcctcctcctcgtcaatctctgtctcgttcccgatcgattgatcggttttttttgtttgtttttttttttgcggggagattgatcggttttgttgcggatgtctgatttggttgttgggggatcaggccgaagaacccgaggctgctggggctcaacgtcggcgggggagtcgaggtgaagctgcggctgcggcacgcgggacgggactacgacttcatcccctacgaggaggtgctcgacaccatgctccacgagctctgccacatcgcgcggggcccccacgacgcgcagttctacaagctctgggatgagctccgcaaggtacatagattttttattttgtatgattgtgtggtgattgaaactaatttttatgattccatctctagatgtcgtgaacaatcgaacatacgagtagtagatgtattgctcaatgtggtgctcttgtataaaactgggaattcagagttgtgtcgatgctgcatttagggtctatctggcatagaaagtgggaagtatccatagtccctcgcaagttggagaatatcccacagagtggtaattcaggttattttatagaatcaaacatcatccagcttgattgttaatgttttaatcaaaatcatgctaaatcagccataaaatagatggaatcggtctcttcagcacatgtgtagagtgcatacatatactttatatagattgtagaggtaggaaccagctatattgcgttgtactattagtttctgatggagctgggattggagtgggcaatagagcaagtatgcacttagtcgtggtttgcatagaagcacaaaaaagatttacctgtgctacgacagtaattcctgcaaggaaaagttgtagcttaagaactggtgtgttcattgcatcgaatttaactgaaagctcaatagcccatccttattcagcctactgtcttaagcttatgctatttatggaaaaaccattcaggaatgtgaagaacttgtttccaagggtatcactggatcaggccaaggatttgatggtacaggtcggcggttaggtgggtttacagtacacccaccgccaccatctttaaggcaagcaacattagctgcagcacagaaacgggcaaggaatggagctcttttgccatccggtcctagaaaggccctttttttgggggttggggaaaaaattaaatggatattatgagtgctcttagtccaatacaagccgctgcaatggctgctgaaaggagaatgtatgacgatttgtggtgtggatcgcacgatcaatctggcattgatgattcagaagacgttgttattcttgaggatacacctaacttgccaacgcagcttgggaaaagcacaaaggatggcttttctagcagttctgagaatcccagcacatcttcgggatttcccacagcagcacagaatggatcctcttcttgtaggataacaaccgatgcaggagatagttctctatgggagtgtgttgcttgcacacttctaaatcaggtatgttttcttttgtaagcaaggagtttctataacagataaacctttttaaatggggttatttttcactggatagatttcatactgaccttccagcatattttttgaagtccactcattatggtggacttgtaaattacaaatattcgaacggtatccaattatccacatacttaagtgctttgtatgcctgaaagtattacattactgcatagatgtaattcaaacatatgaaaaaccaaattccatttggacagcttctgataaatggcacagaaatgccatatattaatgtatcatacaagagaagggctttgacgttgtttctttgcctgaatgttgagccttttctattgcttttctttattttcgtgtgcaaacttaaccttatttcgtagccccttttatattttgtgcatactgaatacacttttcctggtgtgttgtttctttaccagaggcatttttctcgctttgctaaaatttattgtctgagaaaggttatttgaacattataattattaattctcttcatttctaatacttttgtagcctctggcaccaatctgtgaagtttgtagcgcagctaaacctaaaaccacgaaggccaaatatgcaacctggtcctgtaaattctgtactctagaaaacagtactaagattgacaaatgttcagcatgcgatcaatggagatattcacatggaccacctgcagccacatattgtccaagctatgattgatctacattgaagcttgcattaatatggtaagtaccactacattgtaggcacattaaatttaattttcttttggaggcaattttttgctttcatgttggtggattaaacatatccactaatggtatagaagtacagttaagtgaccttctttctgcactcacctactaacaaatttatcttggcctatcaagctgactttctttctgtattcaattcgtaatatacagtttggtggtgttgcaccatagctatctttttgacccagatttgcttatgtagttacattcattcgctccataaatctctatccacttaactgaattgtattattgtaacaacaatttcatgtggttattgcaggactacagaattttggacagccatctgctgaattgtggatacacaaattcgttcccatcagcagttctatctgttaccccattgcacttctgcataacgaatcagatgtgtaatttactatctaaagcattccctctttcgtggatcacatcatgtgtatagagagaaccacctattggaaacatctgacatatcccaagctccctctgggagcagctaacgcttgaaccattttcaatccttcctgctcctgaagtcctgaagcatgaccgagcacgctggtatgttttggctctgaacttgtgatggcaacacaattgtccttactgcattatctattgcaatggtgttttcacatgcttagataatgcaaccgtgcatgtttaaccaggtactatcatgagtcgctgttgctgcagttgagcgatataagctgtcacttcattctaatcaactaaggtcgttgactttttattcgtcctcgtctaatttctccatttggcagctttgggtttgctcttggttgggtgccaactgccaatgacttgacaagttgacattgtatggtcaaagcccaatgggggagtgagctttatcacttgtgtaacgattaacaaatttcttaaaatcattcccgtggtagaatctcgagagaaaccaacactggctccttttgaaacaaaggaattttacatgttcataggaatttgattcgattcacacaaatcctactcaagattcctttgtttcaaaaggaattcacttcatcacctcgcaggtgcaaaagagtacccctccaatgatctcaagcaacacgatgtgcaaaatctagaccgttccacttgattatccatatagcaacctttttgcaaatgcatcattaacaaaagctaatcaacggagctacgaaacggctaataaaaacatatgcaaggacaatcatattactcctaatcaagaggatatttatagtaaactaaattacaccttgtatacatactactatacggtacagtacgtcgctgtagcttctctccatccatccatcgaaatctccactccatccatccatcgaaatctccagtaatccgaaacccatcaacctcaccaccaagagttgataacccgataatcatcgcggcgccagtattcgtcacgcatctcgttttctctttatttgtttcttctttcgcttttttttttagcatttaactattcgccatttttaagatgtgacaattaaaaatttagttatcatgtttctatgacataaagatctaatgataaatcatttatcactaattgtaagagtggtaaatagttaattatttctttttcttcccctctcaaatctcgttttcttctctttccttttcttttttcccttctttttttcttttcatctcaaagcagagagcatctcatctcatcgatcgatctcgatccatttccgtttgcttcttctcctctcctctccaagaagaggcgagctcgcctcctcctcctctcgacgcgagcggcgatgcgtgcgggcgacatgccggggcggggggctcgccgtcgcccggatctcaccctcccgatgccgcagcgcgacgcgccgacgtcgctcgccgtgccgctcccgctcccgccggcggcgacgacgacgacgtccgcgcctcccgcgggaggggcgatgcacccactggcgtcggcgggggccgcgccgccgccgccgctggaggagctggaacgggtgaggcgggtggggagcggggcaggggggacggtgtggatggtgcgccaccgcggcacgggcaaggagtacgcgctcaaggtgctctacggcaaccacgacgacgcggtgcggcgccagatcgcgcgcgagatcgccatcctccgcaccgccgagcacccggcggtggtgcggtgccacgacatgtacgagcgcggcggcgagctgcagatcctgctcgagtacatggacggcgggtccctcgacggccgccgcatcgccgacgagcggttcctcgccgacgtcgcgcgccaggtgctctccgggatcgcctacctccaccgccgccacattgtccaccgggacatcaagccggtcaacctcctttatgacttcggggcccgcgtcaagattgccgacttgggggtcggccgcatcctcaaccagaccatggatccctgcaattcctcggtgggcaccatcgcctacatgagccccgagcgcatcaacaccgacctcaacgacggcgcctacgatggctacgccggcgacatctggagcttcggcctcagcatcctagagttttacatgggaaaattccccttcggttagaatcttggcaagcagggtgactgggccgcgctcatgtgcgccatctgctattccgaccctcccgagccgcccgccgccgtctcgccggagttcagaagcttcgtcggctactgccttcagaagaatccggcgaagcggccgtccgccgcgcagctgatgcagcacccgttcgtcgccggaccgcagccacagccactcgccgccccgccgccatcgtcgtgactgccaattccatccggtcatcgtgtcaaactccatttccatctcatcaagttcttcatagccaatccattttcgagtgttcttcaaacaccatgatcgttttcatccattgctgctgccccaactcaaggttcttcctctctactgttctttgatgttgttttattcacaatgatgatcaaatattgagtaaatctggtttgtacaaaggatttttttttctacgagatcaagtacagacataatcccacttgttagccaatttgccataaaattcccttagaaacgaaaatttccactgtacaagtagcagattttttttactccatttccacgatattttgcttgttagtggtaagctgcttaatgatgatagtgtgcaagttgccactcttcaaagtggttctttggattctactatgtgttctcttgcctaattgggttctatattgagattactttctctatgttttttttggaggaaaaaaaagaatacactctctttattcattctgtgtaaggataatattatgtgtgcatggttgcttttga

SEQ ID NO: 12105 - DNA, 4795 bp, Oryza sativa
  unsure (1)..(4795): unsure at all n locations
agagattggggatgagggaaggtagctggcgggagagccggacagaacgtgcaagatgatagagaggagaggagtatgcgagagagatcacgggtaaggtgataggacatggagagcagagacgggggtgagggtggaatgaaaacgatgacgcatgacgttgtgtagacataagggatggtacgactttcacggattgacgcataagcagtaagagatgatagtgtgaagaaatgaggggtaggagagagagacagtgacgaatgtaaggactaggacattaaggggataggaagtagaagcgtttaccgttaaaggtctgagggtgaaaaataggtcgaactggacgagatacgcgtataaatgaaatgcgtatgcccaccttaacccacacacgtggcgccaaaaccacagggggtcggggcgccctagccctcggggccgaaacgggagcggcccgacccctcggggagacagagggaggggtggccacgtcaccctcgggcccgaccccccaagggggtcaggccacgtgggtgaccgcggctacccaagcctctagtcacgatacccccggccccatgtcaccgacaacaatagtaggctataagtcaactataagcacatgtgaaggagataagagaggagaaaaaatagaagttaattatagatttgtagtcagatgtaacatggaatcaaagacactttgtgtgtatgagatgtgagatcagatattaccgatgtggtatatatttataagtaactactgtataaataagttattaaattggttatatatatgatttggagctagtaatttggttatattgctctaagtacgagtgtgaggaaactcctttgcaattgttccacagcaatttttgtcccgttgtgttcaaatatgagactgaacagtaaatactcgtttgcgtgtccatcgcagaacctagcaaatccgtaaagacgatttgcaaatctccagtatcttcaaattttgggagactttcgtccattttgttcttcccgagtgttgtcacgatccatttctgccgccttcgcttcttcctctgcctcggccttcgccttcgcctctgcctcagccttcgccttcgcattcgcctctgccgtctgcttcagctcgtcgatcacgatctcgaggcgggaggactcgtcatcggagccggcgcgcttggccgtcatgaggcactcggcgacgtcggccggcgtgatgctctccctgccgaggatctcgccgacggggccgaacagccggtggtcgtcgacgtccaggtagttcttggcgagggtcttgaacgcctcgattccgcagtacgacatctcgatgcgcatgtccatcctgccccgccggatcagcgccgcgtcgagcttgtcgacgtggttcgtcgtgaacacgacgatccgctcgccgccgcacgccgaccagagcccgtcgatgaagttgagcaggccggacagggtcaccatgctgccgtcacggtcatggcgcctgctgccgtcgtccctgtcgttctggcgcccccgccgctgcgtggcggcgcggtcgccggtgaggtcgagggagcagtcgatgtcctcgatgacgatgatggacttgctggtcgtctcgatcagcagcctgcggaggtcgttgttgtccttcaccacggtgagctcgacgtcgtagatgtcgtagtcgaggtagttggccatggcggcgatcatggtggacttgccggtgcccggcgggccgtgcagcaggtagccccgcttccacggcttgccggcgcgccggtagaagtccctgtcgctccggaacgcgtcgaggtcgtcgatgatctccctcttcctggccgtgtccatggccaacgtgtcgaacgtcgtcgggtggtcgaagtcgatgtagctccatgctttgtaatcgtaccggctgcacagtcacatcaacgcaatgatcagcaagatcgaaatgaaaaaaaaaaagaagaaaatgtgaaaatgtacaaggagtcgccggatttgttgttggtgtagaggcgtcggcggcggttgctgaagaggatctcgcggcccttccggcggacgtgcggcaggtactcgtcgacgacgagccgccggtcacggtggtgtaacgtaaggcgctggcaccgccgggtgtgcgccctctgctgcccctgcgaggtcctcccgcaccactgacgtccaccacagcgcggcgccccggaactcgtcggcgacgtcctgcccgtcgcgcatgctgatcacgacgccgtcgccctcggacgcgccctcggcgcggagctcgcgcgcctcccccgcgcacccgtcgctcaggtacgccttcacctcctcgtaggtgctgtcgccgctgtcggtgacgcggccgtaccgggagtagtgcgcgctggcgccgcccggctcggagacgtcgacggtgacgtaggggtcgacgacggcgaggaggcgccgggcgtgccggcggaggaagaggttgaagtaggtcttgaacagccgccgcggcgcgtaggcggcgagcagcggcgccaggaggagccacagcgagccgaagttggacagcaccgagcccaggttggcgaacgcccagcgccgccactggacaactttgcccgtctcggccgagagagccatggacggcggcgacgacgtacggcaccaagcggtgagttcgcagcacacgggtctctggctctctgtccgcgcgtgcagagatttatgtagcgcgcttctgccacatttatatctttttaaagaaaaaaaaatcccacgatctcatttgaccatttattacctgctagttaagcttaaaagtaaccactcgatgccttctctccgtgataaaatatagcaactactccctccgtattttattttaatgtatgacgccgttgattttttgataaacgtttgaccactcgtcttattcaaaatttttatgtaaatataaaaataattatattttcattaaaattttgaataagatgagtggtgggacgttgattaaaaaatcaacggcgtcatacattaaaatacggaggaagtggtatttaattaaatgccatctaatactacgaatttaaaaaatatatatatctaccactattaatttttataattcgtgtagttaaatatgctaattatatattatataattattttctatggtgaatttaaaacaaatataaatatgatgatgttaaactatataattaagtttgtaaaaattaatgagcaaagattaaaatgtttgatttaaaataaaattaaacggcaaataattcaaaatgaagaggatagctcattgagttactccatctgtctcaaaataaattaaccttgtacgtgatatgacacatcggttggtttattttattaagggagtacgatttatgacaatgaatacctacccacaaataattgggagagactacagaatgggatcctgttagaacgtgatattttaagtgactcctccccacttccacgtgtgctctctcctgatacgtgatacctggtaccttaggtactagttgatacctggtacctttggtatcggctgggtaccggctgatacctagtatctagatactttagtatcggctgggtaccagctgatacctgatacctagatctttaagtagtgactccttcatggtacttggtaccacctggtacccggtacttgcgtactgaatggtacttggtacctggtaccctggtatcgagctggtaccaaggtctgatacctaggtactaggcgtgatacccaaagagatagtgaacgaagccatcccagcttcgcttgaggcggagagacgctgcgcgtcgccggccaccgcggctgctactcgcacggggcaagaccacggcgacgcaacacgtggcggcgcggcacctggaccacaccttcgagaagctcgcgtcggcgcacctccagcttgtgatggcggtgccgttggtggacgcgttgcgcggttcgccctccgagctgctcgcgctccccgaccacgcccaccacttcccgctccagctccaccggcgaggcgcgctccctctctccctctcactcaccgcgcccgctgccgagctcctcgctgtcactacctcccccgcagcggcggccgccggctccggcaacggtggggtgacggtgacagggagagctacacctcgagtgccatctgatttggaggaggggagtgaggtaggaggaggggatccgaataatttgagagaggagggtgaggtaggaggaggggatcgatcgatttgggggaggggagtgaggtaggaggagaggatccggatgatttggggaagaagggtgaggtaggagcaatttggattagtattccgtcttcactaaataccggtgcgtagattttctctaaacaattgtaacatgtttgtagaaaaaccggtctttaccgtctaacccacgcggacaagtcttctcttcattgagcgtcaccactcacctcgaaggtaccaaacaaatacctaaccacaatttgttttttacaccttgtcttcactcatgacaatgacgtaaagttgtagtacaacaatttccccggttgctagagttgacttgggtgctcatagttaatcaagaaaattggagattcatatggcgtgttctctcatgattttgtatcgactatttcaaactactccctctttaaaaaaatcaatctaagaagatgtgatctctcctgaaataatgtatctgaacatattagtgatgngttccagtcgatctgcaaatcaatggcgcgcg

SEQ ID NO: 12106 - DNA, 7021 bp, Oryza sativa
  unsure (1)..(7021): unsure at all n locations
agagtttgatgactggctgtaggaacgnacaagcatttagttaccaaatggcacgagacctagtcaacgtgtcacgtggatgtcacgtaggacaaaaccaccggtcaaaccgctgagggactcaatttgcaccggtttttgaagatgggggaagtgttatacccggtattgcagttgagggagacgattcaatcaagagcaagaatagagggatgtaaaatagacttattccacgtcaaaaggatcacacgggcctaaatggaagcccacaatcttaaaatattatgggcctaaactttagactaaaatccaggtccttccatatatgggccaaaaccatccggcccatcaagcgacagtagcaagcagctcgctcaatcgcttcttgcaagacaagctacctcttctgcccccggatctccgcggcttccagaagcaaatcgaatcaaaccaactttgtttcccagcatttaaagcatcgtcttcctcgtcgagtcgtcgtctccccgccgtctcgtgcccccattcgccgcagaaatccctagcctccacgatccgaagaatccctaaccactccacgatcgatcccctcccttctcccatcaatggctgatcagcttcggcggcgatgggcggcggcggacgacggtgtcctgtacgaggtcgcccgccgcatcccgtgcgagatcgatcgccgccacatgggtcgcgtatgcaactcctggcgcgtggcgctcgtgaagctcaaggccccggcgccgccgcctccgctcccgtggctcgcccttcctgagtccgacgatgggctgcccgccaccgtcttctgcgtcctcagcggctgccgcacccacgccttctccgtccttcaaggagcacgcggcgcgcgctacttcggttcgtacgatggcggatggctcttcctcgccgtcggcggccaagctcaatgccaagccctcctcaacctcaagatcaacggctttcagaccctcgacctccccaacctggcgcccgtcaactcagtgaatccgaaccgtgaccgtgagatggccatcgtcgccgccaccctctcgtgccagccaactgaacaaggatgcatcggcgccggcatcatcgaatcattttccaacctcgtcgccgttggccatgtcacccggagcattgcgttctggcggatgggcgatcaggtggtcttacctgttttgtgggcactggaggaggacaacccattgatgcggctggaagaagtggaggaccttctatgccaccatggagccttccatttcctcacccgagcggaagacgtccttgcgtgcgaagaaccaccggtcttctacagagattccgtgagtctggtcccggcaaacatgttcttcctgccgcgcgtccacgacgagaacgagactgttcttgctcgctacctcgtggggtccggcaagaagctgctcatggtggtcaggctagctagtggccggggtcagcgcacgacgtcggcgttccgggtgttccagaagaaaaagttcaacaccggcgaagaagacgagccgtcccagaatcgctctgctcattttgagtactactggagcgagctggacgagctcgatggccggatgctgttcgtcggactaggctgctccagatcctacaaggcgggtgatggcaggtaccccgacatggaggagggcgtctacttcttggatgatccgagcatccaccagatgatcatcggtgatgcacccaaaccgccgtacctctgcagtgacaacggtaaatggtcgagagcaccaactgatccccagggccaggtcgagcgctgcttcccggagcgaggcccatcgatccactcgcctccggtttggattctcccttgagttgagatcgacgacaggtttggttttcgatcggcaaacgttgcgcgatatatcaacaaggtcaagttaattagttccatgccttgatctagctacattgtgtcgtttgcttcttgttgctgatgagttcaatggtgttgtcatgttgaaactgttgctgattagtactagctagcgtttgtttgtggtgtaaccatgtaagcagtaagatgaacaggattcatttagtgcaggaatgctacagatgatacttgctgtttgttcagtaccattcttcattgcgtttcagtgcattcagctacactctgtcctgttcaattcgcaattccgtttcaagattatgtttccgattactccagtagatagactgaatggcctgcatttgtttgtggtgtaagttagtgatgaagcaggaatgctgcaaaatgataccacctgctgttggttcagtgctattatttcttcatgtgatgtgggtgtgactcggtgcattcaactacactttactctcttcaacttgcatttcagttcaagcttctttaaattgtactgaatttttaatctgcatctcaactctgtggaatattatagatgcgacaatctgtgatacctgcagattgtactgcttctttatgataactacttgctggcattatgatcatattacactgctaataatctacactactgaaattagcttgtactatacattatttagtcctgtaacatgtgcccaatgaagcaaagtgtgtgtgaagaggttgaaatctcaagattaatgcagttattataccatgttattgaccttgttccgcttccacggttgctgtatattgtacttcagagactgattaattagtcttcacttcaacggttagatgaaaaaaagactacaggtttccttttccaacaaaaatcactagcaacaaaccatcaataatcatcgatgtgttaaaactgttaatcgattgctgcacacaatttgctaccttagcaagatgttagcatgagagagagaatcgtgtcctctgctccgtttaaattaagtgaacttgcatagttacatgcagtgccgtcctttgacgtcttgcccatccccgtcgccagcgctttctagttagcgtgtttggtcgtcgcacggttatcacgagaataggcttaagtccttgttttcagcgctttctagttagcgtgtttggtcgtcgcacggttatcacgagaataggcttaagtccttgttttcccttttttttctcctcgctccccccattccctccctctcttctttgtttgccgtttgtgtaaattttattcctcttaaggccatgtacaacgcgtgaccctagcctgtcgtctcaaaactccacgtcggagccgagccgagctggcacgcgtttgggtggtttcgcagcctgtcagcgagcttgtagaggaaccagggcaagcgccgcgcctgggctcgggaggcacgaagccacaagccgaagtctcacgttggaggagtcggagctccgcgccgttgcctcgtccggtccccccgtgccgtggtcgtcgtcgcctcgccagatccaccacagccgccgtggtcatcgtcggatccagcgagcccgccgccgccaagctcgccacgccgtcggcgagctcatctgcgccgtcgtggggggaagaagacggcgacgtcgagggacagccaccgcgttgtggccgccaccgcccgatccggcgagcccgccgccgccaagctcgccacggatccggcaagctcgtccgctgccaagctcgccacgccgtcggcgagatcgtccgcgccgtcgtgggggaggaggacggcgacatcgagccatccgccctcaccgctgctccccgccgccgccagatccggcgagtccacgtccggatccggcgagcccgccgctgccaagctcgccacgctgtaggcgagcttgtccgccgccaagctcgccacgccgtcggcgagatcgtccgcgccgttgtaggggaggaggacggcggcgtcgagccatccgccctcaccgctgctccccgccgccgccagatccgccgctgccgccaccgctactccccgccttcgctagatccgccgtcgccagagctcgggcggcaccgatctgccgccggaggcagagagaaaagagagggcgacgaggggaggggagaggagaagagaaccgagcaacgctgtcggtggagaagaaatcgaagagagagagagggagggaataaaaaagagaggggatgggaagaggctgacagtgggtcccaagttgtttaggggtgcacatatacttcttttggttactatagggttcaaaatataaagtttcaataggtttgataatacaagggctgacatataaatagataggggctgacatgcaaaatttgttttggagtggcttccactgtgggtagtgtgacttttgtgtagttctatcctaagtggcgtcttgagaccacagttgcgtgtggctaccattgtacatgtcctaatacaaaagtgcacaattcttttacgtattccaaagaaagttacctgcagtcaaattttgctcattaacatctagcacactactgtccctctgcttgaatgattttatactagtactagagtaatgctgcacatactattctttttttacaaaactcttacaaataaagatcataaccatttgatcgagtcaattggtagttattagaagtcaagatgcaatcagggtttgccatatcagctttttaaagagtttgtaagaatttgtgttgcatgtgaaacattttaatttatgctgcgagcaccttatatgtgctcctaatattgtcatcacactgcaccttaccagcaatcggattatctttaagcaggtcggattagagaccgggacacgctaagcatccaatgggcctgtcaggaagccgacgatcttagcgtatcatgggcccagaatttccactaaaatccaggccattttacataggaattagtccactttgactcccttaaagtggcttgaatctagtccataaccctggaccgcaaaactggatatcttgacctcctaactattgaaaccggtgtaatttgactacctcagcggttttagagggcggttttgtcagtgttgacttggtcttcgttccacatgacgtttatgtggcattagaagttaaaaaaatatgtgggacccatttattattcacagccaaaaacaattgtgggatccgtatgccattctccctttccttcccttgttccccctccctctcttccttatctctcccttaccgttcgtgcgccactggttcgacggccgcttgatggtgcggtctccctgaagatggctctccaccgcacccactgcgcccttcgtagtccacttcatccaataagaatgtcgagcgggatgtcatcctcctagatgccttatgagtgattaagttataggtgggtggcgacggtgagtggcccatggctagcggtgagcacagaggaggccaagcactcagtgtgtctagaagcaatagagaggggtcaatgccatggcgggcgagtggccctggccggtggctagaggcgagcatggagagtgagcactcggtgtggcgtggggaggagagggaactcgatgtggcgagagcgtgaagagacatcgaaaacgtcaacatcacgaagtagagagcactgcgcctgagagtgcgacgagagggaggtttattttgggtgtagcaggaggaaatgttgaggggcccgtggaggggacgacgatgtctacgatagtgaggctgggagcatggggagacatgcacggtgcttaacaccgataatggggaagatgagcggcctgcgagtggagagagggaagtggtggaagaagaagtttagaggtagtcacttagatgtgggtttaacgtctaatttttaaattctttaatgactgaactatcacatgaatcccaagtcaaccaaaccagtcttaaaatagttgagggggttattttacactgattttaatacattggggaggtgatgtacctggtttcatggctgaggatgcatagtaaatttgatcaatagttcagagttgaatttacattttgcttttgaaaaagaattttttttttgactaagtacaattgacggagcgtggggctcctcaccgggagaccgcgcaggcccccctttgccggttcggccgggggcgctaagtgagtttcttcgccctcgatctgaggaacgtcagcgagagaggaaatgcacaagacacgggcgacgtagacaggttcgggccgctgagaagcgtaacaccctactcctgtgttctggtggatctgtgcatgaaggaatacagcgaggccgagagcgagagagagttcaggctctaaaaaccattcgccagagtccccactcccttctcccctaggcctgggcctcctttttatctggtcaggggtcaccacatgggcctctagctgcctaagaagggaaacatgctttttacaatgagggctagtctacagccggaagtgacctctgacaagcaaagcacacgcctcctgccccgctcgcctgctttcccggtggacgcccatttcaaccttcatttaatggctagcgacttccttgccatacttgcgctgaagcctggaatggatctgaccgggactgacataccaactccaggagttagcacgccggctccggctagggacgagagccaggaagctctcatcattccgacgggacggggcgaggcgtgtgacaggcagcctgttgccacctaacccgcgatctgaccggtctgtgaccggtcacacaccccggaccggtcacagacactatcagcatgctctgcgccagattaaatagccagagtcaacactcatacaacctgctgtaaatgccgataggagcacgaactatgctaaaatgaaatttagaaaaccatactatttacaatggcatcaaaaatcattaaatccttgggaatagatttaacaaaagaagtgcaacatgtggacactgggaactgggtgagtcattgatgaaaggaattaaaacacaaacaaatgggaaagtaaatgtcttaatgggttggaagagttaatactgtttaaacgtccatacccatccaaaggag

SEQ ID NO: 12107 - DNA, 806 bp, Oryza sativa
  unsure (1)..(806): unsure at all n locations
tgggccattgatggctgctgtacnctatcagaacagcaaattacaagtacaaggaaaattactttttctcatctggagttgacaaaaatttaaataaatgtaattcagtgctggagaaaaaaaaaatcatatgatcatctaaacagatgcagaaaaagcatttgacacaagtcaacattcttataaaaactttcaacaaattaggtatagcaggaatacttctcaatataataaaggttatatatgacaagaccacagcttacatcatacccaatgatgaaaagctgaaggctctttcctctaagaccagaaacaagacagggatgctcactctcaccactgctattcatcttagtgctggaggtcccagccggagcaattagacaagaaaaagaaaatgcattcaaattggaaaggaagttatgaaactgtctctgttttcacatgacatatatcttatatacagaaaattctaaagactctaaaaagactgttaaaactaacaaatgaattccgtaaagttgcaggatacaaaatcaacatgcaaaaatcagttgtttttctacacactaacaaggaactatccaaaaaagaaatttagaaaaccatactatttacaatagcatcaaaaataataaaatacttcggaatagatttaacaaaagaagtgaaacatttgtacactgagaactgtgtaagtcattgatgaaaggaattaaaacacaaacaaatggaagagttaatgttttaatggattggaagagtcaatacttgtaaaatgtccataccatccaaagtgatgtgcc

SEQ ID NO: 12108 - DNA, 15358 bp, Oryza sativa
  unsure (1)..(15358): unsure at all n locations
agaaaaataaaaataagagttaagtaggaatacaatttataaataacaaatattaagaaaaattgaaagaacagtacatttagaatataaaatggtggcaaatgaccttatataggatagggatagcaggcaagccgtaaaggtagggtggtggcggttgatcggatatataaaagaaaaccctcaatcattactatattctatttttaaaatgctaacgacgattaaaaggataagaagtgggcaagccattgtaacgctccgcttttcgtgaggcgttaaaaactaactcggcaaaatcctaattgcgaaaattttcgttctttgtgtgagagtctaagttgtgccaaggatctcaatttaatcccgttgttccctctcatcgaaatcagaatcctccacctcgaaaattcctcttccgattcgagtctccgaaatcaaattccgaaagtcaaatccttcctttgaatcctcgccaaatacttctatgaatccagaattattcaaatcccgcctcgaatcctttccttgactccaccctattgaatcctttccttcaatacccaaatattccttttgaatcttttccatgactcctccttgagtttcccttgatacatccctaaaccctcgagtttgaatatcaaaattgaattcgaatccaaaccctaaatctctccaattctatccaaatcagttttctctgtaaaagtctattttacctccctcgtgatgatttgggccgaaacctgccgttggcccatctcttctcagctccctccatctccgcgtgcgccgcacgtgaccaccaagagagagagagcgctggctctctctcccttccctctctcggacgttctctcgctctctcgtcctcttcctctctctcgctgtttctctctctctctctcgcgccgacgccgttttccgccgtcgccgtccaaaacccgccaccgccttcgctcttttccgcgctcgcgcgtggccgaccggccggtcgttgccgccgtaagccctgccgcgcctgcgccgcgcagccgcccggttgccgccgcgtcaagccctggcgccgcctgcgtcgtgccctgccgcgctgccgccccgccgctccacgccgctagcttccaaagccgagagaggcatcccctgtctcaatcccctctccctcctccttttcccgtttcggcaagggtcaagccctcctttccctcttcctttcccctttttcccgaccaccgacgatgtcatccatggtcccagccgcttgcggccaaagcgcggacgctggtcgtgcgactgcaccagctcaccaccagctcgctctctttgaccgccaccaaggacggtttccctccctccccaaaccgacatcgcctccactataaaacccaagccgccccaaaccccttcttctctcgttttcgctcgccacactctcaccgcgccattgttgacgccttgccgccgctcccacctcttgccttcgtctcttcgccgtcgcacgcgtcggaggccggtgcgtgcgtggacgcgagacgaggactccggccatccctcttcttccccttccccggcccgaggccagagagctcgctcccgcgccgtcggccgctcgtcactgcgcccgtctcggcttggtagtgccaccctccgtttcccccttctcgctcgtcctctccctccctagctcgcgtggtagctcggctagccccccgatcacgcatggacgctgccccaggtctcgccgccgcccgccataggcttgccgccgttgccgcccgctcccggaggccgccgccgtcgccagccctcctcggcagtcctccgccccatccggtgccggaaatgagttccccgtgccccggagatgctccctcctccttgaatcgacctctcgtcgccccgccgcgatttccccttttgatctccggtgattgctgccgccgcaatccaccgtcgtcggctcctctcgcgtcgattcctctcgccgccacgctcccggggatccccttgacctccccctggctgccccaaggccgtcggccttcccctttgtctccgcgccgtgtcgccgcttccgccgccgcctaacgctgccgtgcgtacgccgccggcgaccatcgggtcccacgttcccgcgtgcgcatcgcggtcgcgtaccggttcggctaagcccgagcccgcgcgcccttcgcacatctcgcgcgcggccacgtcggcgtgccggcgagattggtcgccgccgccagccgccgtcgtttttcccccggctaatccgctccgttgaatcgattccccttggcctcctctctcttccgttgctaaccccccaatccacctcgccgccgttcgccggttcacgtcgctcgtcgacggccatcggatcagcctgcccggcctcctctcccttccccatccgacgtggcatccacgtggatgccacctcagccgcccggccccgcggagaccggtcaaaggcctcccggtccaccgatccaacgcgccgccttgcgtgcaccccgctcgcgcgagccgtgtcgccgccttgtgggtcccaccttgcgcccggcacgatggaccgcgtccaccggcttgcgtcgcctggaccgcgcctcgttcggccttgggccgcctccctcccgcgcgccggcccactcgcctcgaccgcgcccgcgcatctcttcgggccgcgccccttcgctcggcccaagtccaattaacatccctccatccttttctttttcagggatttaataaatcctatttcctttgtcccataaatcaattccttatttcaaaaattccataaatcttttcccttggtcccgcacgtccgtgactgccaataatattcttgagaatattatttctataaatttcataaatcaatttccccttgttccacaaatatcttcctttgcccagaaattccaattaaacttccaaaattcatatctctcgatccgtaactctgattgactccgttccacttcccgtatttccataaaattgagatctatttaatggcactactaattagtctaaataggatctttcttttggtcttttgtttaggttttcgattgtttgcgtatagttgcggttatcggattttcgtcgatcgcgggttttctcgaagattcgtgaagcttcatgaagaccttgagcaaggcaagtcaccctttgatcaattgcccctataattgaaaagtcattattattttgtttgcaacttgcattattagaatcacacacacttaacttgcttggcctcggtttgcatgccaaaccgacggacctacccagtagtcgtactaatttccgtaggtcgtactaccctgaatccttgtcgctccacccttgtggtacctcggtattcgtgctctctgagcacgtataccaaatatcccacatacaccgttgcttgtcgaaaatttgggaaatgggtttgtgaagccttcaaaacccgacatgtggtgtcggtgtgtttgaaaataaaatgaattgtgaaaactcgcgatgcggggggttgtgcctatgtggcactatcccgtattcgcatataaggaccgattcctgtgggaaactcatcgaacataatcaaagtacaaccacaaggtggaatgggacaccctagctaagtaactagtcggttcagggaaacctcgcatgccaatagttgggaacgccggggcggggtcggttggagccaaaccgggttcctggtaatgcaagaacgagaagcttgctgaattaccgatcgaggtggttggagtttgatttgtgaacgcctaaaatggcctatgtttatgtgaggatttgatccttctatgtggcatgaggtatccctgggtcggcttgggaaaggctttgtcgcgaatctctgacaccggccagtgtttggagtaagttcgtgtcttgtgggtaaagtgtacccctctgcagaggttaactaactgttcgaacagccgtgcccacggtcatgggcggatgtgaggtggttcccgttgcgtagatttgtttgcctgtgctttgtgaaaagttgttgtggtgtgggaatcgtaaccagaatcagcctgtgtggcagatggatgacctgagtggtcagaaacgaatctgtgtgattcgggatgtctgtgggcatcatagactaggcttcccgagtggaagcggattgctttgctgcggggcagctggactctaggagtctgagaaaatgaaaaaggctatgggagccgattaatcaagtggaatggctctgggagccgagaagtaatgatctgacccgggaggtcggtacattactaaatgagctgttgaaaaacatctcttaaagtcgaatcgagacgcaagtctctcttttcggcccaaacttaaaaagaaataaatcacttagtgatttcaaaaaaagtcttcaaataaaagatttgcaaaacaaccttgcctctcttccaagcttgcattaaacacctaagttcccgttacttgctgagtacgaaagtactcacccttgctctatatatagttcctccgccctgaagagaagataaagtgaagtgaagattagggtttcgtcctggttcccagccgtcacctgtggtgttgggtgttagaccgttggttccgctgctgctgctgctgttggtgtttcctcgtccgcgtcgtcggttgtattctcgggctgtctgagctgcaacctaagttaaggtaaataagtcctctatttattttaaggattgctatgattcatatttgtcaccgtgggtactagcactatgtcctgggactggtaccgagatcacggtttcgtaggaagcggttcgcgccgttttccctacgacacgctcctgtcaggtgccgttgtacggcggtatcagattggggtgtgacagccatgaaaggagcatgctatgatggttgacgggacttctagatagtaaaaaaaaaactaacgataatcatcaatttttgtaatcccaataacactaaacaggaggatagcgagtggaccgtacaggaatacaataccgagttgtgatgagacttcttaaactataaaacgggaacccgactttgatgggacttcaacaattataaagcctgaacctaacgatataatgaactggaaaaactacatgatcgaaaatttaaaggtttcaagaagcatgaataaaagccttggtagattggcgagcaaataaaggagatgacagttggtgtgacttttaaaaactataaaattaaaacctagatattgataattaagatttgatctttaaaaatcatgacataaccatataactatttaataattcttaaagaaaatcatatgtaagaaaatataattttgtacagggtgctagccgcgcaattgcttgtgtgcatgaatttttttatttcatcatgaattgacataattgctataattttctataaaataaaacttaaaaaagttttaaataggaggaaaatcaaagcgacgaaggtggtactattcatgacaatttgtatctgtctgttaattttttgccataaagcatacacgcaacaagatggaaacacctactcctatgctgctactttccgctgacagctgtcatgccgcgtctgtccgacgggcggggctcgtcctgtcgtgtcgtccgcgccaacgacgccgttcatctcctcgtcgccgggcaagctggcaatggcgacggcggcgccgtccaagtccctccccttgccccagagcacggtgtacagccccacgacaatgatcacggcgccgataacactgcacacgcaccacgccgccacaataagcaaggattacaacagagttgtgagcaaacaatcgacatgtaattacagagtaatctgttcatcaagaacacaacgatgatcaatcatgatcgaccgcgcacgcgcctacctcccgacgtgtatcttctcgccgaggatgccccagccgacgacggcgacgacgatgagcatcagcgggctgaacatggacacgaacaccggcccgcgctcctggatgcaccacgacatcaccgtgcacaccatccccgacgccacgatcccctgcccatttatatatacacaggtgttcgatcagttccctctcatgtcgtgctaggacgtactgactgactctgcatagtttaatattaccgcgtagagcgcgccgacgagcctgatgtcaaggccgagctcccacgccgagaacctccgctccgccgcccccgcgatggcggcgcactgcacgctggcgatcaacgccatcagcgccgtgctcgtgtacgggcaagcgaagctcttggacagattcttctgcgaacaccacgaattaaaatccattcaccatttcccgccgcatgatcatcaaattaagttgtttgtacctggatgatgaaccagatggcccacgcgacgttggagccgatgacgaggacggcgccgaggacgacggcgtggccgccggcgtgcgcggcggcctcggcggccatggtgccctggacgtagggccagtggacgggggacgccagggtcctgacgagggggccccggtagaacgtcatgagcatggatccggccacgcacagggcggttccggccaccttggcccggccggcgcggccggcgacgggctccatcttcagcagcgccgccaggaggaaggtcaccgccgggagggtgttgttcagcgccgacgccaccgtcgggctgctgtacttgaggcccacgaagtagagcacctgattgagtgttgctctgccaagggacattatatgttttgatattattttggagtagagaatggacgtacgtgtcgactgacttaaaataggtgtagacagtcaaaatatacaggaacacttcggttgagttcattttagcaatttgaaagagcaactttcttatatttatatttcgttaggacgtttctcaaattgctagacagtgtgttttgaggaaattaaataaactgatttgtttaagtttgtgatagttaatactcaattaattgtgatgttcttgttttgtgcgctgcgaaaaagcataggcaatctgccttgtcgaagaaaccttaacccaatagcttgtagctcggtttgaaataaattattgagcggactgttattaataaatagcttaaaacaaattatttaaacaaaaaataatagatattttttgagaaaatatagttttcaaaccgtagagtaaataatcagattaataatctgaaaaaaaaacttcaatctatatatcctctatctaaaattccagccaaaattagaataaaacttaatgactctagtttctactaacaatttgcatccattctctttcatacacacttataatttggccagtactttttataattatatactagtgaacttatttgtggatacaatgatggttggttgaaacgccatttggagtaaaacccaaaaatatttctagttaattatgctagtcaacagatccattccagtaaaaaaaaaacaattccattccagtaaatcgaaatcccaactgtgcaattttgtcacataaaactatacacaagtacaccatcccggtccaaataccgttacagttctctatatttttcagctgtttactgaatgtaagtcatttaagaactattgtatgcacctttttatcttttacctcatattttccttgctaataaataatatttatcacacaaataatgattcatctttataatgcagcataaatataatataaaggagaacaaatttatttgaattcggagtcttttttaattcttttttcacaagacaaaaacaatctacatttggaattgaagggagcatacatgtgtgctaaatttatttcatcttaatcggagtagtggaagaatatctttttcatatatattgttttcgctatggttcaattgtgtgtgtgtgtgtgtgtgtgtgtgtaacttaggagcagtggttaaaatttggtataagccccagttaactcaatctttaaaattatggaattacatagcatccttctgattagttaatgctactattatccaagaaaggggaactggatcaaataacttcattgaagtacataaaatgaaatagtcacccaatgctggagcatatgaatatctggaataatatcttcttactaattgccctccaagttttcctgcaatcacacaagaaactcagtttaccactttgaattaatggcattaaaagtcaacatggttttggttgtacattgaaagatatacaggtaaatgagtggaattgaatacatcattatacagatataggtcatttagataatcagtggaattgcatacatcatatatgaaagtggacttatacaggtaaatgacaatattaagtaattatatgtaatgatttcgtttcactttgaatattaaagttggatatatctgaagactacatcaccaggtttagaatctatgtaacattcaaattttgtgttaaaaaataacattttggatacatgaagattacaggatagatcattttacttaaatacttgcaaaatataaatttataaaagctagtatatgtcggtggaagactggaagtaaaaaagacaaaaatgtattgaataccacaacagaaggaaataaactagcaaaatgaatcatagtggccactcaaaagtggcactaacgatatacatagggatcctagcccatatatcagtgtcttatttacgttccactccttatggagtggcaagtctgagagttgacatctccactatgctatgatagtagggaagtatatattgtatcaattacaccaatatatcaagagtaatacttcctccatctcttaatataagaaattttggaaggatattacacatcataattatactacgaatatggataggaatctgtccagattcgtagtattaggatgtgtcacatcccttcaaaatcctttatatatcaagagtaatactccatccgtcttttaatataaggaatttcggagggatgtgacacattctaatactacgaatctggatagggggtttgtccaaattcgtagtattatgatgtgttacatctctaaaaaaaatcctttatatttcggacgggggagaaaaatgtttaagctaatgaaaattgaaaacttggggaagcaccactgatatggtggtggagccgtggttgcataactccacccaccagagtttaaatcctggtgttcacgaatattacgcacatgaaggtggattttcaacaagactttagtcaaatcacggatatgtcgctgttttacatctcttagagcatgtgttaggagatgcattcgtcgtgggggtgtgagtgtggtgttgtgtatacagtggtgtgtgtgcgtctgcgtctgccgtataatttcaaaaaagaaaaattgaaaacttcaattgtcatgaatgtacctttcaacaaggaatgctatgggagcgaggaaggcggctgcgatgaaattccggtaggcgaggagaacataggggctcatgcccgaggccatggtcagcttggacatcacattcaaaccagcaagccccagttgcaccagcaccatggcaaggagaggcaagtaggtactcaaagtactagcttccatgtctagctatcgggtaagtacgtacaccctctctttctctcccaaatgttcaacagttcttgtgtacttgtggttaccaatgctatggcaacacacaagaattgttcttgggagagaaagattgggggtgtagaggcacaggctgagcagagaacatgtgttaatgtatactatatagatggagcgtacgcgtactttgtagatagtagtagtgcagctgagtgaaaagccagtacaggcgtttccgtttcatgtaaaacaaagtagtaaatactgttactcttaaattattcatttgatcatgaagatcatgctatctttggagacatctagcttatatttatctcttattactcctctctctactttgataatgtacatcctgttttgccacaccccattggttgtacgctccatattttcacacgaactgccacatttcctggtgaccgttgctggtcaattgaggagggaatgaatttaccatgttctaaaaaaaatgacctgcatgacaacgcaatctacgtgaagatgaaaaccagttcatttcattttattcatagatattaggattctccactaaaatattgcaagatttttttaatataaaaatatcattttgggtcagtcaattcaagcgagaatcaaatgttagatgttttgcttttattttctaagattttgtttctgattttttaattcattagagatggcatcctactagtgttttaagatcatttaatgacatctattaattgttatagaataaatagataggagtagaagatagatagacatacagatagatttattgaataaatcgacagatagatatgtagatatgtagatggatgcattacgccagatcctcacacctttgacagcatatttgtgacgggcataagtactgttggtcagtgatgaagatcacctttgacgggtcctaccggatgccgtcttcagtgagccatccggtttcgacctagtcacctgtgacgggccggaagtgaaaaccgtcaaaggtgaggcttacctcacctctgacgggttccattttcaacccgtcacaggtgactagctacctgtgacgggtcgcaaccggatggcccgtcagaggtgaagtttactcacctcaaacgggttgaagccctaacccatttgagtgagttgtgttactatatatatacccgatatatttcttctcccttgagataaggccagcttctccacttctgtgtattcttctctacttatccactctctctccctctctctctccacagacttctctcaatacacgcgccgagcaccgggttcggcagcggcatctgcttcctcctccaccggccggcgccgcctcccccggccaccttccgaccgtcggtcaactcctcctcccgcaccccaccgccgactgctagatccggcggtagccgcctccactgcggcctctccccaccgcagatccggcgcctctccaccgccggtcccctcctcctccgccaccccattgccgcctgccagatccggcggctgccgcctccaccgcatggttgggcgcctctccaccgccggtcccctcctcctccgccaccccaccgccgcctgccagatccggcggctgccgcctccaccgcaccgccaaccgtcggatccggcacctctccaccgtcggtcgcctcctcctccgccaccccaccgccgcatgctagatccggcggctgccgcctccaccgcaccgccaaccattggatccagcgcctctccaccgccggttgcctcctcctccaccaccccaccgccgcttgctagatccggcagcggccgcctccaccgcaccgccaaccgtcggatcctgcggcctctacccccgacagccggcgtcgtccaccatctcctccacccgctaatgccgccgccatttccaactcttgtaggttgtgcaaattttcattgccaaatttcagattgggttatactctcagttgcttgtgtagatttatagtttattactcaaagttgtgtggatttgtgatgtatagtacttgtgtggatgtgcttcatgtgtcaacatatctgtcaataaaatgcaaagttattgtgtcaagagagattttgaaatgttcttcatgtcataagatatggcttgtgggctgctaaggcttgagagctgagagctagaggctgagggcttttgatttttttttggttgcttttccacacctgtgacgggtggtgagttgaaacctgtcggaggtgtttatcacctttaacaggctgaaaagatccactcgtcacagtgacgggttattttattcggtccatcagaggtgtcaatcatcattgacgggctttcacccgtttgagatgaggtgcagtcatcagtgaccaagactaaatccatcaaaggtgagggttagagcctgtcacagatgactaggtccagtgtagtgatggttgcatactttcatgggaaaatatataatgtaaacctatataatgtagtataaatgtggaaattattattggataaaatatagacatatgatatttgtccatgtcatcttgagtaaactcatactcatgattaaatttaggagtaaaagctttattcatggtaacgtgcagatgtttaattttgtatcgaatggtaatttctaggtttgcattacatattttccctacatgcatgtcttgcattggataaattccacttcacatctcacatgtgtaagggtcgggttttaatcctatctctcaaccgtgaaaccagatattaggcatccctcatcttctaaaacatgtgtaatatagttccaaggaggtattgaggcatgttttggctaatgtagtattatgtgctccattggcatgagcccctatgtgtaaatgtagtccaaggtggtatttacactggttttataaagatgaggaatatgttgtatctggttttgtggttgagcgacacgatcaaaactcgacccatatatatgagggacctaaaacgaacttctccctctaaggagtagggacagtcagatacattgggccacaaaattaggcccactgaccaggcccacataataaacgagagaataggttgcgtcggtgctgaactgtggcggaatctcagactttggcagcattcaaggttgctgccaaaccactggccaatcagtgtcacgtgagtgagcggcgtgaaagttatggccgcacatcacaggccatctgtgtctaacctgtttttatgtcattgtgtcagataatgtttggattctccttttacataactttggccaatcatgtgtcctattaattcttcctttatgcatacagcatactgatactattagttcttaatgctacaagtgtaacactgctaatgattgatttccattattgaaaaaaaaagtgtaacattgctgaataacatgccatcacagtaatacattgagcaaaactaaaaatgaaaattcctgttccaattaattcccaatgatgcaatgtgctttgtaaaagtttcatctatagcgtggtgtaaactaattacacttgcttcgattttttttttaccttttaccaccccagcaaaagaatccaacgaactccaagaattgcagagaacctatgctgctatgctgccgcctgcaggtcgatctgaacagggaaggacagcgacagcgcgtcgtctccgacgaggaccctgctgactcccgacggcacgacggtgtacgccgtctcctcgacgatcgcgaacgccttgcacacgttgagcgcgaaggccacctcgacggcggcgcccgcggccacccgcacccgccggaacgccaccagctgcttccgcggcgcgccgtccacctccgccggcggcgccgtgtacatcggcacgacgtgggtgccgtccctgccgcccgtgttggccaccgtgacggcgaagctgacctcctcctggcacgcgtggctggccacgttcacggccgggcacgccggcggcgaggacaccccggccttgtaggtgagctgcttgcagtactcccacgcgccgaccttgaccgtgaccggggcggcggcggtggccgacgcgtaggtgaagttggtgtagctgaggccgtggccgaacgggtagagcacgtcggcgccgccgtagaacttgtaggtccggccggggtagccgtgctcggcgtccggccgcagcgccatggacgtcatcgggatcttgctcacgtactcgttcttgtaccacgtcagcggcaatcttcctcctacaaaacaaaaatgtttcagaaaaatgcattgaagaacagagaattaatctacatgtacactcgattctgtacctggattgtattttccgaagagcacgtcgccgatggccgtgccgccttcctcgccggggtagccggcccagacgacggcgccgatcttggggttgtcctgggcgaaggagacgtcgacgccgccggcggacatgatcaccaggacgatcggcgacggcgaggcctcggcgacggcgttgatccagctggcctggctccacggcaggaggaggtcttccctgtcgttgctctccctctccacgctcatgttcaggccggcgacgacgatggtcgcgtccaccgtcttcgccgccgcggccgccgtgtcgcacgatcccttgtcgcatgcgtgcaccgacgtcgagctgaccaccttccgtacgccgtcgtacggcgtcaccaccctgcaaggcttacctctgtagtctccaagcatgacgtcggtggcattgatgtgttgcagctgcccgaacagtgccaccgaattgaccttctccggcgacaacgggagcagcgcggcgtcgttcttgaggagcaccatcccctgcctggcggcgtcggcggcgagctccttgtgctcctcggtgcagacgtcggcggcgccgagggactctagctccgggatgccgtcgaagaagccgagcctcatgagtgtaaggtagaggttggtcagcgcgttgtccacggcggactccttgagcttcccctgccgaacggcgtcgacgccgtaggtggtgaagaagtcgtggacgccctcccagaacatgccgcagtcgaggtccaggccggccttcatggcggcggcggtggcctcgacgccggtgtagccgagccacttggcgtccctgaccatgacgcggacggagtcgcagtcggagacgatgtagccgtggagctgccagtcgcggcggacggtctccgtgagaaggcgcgcgtcggcgcaggccgggacgccgttgatgcggttgtaggagcacatcacgcagctggcgtcgccgtcccggatgcacatctcgaacggccgctcgaacgtctccaccatgtcgcgctcctggacgcgcgcgtcgaacgtcagccggtcggtgccgttccacgcgtcgacgtcgtacgcggcgtagtgcttgcagcagctggacaccttgatgggcctggagaacgcgtcggtggcggcggcggcgaatgcggcggtggtggcgccgtcgatgtcctgcattccgcggacgaagttgacggcgtaccggccgacgacgaaggggtcctcgccgggggtctcgctggcgcggccccaccgcgggtcgcggacgacattgatgttggggctccagtacgtgagctcggcgtggcccaggttgtacatggccctgatctccgtcgacaccatgatgagctnctgtaccagtggtactcactngccac

SEQ ID NO: 12109 - DNA, 708 bp, Oryza sativa
atgataagctgtgctaaatgcgagataacttcctagggcttcatggactttctcccagaaatggtaggtaaattgtgtgccccgatcagatataattttctttggtacacaatgaagacatactatcctggtcatgtataactcggctagcttagcactgctataatttgtcttaacgggaatgaatctcgccgtcttggtgagtcaatccacgctcacccaaatggaatcatgtcctgttgcggttttgggcaatccaacaataaaatccatacctatctcatcccatttccattcgggaatcctgagaggttgcaacaaacctgccggcctctggtgttcagccttcaccttctggcatacgtcgcagagtgctacgtattcggccacatctctcttcatgttgggccaccagtatccttccttcagatcttggtacatcttcgtacttccggggtgcaatgaatatgccgattcgtgagcttcctttaaaattaatcccctcagtccaccctgttcgggtacgtaaattctctttttataccatagaacatctttttcgttggttgaaaattcctttgcacgtcctgcagctaagcgttccttcacctctcggacttcctcgttgtccttctgggcttcttctatttgggttctcaaaagaggttgaatgtccagggtgtttatctatccacggggtactatatg

SEQ ID NO: 12110 - DNA, 6998 bp, Oryza sativa
catcagtactcctcctagtccttgccttgacgcatcacaatatataacaaagtctttcctgatgtcgggaagaactaaaataggcgctgaggtcagcttttccttgagctgctcaaagctttcctgacactgttctgaccacacaaacttcttttccttcttgagtagttgtgtcattggtcgggctatcttagagaacccttcaatgaaccgtcggtagtatccagccaagcctagaaaactccaaatttcagtcacagatttgggtgctttccattccgtgacagcctccactttagcaggatccactgctactccaccggccgagattacgtggcctagaaaagcgacttcttttaaccagaactcgcacttgctgaattttgcatataacttatgcttccgaagtttctggagaaccaatcgtaagtgttccgcatgttcttcctcatctttggagtagatcagaatgtcatcaatgaataccaccacaaacttatccaagtaatccatgaatactttgttcataagattcatgaagtatgctggggcattggttagaccaaacgacattactgtgaattcatacaacccatagcgtgttgaaaacgcggttttggggatatcctcggtcctaatcttcagttggtggtatcctgatcgaaggtctatctttgaaaacaccttagctccctcaagttggtcgaagaggtcatcaatccgtggtagtggatacttatttttgatagttacttcgttcagtgatcggtagtctacacacattctcatgctaccgtctttctttttaacaaacaacactggggctccccaaggtgacgaactggggcgtacaaatcccttctcttgcaactccctgatttgctttttaagttcttctaactcattgaccggcatccgatatggtctcttggatatgggggcagttccgggtatcaggtcaataatgaactctatgtcacgatctggtggcattccaggtaaatcttctgggaacacatcaggaaatcgttgcactactggcattccctttaggggtagcatggtaaatatacctccggcacgttcggttagcctaggatcttgatccatggttgctctcatatccgatccccagggtgtggtcagggtaacttctctacgtctacagtcaattactcctctatgctttgctaaccaatccatacccaaaatgacatcaagagtttggggtattagcaccataagattggagggaaataccacatccctaaggcggatgggtacgttaatgcaagctgtatccactgctatctcacccccaggtgagtgtactaacattggttgtcttagtttaactctggttaaattgtgttgttgacttgctttcaaagatataaatgaatgcgatgctcctgaatcgaagagaactttaactggagtggagttgagtgaaaacatacccatcagtacgccttggtcttcctgggcctcttcggctcgaacgtggttcacttgcccgcgtccaaatcctgtagcggtcctgttagtctgcggggtcctgaatagacctcgtccagcagcaggggtagcagtcccgtgaatagccgttgcattagttccggtgcgaatgggtgtcttgtttggatgtggacatttattggcgaaatgcccatactctccacagttgaaacagcttcctggccttactgatccagtggcggcctgatttggtgcaggagcgcggttctgaatggtaaccggcctgtggaaattgctagaggcggcaggtcgactggttgtcaccactgttggtctccatgccgaggaggttgtccctttaggacgctggggtgcggtctgaggcgtgcggttcatggcaagcctccttttacgattgtgctccacgaccttccggtcgttctccaacctaacgaccttattgattaaactctggaaactatcgtggtcttgtccaatcatgggcccgcgtaactcatcattcaagccttcaatgaatttgtcgatcttttcctcctcgtcggcaagatctctagttgcgtagcgcgccagctgagtgaaacggttcaggtactcttgtactgtggtattcccttgccgtagtctcctgaactcattcttcttcatccgcatcaccgcggcaggcacaaagttgtcacggaaggctgtggtaaattcctcccagtttggttctccagcatcttcttctcgggcttctttgtacgtgtcccaccaatctccggctggtccttccaattggtttgccgcaaagatcactttatcggcctcacgtactcgaacaagagttagcttcttctcaatgatccttaaccaatcttcagcatccataggttcttcagctgtggcgaatgtgggtggcttggtcctcataaactctccaaagcttgaccctccgcggttgccttggttgttcgcgatagcttgcagaagttgagtttgggtggccataattccggccagagtgtttaagtcgggtgtctgagtttcgtcattgctggttgttgcccgacgtcggcttgccatctgtgtaggttgatggagtaagtatcctaattttctaactagctcctatggctttatcccattaagggagttgtgtcgatatgaactttgtttcgcaagcatggtggaataaactcatttacaacacaacaacaatagatatcataaataacatcacagagtttcacaaatggtacataaatcatgatgcaattgactgcatacatacacagtccaaataaggttcatccaaacgatacatcaaaccaatcatcaaactactcgtcaatctaggtaagggaggggggtgtctcgcatactatccaaaaaccatctgatacgagatcggagctgcaaggagtccgtcagtctagtcctccagccatccgcaggatctcggggcaggtagagggtggtcgctggctcgcgcaaaccgtagtccccacggctcagaggtagtggcctctggatctggcttgggcctcttgcccgggggtcgtgtgctcttgcgagcagtgctgagggtgcgaggtcctccaaggaaggtgatgcggggaacaggggtctcatcctctgaaggatcagtgatgtctggctcgatctcaggctcggtgtcggtcccctctgtctcggagtctatctggatcggagtctccaaaccggaacccagctgcggagaaggtgtagggatcagtggagtgtgcaccaactccggaacaggtggctgtgccgctgtagggtccactaggtagggcgctgactcggtagctagcatactagcctctcccagaagagcgtggaacgccggtgggtacggcggggtgaggaagaagtagcggtcacggcctactgctgtggaagtagaagcccctgtagtgctgatcttggctactcgaagctgctcctccagctggctgacgtgctcctgactctctctcagctgctcctcaagagtatccatcatcccgcggcgatcgttgtactggtcggataactgctggaactgatcgccgtggacctggagctgtgccttcagtgagtctatctcactgccccaagcctggtgctcctcctccaactgaagctgctgtgctgtgaggtcggtcacctcagtctctaactctcccacacgtctctggtggtcgtcaatctccaacagagcctcctcgtagtagtcatctactgcctcagcccatcgtgacaaccgagtcaccatcgggttgtagcagcagggcgtgtcttgaactgtgcaaactgagttgccctcctcccggaacgggtgatgagcaaactcggtactcactaactcagctcggtggatagagctgagtcggaggaaggcctcccgggcggcatcctgcatcgcggtctctggcaggtctcggtggtgacgttctggaagctgtagtccaactcggaagggactcggggatgaatctcgacccgagcctcccaaattgagccacactgtctcactcggtatgacgggaacccagggtatcgcagacgcctcaacatccgatgcagctcaatgacatacccctctgattgaggtaagctcaacttccaggtagcgggtgaatccgaatctgccatctaattttaagaaaaacccaaggtcagttgagagtaaaacttgttttgtaaaggaaatagttaagagtaagatgaaaagtgtaccgagttttgtaaacatagagtttttatttttgaaagtattgctaaatgggaatttctcccttggccaacttagaaaaggggtggggcgccttttggtcttttcctacagtcgtatggttctgataccagctctgtagacccccgtttttataacaggagtcaatcgtgtaaacagtaccatttccctggatcaagtagtttggtacacacggattcatagctggaataccaagtgcacatacacgagtgtctaatacgaattattacattataggcccgcaggcatagtcttaaatcatcggaccgagcggtccggaatacatccaaaagcagaaatagataaggcaacggaattcaggcagcggcatgccattgccacaggcaacgaccgtactaagacctactggacgccttcgtcttcatctccctcctgatagtaggcatagggatcctccgaggcttcatcttccgcttctgataaattttatatttgcaaggatgagtaccaaccgtactcagcaagccaccacagcaatgatgcacatgacagaggaattcaaaggatggctatggttcttttgcgcaaagcaaattttgtaattcttttcacaagcctaagacctagcatagattgatcaagttttaataccagtgttcatattaaacaatgacggttctgtccaccatccattgtgatcccaaggatagcttcccgccattgaatcgttatggttttctgaggacgtccacattcccgcctctcaggaagtggctccgtcagcataaaaatcatcatgcaatatcccatcccacacaagttaaagaatttagagtctagccaagtataatacatgtcccggtgctcaataaccgcgagcacggctattcgaatagatttggtttactcacactgcagtggatgtacactttacccgcactccgcgactgcccaacacatgagcctcggcccaacacatgagacgcgtcacggcaaagctttttgataacctcgcattggcagtacccgctccatgaacttaaatcctcatgcactctaggcgtccatgtttctagcagtgagaggagttctggcgctcccgggaaagagaagtctcacacacatattaaattatggttcaagttaagttctctctctctcacacactcatggcagtcctaccaatggcgacaccgatgtagggcacgcctctcggccctacctcaacggctgtcccaacgtagcgcacctgcctcactcagaggtgaaccatctatgcagggatactgcctccgctcggctatctaatccgctaggtctatacccattcgagaagtacggttgtacgggggtcgtttcatgcttaacttcatggctcggtccttaattgaccggggacggtactagcctttcccagataccacccaaatcctccgtccgccccagtcgaaaacaattgtttaattttatttctcctttcacaaatcatgtcatcaacataatggcaatgtggcgcttatgtctccacatgccgcatctcaattaccttcccaaaggtaattgccccaagcatatagcatttgataaatatgagtatgcatgattctagaatagcatttctaagcaattgtcatagttgactagggactcatacgtaaacatggttacaaagatttaagggttagcaataatcaaggcatggcataatcacaagtaggatgttcatcattgtatgcaattttatttgtaaacaaaacaattttgcaattaggatcaacatgttcaaggaatagtgatgacttgccttgctcaaagtcttgcgggtcttggccttcacttggatccgcaactccctcgggctctatagttacgtgcaaaaattgatttgaattcggttagaattcaaataaaaatccaaataaatccaaatgaaagtcgaatgcgaaagttgattcctttttattaactttactatctgcgaactacggcaaacccaatttcgatttaaactattttgcgggtataattatttcgttgtcaataatttagtttccgcgagcattgtatataataggttagaaatttctaccacgagctaaatattggacgaaatcctagaaatgctatacaatttaatttagtctatgactaaatgattaaatataatatacggctaaaatccctagtaattaaatccgaatttctaccgttaattgattacttatagggattacccaaaaataatctataataatttatgataattcctatttttacttaattacatctaaattattaccgcgaactgatctcctattgatattactaaaaataatctataacaatctataaagattcatctaattgtttaattcgtaaataattaattctataatcaaatcctagcactttaggtatttaaatagtaggagttcatccaatgatattctcattaatcctataatcaaattctaatattttttttaaatattctaaatctcttaaatttttcctttttctcttttctttctccctctcttttcctttccttttcttttctctctccctttctcctctctttcttcttttttttttcctctcttctctccctcccggctcctttctccctctctctctcggcttcttgctctcccgggcggcgacgacgatgggcgcgagggggggtgggcggcggcttaccgacggcggcgtcggcaacggcggcgacagcgacggtggcggtgttggcgcaaggcgcggtgcggcggcttctaacgac

SEQ ID NO: 12111 - DNA, 2179 bp, Oryza sativa
cagcgaaactaaagacaagtagcaacctgctgatggacgccatgtaccctcatcgatcgagtggggccttggcttgcgacgtcgcagtccctgcactacaaaatgcactgttgtcggctggcaagcgatccatcgatcgatgaacattgcggatctaaacaaaactggtatctttcactggtggagaaaccctttgtagtctcggttcataacccccttttagtcctggtttccaaaccgggactaccaatccgggactaaagatcgctatctttagtcccgggtgaaataaccgggactaaagatcgatctacaccaaccgggactaaagatcgagctgaccttttttttttttcatggcccggttgctgcatggcatatatatgtttcagtacatatatgcatatatatatatatatattatattatatttatatatgtttcaatacatatgtacatgcataatatatatgtatttatacatatatatgttatgcaaatgcatatgtgtgtgtatgaccaaaatatatttacattatagaaaatgtgtacacatgcatatagaaacatatatagtcatgtattaattacaatccattgtatgtcctagctagctacgatttcgacgtagtagtagtcgctagctcagaagctaaggacctatgaattgtgtttccgtcgtagaattcacccttgggatcaaggatttgttcgttgatgaatcccatgagttgttgttgaaccgccgcgataaattcctttgtgcatggtcaggttatccctcatgcgaataaactatatgaatgtatgaaattgattagtaattaaacaagaaatcgatacgtaatgaatttttgaatttatttgtacgtacattgagctctcttgtggtgatgatttggtctgcaagacagtggcaatattcgcacacgtaatagccgcacaagttagttcccttcttttgctttgcgcactacaaataaatgacaaacaacgagagatctaattaatatacacttgtatgtatttgaatcggaaaaatataaatgtagagcatgtgtactcacaggaaatttgaacttccgcctaagtctttctctccatttgccgcggaccaaatgacggaaccgataccaagccctacatggagtttaaagctatgattcgtagtagcaattaacataacaagattttcttaattaacagaggaacttatgacggtacctgtctataagttcgaaaaccttgtcaaacgtagactcttttttatccattgagtcatatatgttgacagtgcaggccgacaggtcgaagagtaaaagcacccagtggaatctgcaatgtgcgtgggatgcattacatatgaaacacttagcaagttcgtacgggaatgaaatttggtataggaagacagtaaaattaaactaactctgtgttgtacggcaacagtatgaacgtcttgtaatgctgcgccttcaagagatggacgagattgtcctctgtggcttgcggatattggtcgagcattgcgacgtttactttccgagggtcgatgaatccagtatcgaaaaccccccgccgtcgggccctttgaatctccattctacaacgataaaagggagtatattattttctatagtctacttatatacaaggacctaattaattaaaggagacgcagtaagaaatctaactgaacgatatacttacaaaatccagcaactcataatagagacgtcgagggcgtccagctggtatagttcgtagattcccttgaaattgatccaaagaatgtcatctccttgcaagaagtccgtgtccctgatcctcgctccgatcatctctctaccggtggcgctcatctccatgtacagctgatggaacttgtacatttgtgtgggtagggactgcagcagctcaggcttgacaagcggtttaccgagttcgtacatgtatttcacttccgccttttcgattggtgcgactcctagcaattgatccgtagttagaccggtgtcagtaataaattcttctatcgtcatttctttaccggtcaccaatggctcgatctcctggtttggttgctctccaagctgagggactggtttagactttccagaagatgctttcttcagcgttcgctcatagtccgatagcttaatggcctccttggcaggtg

SEQ ID NO: 12112 - DNA, 1846 bp, Oryza sativa
gacggcgagattcattcccgttaagacaaattatagcagtgctaagctagccgagttatacatgaccaggatagtatgtcttcattgtgtaccaaagaaaattatatctgatcggggcacacaatttacctaccatttctgggagaaagtccatgaagccctaggaagttatctcgcatttagcacagcttatcatccacagacagatggccagacggagagaaccaaccaggtcctggaagacatgctgagggcttgtgctctggattttaacaaggattgggagagatgtttgccctacgccgaattctcctacaacaacagctttcaagcaagcctaaagatgtcacccaacgaggcattgtttggtcgacgatgtcgtaccccgctaatgtggtccgagactggagaacgggcggtatttggacctgacattattcaagaggccgaagaaaaggttcgcttgatccgcgaccgtctaaaaatagcacaatcacgacaaaagagttacgccgacacccgaagaagaaacctggaatttaaggagggagattacgtttatctaaaggtttctccgatgaggggaacaaaaaggtttaaggtcaaaggaaaactggcaccaagatatgtgggaccattccagatcattgccaggcgaggagaagttgcatatcagatacagttaccagagaatatcgcggatgtacacccagtcttccatgtatctcagctaaagaaatgtttacgagtgccagaagagcaagctccgctggaagaaattcacattagcaatgatctcacatatccagaacacccgatccggatattggatgaagccgaaaagaggactaggagcaaagtgtggcatatgtacaaggtacaatggagcaatcacactgaggatgaagccacctgggaaagtgaagaatttttgaggacggaatacccgcacctattcgaagactggtaagaaatctcgggacgagatttatttaaggggggtaggtttgtaacactctgaaaattcgaccgacaaaatcaaaactctaaaaatacagatcttcaaaaaaactttttaaataaattgcatcatgccaattttattcgacgattttattggattttgatttcggaattcatcgatcacaaataggggaaaattaattaggaattaaccctgcaattagatttggttaaagaaataaataaattataatttaaaataaagattaggtgggatagaaataaataaaatattatcgcgaccatatttggatcaattaaatttaaatacgatggaataagaattaaccctaaataaaactcaaataaattacataaaaataaaataagagtaatattaatctagggcaaattcattagttgagataatacacatattgagtaaacttcatttatgcaagatttagaaattataaaatcaaattcatataggaaataaactaaaattgggaaaaataggaaaaagacactattcattagcctctaggtgttcgacgaggctccctagccccttcccctcccctgccatgcgcgcctcgcgccccgagccgtcgccgtcgccgcctgccgccgtgccgctgtcgcctgccgcgccgcgcgccgctcggccgtcgccgtcgcgcctcgcgcctcgtcccgccgcgcgccatcgcgttgccgcccgcgtgtcgccgtcgcctgacgcgttgccgatgccgcgctgctgcgcctcgtgccgcgcgcgccctcctcgcgccccgcgccgccgcgccgcgcgcccgtactgtcccgctgccgcgccgccgctgtctgccgcaccgcgcgccgcgcgccgtcgcccgtc

SEQ ID NO: 12113 - DNA, 1612 bp, Oryza sativa
gcagagtcaatgacataatttacgcagagtcaccgcatatattgaatcctcccgttgaaaatgataaatggaagtaaatgacatactgttattgtttggcatagtgaataatttccatagcacagttcgtgcaactgtcattgtaacccagacgatactttgtccatgcatagcaatgttttcatgattctgtcaagataggacagaagtgtatttcgaaaattacatgaaaatgttctggtaaagctagaagtagaaaattgctaaactaattgtctttaatttgtcgaagacggtccaccacatattctggtagtattgcctcgttatcacgcagagtcaaaaggtggatcaaaaattgcctccggaggtagtacgggtcctgcgaaagttagagtattttctttatagctttatgaggacatatttatggtggagtgcggtgtgtgcggatatgaaagcattatgtacctctgtaatagggttcagaagacgacgaccatcgtagttcaccataaagttgaatacgtaaaagccacagtcatccctgtatgtttttgagaaagtagtgtcagtacaagctttgggttggttgtatttcgtttgttttaggagtcactcacccgttctgctgctctggtatattttcaactgtctcaaagtcccaattaagtatgtccatgttccaccctggagatgcaagacgcatgcattccattacacactgtgacaccatgatctttatcttgtcatgcctggtgaaacgtgattccccgagtggatcttctgtgtttagtgaatcaagcaccgataacttcttgctctccatgttaaatacgtacagcacgtaatgattgaataggtgaacaggaatcagtatctgcaaagtttaggtttttcagtggggactacttctgtactgttgtttacaagagtttctacaatctacgaactgcaaatttgtactcaccaggtggctttctgaaacatcatatactacctctgggcccgaaaagtgtgcaagttgatggctagcttcccaaaattcctcaccagctagcgcgtacatctgacaatacagaaagaatcattgaatttatatttttattgatgaaagaaatatattgtttattgcatgcaatgttaccccaaaatcttggttaatgaaatgcctccaaccaaggtagtttgtgttgtgaaatctctcaacttcttgttggaacattattcgaattgcaaggttgagagaatctgaatccatttggctcccaatctttatagtttcttggatgtttcgtagcgtcaatgatattctgaaaggatgggagctctgcagccatgtttttctgaaataaaccatggataaaaatgaatgtcagatttagtggggtgagatactcaattattctggaagaataatgatacttactctaatgatgcatcgtcagaaatagacattatataggaatacaggtcgtcagcaatcctagattccagcctctccgttgagcattgcttgacatgaaaggtgacatgacttcctgtttggtttgactacacgctttgacatgtgcttcatcaagtgagatggtgggttttcaacagtgtattt

SEQ ID NO: 12114 - DNA, 5163 bp, Oryza sativa
aaatataagaccaacattggtaaaaatcatttttatagttgtgttctattgttagtaccaaaatttttgtaaggttttttcgactaccaatatgtaaacatgcttgattttttcaatctgcataattataaatggatcccaccaatatgggtttttccatatggaaacactgtttttttaattgatgcagaagtttctacattgattttcttttaatttgaacaattatagtttggtcccctaaatgcatgactatattcattgactgttcgtaattatttttaacaattttcttccacatatattactcccccgtcgctaaatataaggaaattgagtattcaaaatttatccccaaatatatgtaacgtattgggaagtactacttatcctatcaatgatcacacccatttaattttcttttcatcttatctcagaccaccccctccttacattcattaggcatacggttttttttcctttatccttattttctaaaaactacttaaaatccctaaaatttagggacggagggagcaataaataaataagttaaaatttacatacctccaatccaataatgatgtaattaaccatcattcttgtgttaaactgaagggaacacatggaataatttatttgatttgtcatctgcaacgtaactggcattcaaaagagaactaggtactaactgacaaacatgtgcaagaagagatccccacctactgttctttggggcccaccacacatgcactgatcagattgacaagtacacacagtggctggataatgcagctagtggcacgtaatagaaagtcatagcgtaaattcaaaggtgtttttgattattattctgtgatgaataattggcattggagattattggttttgatatttggaatttattcaagaagtggttttggagatgattggatttcacaggtgaatctacaggtactgctgttatttcatgtgaccggtcagaccggcggtacgtgcgtggtcagaccggctagcccacggtctgaccggccgactctgtgtcggtttcggtttcgggttgtttgttcggatatacgtgattgtttcattgttacgacttctagatggatactatacgtatgtaatactgttgtttgctactaatgagtcaagttagagatagcttggtctcggaatatggtttctttgtttatttcatgtgtaggtgactcgatgcctcgggagagtatttgcggtgatggaccgggagtcggcttggggataagacgacgtccgtggtggtcagagatcatgcgggatatttatgctagagttgatgcacgtggttggtgaagattccatatggcatacgatataggtattgtgtgcgtatgggatgcggagtcgaatttggaaggagtccaaatttggtatgattggttatgtaaagtttgtttcttgtactataaggtttcctaaggtgtttagaatttctagtatgagtttggttcgtgactttaggctgcctacctcgggtataaatagagggggatcgtgaggcttcccggtatcgcttttgagagcaattgagttgagtttagagttagggtttcgagtttagtcgaaattttagtaaggagtgctgttggtgcactctgtaaacacagagagaatcaataaagtcgtcatccactttaagagttcttcgatttgtgtttcaccgggtttcggcggtctaaccggtgatataccaacggtcagaccggcggcaagcggcggtcagaccggcgtcggcgacaggaggcagcgacaaggttcggcggttagaccggtagatcaacaccggctagaccggcggctacgcttcggtcagactaatctactccggtcagaccgatctccatcgatttcgagggtaacttttatttccgctaaaagttttcggtttttgcgtaccaaccattcatcctccctctggttggcttagttattttgattcgttcttacaagtggtatcagagccttattttcttctttggatttttatcgatctagaatttttgccatggctgcttctgttaggttttcaactaagcctcttgtttttgatggaacagatttttctcattggtgtagtaggatgcaatcttacattatggctgaagattatgatatttagagaaaagtttctcatccttatgtgattcctgaagtaattaatactattgctgcaaaaactgagtttgaacaaaattgcaaagctcgcaacattcttttgagtgggatttcttattatgatcgtgttgctcatcttcaaactgcccatgagatttgtaattctttgagtaattttcatcaaggaacaaataacactaaagaacttcatcgagatcttttcaaaaaggaatacattaaatttgagatgaaacctggagaagctttggatgactatctttctaggtttaacaaaattttgagtaatcttagatctgttgattcttcttatgatgctaattatccacaatctgagatttctcgccactttttgaatggtcttgacatgtctatttgggagatgaaagttacatctattcatgagtcagttaacatgtctactttgactttggattcgctttacacaaaattgaaaacacatgagatgaacgttctttctcgtaaagttgatactaagtcgagtgctttggtttcttcttcttcttcttctttggatgttgatgcttcttcatctaagtcttcttttcttgctatttttaatgccacatccgatgatcaactcgaacagatcgaggaggaggatttggctttggttgctaacagaattgctcgagctatgaacaatgccaggtccaggaaaagaggtggtccaaatcgttgctttgaatgtggttcaattgatcatcttcgttcgcattgtcctaagcttgggagaggcaaaagagaagacaaagatggtgagaagaccaacgacaacaagtcgaagggtacatccaaagggaggaagatcaaggagaatctcaagaaggcttttgatcaagtctacgccgtgtttgagccactaagcgatgtggatggtgatagtggagatgaagctaagggaaagaacatctccggtgtttgcttcatagcgcgtggtgactaggattcagagtgtgagaacaatgaggtaagtgcttttgaggaagctattaatattttgagtgcaaaaaataagaagtgtgagaagatgtatagaaaataggaatttatcattgaatctctttattctgaaattgctagattaaaatctcttattcctaatgatgatgattgcaaaagttgtgaggttttaatgaatgagatttcaaaaatcttctcttggatttaataaatcttctcttgcttgtagttttgctttgcacacacgtacgcagggtgagttgtttttaactaaaaagttgttgcaaaaatatcaaattgcttttcatgctagtttgatgtttaacatgatttgtgctaaaaagttaaaacaatctcatgatgttttggattgctcaacatgtcatttgaataagatgaaattgaaagatgctttaggtcgtgttgagtacatggaagacgttgtgaaaaacaatgaagtactttcttgccccaaatgtcgtaaaagtaaaggtgtcttggtagattgtgaaaattgtgctaatttggaaaaagaggtttcttatttgaaaaattctttgctaagattttctgatggtaaacagaacctcaacatgattttagatcaatctaaggttagcacaaataatcgtggtttaggtattatgctcataattctagacatcctcctgttgtgttaggtgttggtgctagaagtggtgagattttggttaaacctgatactaacaaaactgtgtttaaatctgctggtatcatgtctactttgagtgcatcttcttcaaaatccaatgttgtgcatgcaaaacctcctgttgttgcttgtgttgctaagtcttctaattctaccaatgtgtctaatcatcgtgaaaaatatacttattctttttgtggcaaagatggacatattgttggtttttgtttcagattagctcataaacagaaaaaggagagagagattacttttgcaaaatcgaagtggtaaaaatctggttttccctcaaggaaaccagacagaccgcagtaggtcccgcggtcagaccggcgaccggtcagaccggctactgtgcctcggtcagaccggtggtgaagcggcggtcagaccggctgcacaccctcggtcagaccagcctcggagaaatttttctgaaaattctcaaactgtttttgcacgtggatatatgcctattggatctactggttgtgtgtctcagtactagataatttttattaacttctaaccccagtactgaggcttcgacttctgcttgtgtgtaggctttggtggcaaggaaggaaaacgtgtggatcgtggattccggttgttcgcgacacatgactggtgataaaaaatggttcacctctctcaaaaaggcatcaaagactgaatcgattatctttggtgatgcttctactagtgccgttctcgctataggtttggttaaggtaaatgaaaaatttgaattgaagaatgtagctttggttgaggacttaaagtacaatttgctttcggtttcacaaattgttgataaagattttgaggttcactttaagaaaactggaagtaaagtttttgattcttgtggtgattctgtgttgaatatttctcgctatggaagagtgtttaaagctgattttgacaatcctatttcacctgtgataacatgtttggttgctaaatttgattaagatgtgatgttttggcatcgtagacttggacatgttggttttgatcatctcactaggttaagtggtttggatcttgttcgtggtttgcctaaacttaagaaagatcttgatttggtttgtacaccgtgtcgtcatgctaagatggttgcttcttcacatgctcctattgtttctgtgatgacggatgccccgggtcagctattacatatggacactgttggtccaattatagtgcaatccgttggaggaaagtggtatgtgttggtgattgctgactatttttctcgatattcttgggttttctttatggcaactaag

SEQ ID NO: 12115 - DNA, 5829 bp, Oryza sativa
ggcacggggctcggggcgggacgcgacgggcgccggcgtgcggcgcgcggacgagcgacgacggcgacggacgagcgacgcgacggcgacggacgagcggcgacgggacgggcgacgcgatggattttagtttatatttcctatatgaatttgattttataatttctaaatcttgcataaatgaagtttactcaatatgtgtattatctcaactaatgaattcaccctagattaatattactcttattttatttttatgtaatttatttgagttttatttagggttaattcttattccatcgtatttaaatttaattgatccaaatatggtcgcgataatattttatttatttctatcccacctaatctttattttaaattataatttatttatttctttaaccaaatctaattgcagggttaattcctaattatcttacaataggttagaaatttctatcgcgagctaaatatcggacgaaatcctagaattatcttacaatattatacgatttaatttagtctatgactaaatgattaaatataatacatggctaaaatccctagtaattaaatccgaatttctaccgtgaattgattacttacatagattacccaaaaataatctataataatctataagaattcatctaattgtttagttattaattacatctaaattactaccgcgaattgatttcctttagaaattaccaagaataatctataatttatattaaattttgcaattctacgactataattaatctataattaaattctaattattttaaattttataaactattaacctccctattctatttccctttttctcttttcttttctttctttttttctcttttcttttctttgtttttctcttttcttttctttccttttctcttttctctcccacgttttcttttctctttctctcctccctttcttttctttttctctccctcccggcttcttctccctcctctctctctcggctctctggcgacggcgaccgagcaaggggaagaggcggtggcttaccgacgacggcggcagcgacggcggcacgacgacggcgcacggcgtggcggcacgaaggcggcggtgcggcggcgcgagggcggtgcgacgacggcgcacggcgcggcggtacgaaggcggcggcgcagcgcggtggaggggaagggggaaaaaggaggggaaggaggggggtggtgtgggatggaagggcgaccggggagggggggtttatagggcgcgggggaggggcggacggcgcgcggcgcgtggggcgcgagacgatgggacgtcgacggcgatggatggcgacagcggtggcgcgcggctcggggcgggacgcgacgggcggcgcggcggcacgggatgggcgcgtggcgcggggcggggctcaaggcgtcggcggcatgcgcggcgcggcagtgggacgggcgacggcgacggcgtagtagcggcgatgggacggcgacgcggcgacgggacagcgcggggcttggcgcgcggcgatgggacgggtgcgcagcggggcaggggcgcggggcgcggcagcggtgatggtgacggcgcgcggcggcaggcggcgatggcgacggcgacggcgtcggacggcgacggcgtcggacggcgacgcgacgggcggcggtggcgcggggcgcaaggccggctagggcgccgtggtgagagaggacggggaagggctaggagaccacatcgaacacctatgccgtaatgaacagtgacttttcctatttatcccgattttagcccattttctatttaaatatagccctataaattctaatttttgcataaatgaagtttactcaatatgtgtattatcccaaccaatggatccactctagattaattgtacccatattttatttttatataatttacttgattttaattagagttaattctcattccgtcgtatttagatttacttgatacaaatatgatcgcgataatattttattcatttctatcctcacctcaacctttattttaaattgtattccaattatttatttagcccaattaatttttttagggtttattcctaattagttattctttattcacgattaatgaacttcaaaatcaaatccaaataaaatagacgaataagatcagcatgatgcaattaatttaaaagttttcgaaggcccgtatttttagagttttgtttttattggtcaaattttcagggtgttacacgggctcaccattgcaggaggaatggtcggctggggatcattggaccgatgtgcggccatgcgttcatcaaccttccttgccacctcctcttgcatgctgagctcgtagctcgatactctaaactcaaaatctgcaatcttcgcctcggtatctctcttgctcctcatccgactcctgtacgtgtggatgtcctccttgaacccaatcttccaaggaatcacccctttccctcgtgttcgtcctggatgctctggagtctgcagggcgagcagctcgtccctctctctatccggtcggaacgtgccatgagaagaggcttccactgcgtctgttagtcgacgcgcagcctctcatatctgatcgccgaagaccagtgagccatcagctgggttgagcgttccaccgtgagcatagtaccagaacttcgatcgttccggccaattagcggtggccggttcgatacccctctcaagcaagctagcctccatctcctcccacttcggcatcgagacgctatagccgcctgaccccaagtggtgatggtacttcttcttggcggcattttctttgtttctttccatcatcgcctgcccttgttcacctgtcttatatgcaacgaactcgtcccagtgatcccttagctttgggaatgtgtcgaagttcggtgtctgccccttcaggatatatttcttgtacaactctcccttgaagctctgaaactgttctaccattttcttcagagtccaccttttcactttgtcctctgtacccgcgggaagggtgaatgtctcgagcattgtggtccacagcatctctttctccgaatctgggacaaagctctcatgatctccgcgtgcccttgttcttcgccagtacaccgtactgacaggcaagttatcccgcacaacccaaccgctgtgacgtacatagttcttggcggcttctgccggggcactaggtcgtccatcttcttccacttccgttatgatgtgccgaccctcaagcttcttcgcggcacctcgttgcccgcgtgccctcttctgtccaacggagggttgacttccactagcctcctcctcctggttcccctccacatccctttccacgtgcccctcctggttcccctccgcatccctctccacgttcccttcctcgttcaaatactggtttggatcctcgttcccctcttcttcgttccagtactggctgcttccctccacgattgaatcgtacaatatctgttcctcatcgcgatcagccatctgttcatacaggaaacatctgctaagtcatgagacatttatgttttaacaatcttatattaaaactcaaataatcttatatgctaagactaaacgaacagtcatgtatgctaagtgtaactgtcgtatattagaaccctacacaatcttagaagctaagtctaattacaaatctaataatcttatactaaaactcaaatagtgatgatatatgctaagactaggtgacgtatattataggaccctagctagtcaataattatatactaagtctaattacaaatataataatcttatattaaaactcaaataatcttatatgctaagactaaaatagtcatgtatgctaagtgtaactgtcatatattagaaccctacacaatcttacatgctaagtctaattacaaatctaataatcttatactaaaactcaaatagtgatgatatatgctaagtctaggtgacgtatattataggaccctagctagtcaataattatatactaagtctaattacaaatataataatcttatattaaaactcaaataatcttatatgctaagacaaaaatagccatgtatgctaagtgtaactatcgtatattagaaccctacacaatcttacatgctaagtctaattacaaatctaataatcttatactaaaactcaaatagtgatatatatgctaagtctaggtgacgtatattataggaccctagctagtcaataattatatactaagtctaattacaaatataataatcttaattgcattacaaatataacaatcatatatatatatatatatatatatataggaaaatggttctatactcctagggagtacgtactccctctcccatccaccgttcatctgatcgatcagatatgtactccctccctcatcataacgggtttggctcggtggatccgattagtttttctaattaaaagaccggactgcttatcccgtaatttggggtttgctcccaacaggccaaacacgatggaacaactgccacgtattacggtgccatcgaggacatatgggaacttgactatggtcctctcaaggttcctctgttccggtgccaatgggttaggttgactggtggaggcgtaatgattgatgacagtgggatgacaactgttgaccttaacaaggttcgatactcggacgaaccttttgtccttgccaatgatgtaacgcaagtctttttcgtgaaggacatgtctagcaaaggaaagaagggcagagggcctgatgagcctaagcgtcaagtggttctcccaggcaaaagaaaaatcgtcggagttgaggacaagactgacgaggattacgatcagttggatgggcaaccccctttcacggtgacgattgaccctagcatcctcctatcaaatgaagacaccccttactcacgcagcgatcacaaggagggaacaatagtgaggagaaagtacgtgccgtaattattgtgtacacgatgtaaactattttggatgtattgattatccatataaatcaattgatgtatggcatatgttaattacgcatgattattagaggttttaacaagtttaaatcatgtatatgctagttatatgcgatacttacaatttttaaaagttttaaatcacgcaggtggcaatttcatatgttaattagagtttttaacatttaatttactatcattcatatgctaattataattgactagagaattttttaaagtttcaaatcatgcatgtggcatttacatatgttaattagagtttttcacaatttaatttactatcattcatatgctaattatatatgactattcgaatttttaaaatttttaaatcatgcatgtggcatttacatatgttaattagagtttttcacaatttaatttaatataattgctatgctaagtatatatgatgattacaatttttattaattttaaatcataccgtatgtatatacatatgttaattagagtttttaccaatttaataatatcattcatatgctaagtatatatgattattagaatttttaataattttaaatcatatatttgcttattacgttttatccacttaatttattacagacaacaataatttttcgaagtaattgtcattaatctttgtactttaaataattgtaatgcattatcttctattttagaaacacatatgtaatggataataatatttagtgcgcttatcagtagtctcggttcttaaccctaaccgggtttaaaaagaatttgaaaatagcgggaaaatatctttagtcccggttgatgacaacaaccgggactaaagatat

SEQ ID NO: 12116 - DNA, 3454 bp, Oryza sativa
cctcgtcacgacacgacgccgcgccacgacgacgccgcgccacgagacgccacgacgccgcacgccgccgccgcgccacgccgatgccgcgcgcggcgccacgccgccgccgccccgccccgccgccgctccgctgccgccacaccgagaacgtgaacgagcgaacgaacgtgaacgagaacaaggtgaatgaatgtgaacgagaacgagcgaatgaacgtgaacgagccaacgaacgtgaatgagaacgagcgaacgaacgtgaacgagaacaaggtgaatgaacgtgaacaagaacgagcgaacgaacgtgaacgagccaacgaacgtgaatgagaacgagagaacgaatgtgaacgagaacaaggtgaatgaacgtgaacgagaacgttgtcggacgaacatgaacgagccaacgaacgtgaacgtgaaatgcaattataggcaggttaatgaacgtgaacgaacaaacgtaggtgaatgaaacgtgaccttaacgagaacgcgaacgtgaacgatatcgtgaacgaaacatgaacgtcaaatgcaatatatgttacttcgcgtttatccttatacatctttttgtatcttgtagaaagacgttgtcggagtcgtccctcaagccggagtggtagagctagccctcgaaggaattcgcccaggcaagtgacataatatatatatatatatatatatatataggaaggctattatgtactcccgggagtacatactccctaccctcataccgttgattacctttgagatttgtacctgataacgggttagcagtgaaggggacgtgcggtatctacccattagtggatcgtggatggcattttgttttaaaaattgaattaattgactgctcgtgtataactaatccctgaagaatcggtctgtacgcaggtagtgggcggtgaggaatggtatttaaatcatcaaaccacatactgcttcatttgttcagggctgcaggaacttggtttggacctccgtagtccagctcgaggatacgccgccgcgcggcggtgctgatttaggatggataaacaagtgaagaaccacagaccttctgatggtacggatggatcaaggtatgttgttctgtttcagtgatttatttcagtatgtgccgctggttttttttctttgaatttcgccgtgtgaacttgagcgattctaaatcatcaattcagggaaattcttatggacgagcgcaaccctaccatggacatagtagatggtattagtcaatctgtccatgattcacaaccggatggtggtcagtcaaggttggatcgtagcttccgtgaatttaaaactctgtaaatggtagccagatactgacacatcttgattgtgttatgaagccgtgtagcaatggaggaggacgtgccgtcgcgggttggctcacatgattcagggcatggaattccagagacaaggtatgtgcatggctaggtgtcagctgagcattcactttaaagcagtatatactacatagaaatgttcagtatgtgtcacatgagaaagttcagtatatgctatcttctaggaaagttcagtatgtatcacatagaaaagttcagtatgtgctatattgcataggagttcagtatgttgcacagaaaattcagaacatactatatgctgtcgtataacaaagttcagtacatagcctcccatagaaaaatttagtatatatgtgaaaaattcagtaaatactggtgcgtatcaaagttcatactacgaatcactatggaaagatttagtatacatgtggaaaatgcagtatatgctatcgtctagagaaattcagtacgtaacccatagaaaaattcagtacatactatcattcaacataaatcagaaagaacccctccattttaaaaaatgagtatatacaatcatctaacaaagttcagaacaaagctccccatatttttttgttagtagtacaacatatattttttttaaatttgcagtaagtactgattataaattaggttgttttttgtaaactacattttcagttagtagtagtatatgctatttttaaatatagtgtctccaatacagaaatttggtcccttcactggattggacagaaggaaacccatatgaaaaagaaggagctgggataccgatggaaaggtttgtatcagcatgttacggatttttacgattttttttgagccaggatattggtggtattttatgaaaactgattgtacattttcttttcagaatggtggtagataatgttgatagcagtgctgtcatacctcctgagtatgctgatcctcaaattcttactccgatgctgggacaaagatttaagactgagagggatgcctataatttttataatgtttatgctgttagtaaaggatttgggatacgactggacaaagatcgcaagaatactaaaaatcagagaacaatgcggcaaatatgttgttctcaccaggtacatacattatgtaacaatatcttagtagcagaaatttacctaaataaagacttgacgtactatgtgttaatttcaaaatcttttatgcaggggaggaacccaaaaaccaagaagccttccgttcgaattgggtgcccagcaatgatgaagataaataggtctagagctggtagtggctggtcagtaacaaaggttgtttctgcgcacaaccatcctatgaaaaaaagtgtaggagttattaagaattatcagtcgcacaatcaaatagatgaggggactcgtggtattattgaagagatggtagacagtagtatgagtcttacaaatatgtatggtatgttgtctgggatgcatggcggaccttccatggttccattcacgagaaaagctatggataggctagcttatgcaattaggcgggatgagagcagcgatgacatgcaaaaaacacttgatgtcttgaaggatttgcaaaaaaggagcaagaatttcttttatagtatacaagttgacgaggcttgccgtgtgaagaacatattttggtctcatgctgtgtccagattgaactttgagcattttggtgatgtcatcacatttgatactacctacaaaacaaacaagtataatatgccctttgcaccatttgttggtgtaaacaatcactttcagagcaccttctttggttgtgccctgcttagagaagagactgaagaatcatttacatggttattcaatacattcaaagagtgcatgaatgggaaggttcctattggaatattaacaggtatgtgagtatttggccgaatttataatttggaatgaattcgttatactttacttattttaagtatatgatgggttattcattggatgcttattattgtccttaattttgcagacaattgtccttccatggcagctgccattagaacagtatttcccaatacaatccatcgtgtgtgcaagtggcatgta

SEQ ID NO: 12117 - DNA, 3013 bp, Oryza sativa
tgtgaccggacagttccacgtacgtctaacgaagagaagtgtgattccaggaattttattaaatttttaccgccatcaatggctctagatgggatctttgaaccagagcataagtttaggggagatagctctggcacatgggggttgttttctattggttccttcatcaactgaacagcatgtatatcggaaattagctaaattttgcagccagaaataggcatattacagccagggtatagtacatacctggagtttcccataacgagggaaggggaatcctgggttatgtttactaactacatcttgttgaatcatcctagcaatttgatcatcctcaaactgagaaatgtgacatgttttaacacatgtgatcccaaccttccggaactggagatttctcaaatattttacctgcaaaaatgattcacaatgacaatatgtgtgttgattgtatgctgcattaacaagtcagttttaaatgctaaccattagaaagatgatacacccgttaatggatagttgagccttattcggaaagtaggtgggcattgattctgctgctttcttcacctcatctacaacgaattgggaccagttgtactgttttatattgtcaacatcagaaacaaccataatatacctaggagatatgaagtttgcgcaggattgcggtgccaaaagcttcgttgtgacataaagcacaaaagccgccatgaaaaccctcttttcatctattgtcatgggataaccatactgcttctttaggattctctctaagagtgatattttcatgtgtgaaaagtttggtatctcaaatatttcgcacaatatttgtttcttcccatccaattcatcttgagagcaagggataataggttgacctgagcatggcaagccaaaaactgcattcacatcattaggaccgaatggcaactcctggttgacatctttaacaatagcgcatgatttcggatcaactttgctcagtagccatgcaccaaactgcctgtttaccttagtaagcttgatatccaaaagtccatcaaacccaacttcaccaatcaactccttcttcctatcatcgaattctttaatgatattcactacgcatttgggctgacacctgcagttgataccaaaggtagtgttgtctttcttctgtctatttaaaactctgctttgccgatacctggataccacccgtgcagcagtcttatttaggctgccccttgtgccagaaaccttcaaagcctgcagataattagttttttcatttcataaatagacaatactacatggaccagtgtatttaaaaattcaacatatacttctgtttttaaaaaaaaacagcatacactcatatatgtatggaaagatgaagtacaaaatactgcgtagcaaattctacctatgtgtaccctcttaattaaaaaaaaatcatgtgcactgaaagaaaagtcagaatatgcaaagtttacagaatattactgtgtgtaaaaaatcagcatatacctctctatgtaaaagtgcaggatatacttcttcgtaacaagggtccagtatagtaaaccactatggaaaagcctctgttatatgtggaaaaatgcagtatatgctatcttctagaaaagttcagtatgtaccacatacaaaattcagtacatactatatgctgtcgtataacaaagctcagtacaaagcctcccatagaaaaattcagtatatctgtgaaaaattcagtaatactggtgcgtatcaaagttcagtctatgaatcactgtggaaagattcagtatagatgtggaaaatgcagtatatgctatcgtccaacaaagtagagaataaagctccccacataaaaattcagtatatactattgcctaacagagagttcagtaagaaccctgccacaccaaaaatcaatacttaataccgtctagcagattccaaaaagtttccctccaaagaaaaaatgagtatataccgttgaaaattcagtacgtactaccatctacatttttctttatgggggtgggggctaaaacaacattaacttcatccacccaaaaaaccatcatatgcactaaaaggggaaaaattagcatctgaaactgagagagtacatgaaccgaactacacctaatccctctctacaggcatacatgtattcaatttcaggtggcataccttggactgtggtgacaaactaattttcctgtgaccctgcggcaaagaagaaaattttaggcaacgtgtcttgatcttgccgtacaaaaataaacgaatactaacctgctgctttggatgaaatccactgctgctttggatgaaatccactgctatggcccatcgattttgccattgttgccccgctcctgcattcagccgactctagatcgattacttctgcttcaggaacacatgctgttgagagaggatccatcgctggaggaaggggaggagtcatcactggaggaaggaacgaactgctatctctgtactgccgccagccacacagtcgccgctgaatcgctggtccgtcgccgcgccgccccccaaaaccccgaaagctgaatcgctggtccgtcgtcgcgcaggtccgtcgccgcgccgccccccaaaaccccaattttcgggataatctgtttggcctgttgggagcaaaccccaaattacgggataagcagtccggtcttttaattagaaaaactaatcggatccaccgagccaaacccgttatgatgagggagggagtacatatctgatcgatcagatgaacggtggatgggagagggagtacgtactccctaggagtatagaaccattttcatatatatatatatatatatatatatatatatatatatatatatattaaatttgtttggtgctccatggtgcccgggcaccattgttgaaattgagtatatacccaattcaaatgagtatgaaacttttttaattactttggtattaatattaactactttactaactagttcaaagcaac

SEQ ID NO: 12118 - DNA, 1134 bp, Oryza sativa
aaatacaggtatcccatatccttgggcaagtcgacagaggcagcaaccttactatcattgaatattacccacctcccgtctttgaggacatgggcaacgtagtgcccacaatgggtagaggtgcccatatggctcacaaacgccatcaatttgtatcctgcagagcatagagcaatgttaataaaccaagaactgcaaaacacacacacatactgaagatagataatcaaccatctagaagtattgaacccaatggtttggaaacacctacagtctgagacaagtttggagcttacttttatatggtttggctaatcattcactaccatggatttctttacatatatcttaaaagaaaaaaaaattaaaaaagtaagttttcttggaaacttagatgggacatgggtcatataattgtaaatccacatccatttcttgacgataatgtgccatcgttattcagaaatgctcagggcatgtacaaagtcatctttcaaatgttgcaaactacaaattcaacattaacagttcagaatgttaatgaaattagctcatgagattggaagcttggcactagaaacagtaaaacagaaggggtagaaaaacttactgccacttccatctggtatgtgtgcatcatcatcttccatattgcttgttgaagaatcagtaggtactgagctaaaagcctcagggtggctaaaaatccagtctgttgctctctcgatatttccaccctatcacattagaagtacaaaacataagcctccgatcaaaaaggttggttgcagacaacgggaaaggaacaccctaagacagttttgaaaggtcattatatgaaaataagcaaatatcaactttctgagaggtattcaacattgcgaactgtacaagaaaatgtaaaagatcaactatcatggatgaaattaaaaacagaagattattacagaagctgccaaggcctttcgagcaacatcttcttgaaatccgaaggaaacaagagtttgaacgctagtttcatcaacagtttgttcagcagcctgtgaatctttagatattggatcgttgatatctgtatagcagaaaggtgattaaagtttgtagcggtcaagttacaaattagggctgcaggaa

SEQ ID NO: 12119 - DNA, 669 bp, Oryza sativa
ttagtttagcgcaagttcatgtacaaacacaacaaatccttcaaattatcgaaaaataggtatttcgcataccaatgagaggataattaggcctgagcggccggtttgcatcaagagatttgagcaccgagctatcggatcccctggagaaacaatggcagcaggggcaaggccaactttcttggtcaaatcggagaaatggtgcggaaacgcgtgcgcctccacagcctgcatcgaggtgagctcctcgctggccccgtcgacgaacaagaacgtgaatgctctgttcctgcaagtctcagaaggattcgatccatgatgcatcggtaaaaaaaaacccgcagagacacattaagctgttcgatgcggatgggcgaacctgaagtcggcgttcttggaggcgaagatggagaggaactggttgacggagatgccgagctgcagatcccaccacgggacgaggaactccagcttgttgtgcttcttcctgcacacctgcgcctgcacgatcctcaggttgctcggcaccgtcctcccacctcctgcgagcaaatacaaaaaaaacaatctcgttagagatcgaaggaatgatgtggaagcggatgttgggatgagttcgttcgatctgcgtttcttacgggcgcaggggaaccagtggtcgatgtccca

SEQ ID NO: 12120 - DNA, 553 bp, Oryza sativa
tttcaaaaagcagaatatatttttttcctgatagagcattatgtataattcactttctccggtatgacatgattttcacagaaagtgcaacatgagttgctaactcaatacgcaagtcagctcctggagaaggagcattctggatgccatgcattgcttcgtgatgacaaggtttcttggagaagctccacgtctctcaacagtttatcaggaacaaatgaagtctgctaacatagcatcttctgttttactccaggttgatgatctctctagaatgtacaggctcttttccagaataactcgtggtttagaacctgtttctcaaatatttaagcaggtattttgtttttcagaagagagtggtttatttcttaaatctattttgatgatgtaatggaatgttgcttctgtgtagcatgttactaatgagggcactgccttagtgaagcaagccgaagatgctgctagtaataagaaggtgcacagtctatatattaacttttgtttgtattaatgttgtcttagtacattcatcttattgtgtacttggggt

SEQ ID NO: 12121 - DNA, 648 bp, Oryza sativa
ccagtgattagcagtagattagaggtattttccacttacttggaatggactctttgaataccaagtggatgtcgcagtggggtgatttggacaggaaggccgcctgccccatgtactgcagcaccaagcacgggtagatgagccccacgaacgcaacctgtcaacaagtgtacgtacgtacgtgtcaaacaaatgtcaagatatttaacctgctcttaaaatcaatctgcattatattaaacgagacgcagtactgcactatcagtgctctgacagcaagcataaacagacacatatacccttatggatgcagctgtgaagtggccaagatccccatacatgggtttggtccctgcacatacatacatatatatattattataaaatatgtagttgatgagtcgcagtgcaacgagcaaaataaggtttgtttgcctgtcatggagaggagaatttccccgagggagatccagccgtccttgccggtgtgctggaagaacctgacgaggtattaaggggagagggcgcgcagcacccttgggttccacaccacgatgttgtagacgccgagcgcccccaggaggaggagccagacgatgaccaccggcgcgaacaggaaacccccccctgtgcgtgccccagtgctgg

SEQ ID NO: 12122 - DNA, 707 bp, Oryza sativa
ccgttgagactgatgacacgtctactatagggcgaattccagctcggtaccctatccgattacgaagtcttgagttttcccgactgaacttttccggtctgcctgccattcaactgcgtaatctggctcgttatgctggcatggcgtcggtaaaatatatcgctcgaatgccacagcagagaaagcttgctgtacttactgcattcgttaaagcacaggaaataacggcattagacgatgccgttgatgtgcttgatatgctaattctggacattatccgcgaagcaaagaaaaccgggcaaaaaaaaagactcaggacactgaaagatcttgatcaggccgcattgttactggcgcgggcatgtgcattgttgctggatgataatacagatgtcccagatctcaggcaggttatcttcaagtgcgtacccaaaaacagactggcagaatctgtaagcaaggttaatgaacttgctcgtccacagaacaataatttccatgacgaaatggttgagcagtacggtcgggttaaacgttttcttccggcggtgttgcgggacctgcatttccgtgcggacccgcaagtggacatgtcctggctggattcatattctgcaaaactgattggtcgaaaaacgccatcttgatatgcgcctgacatataaaaccgtcctgtgaacccttgtatacaagccgagtacggatcc

SEQ ID NO: 12123 - DNA, 701 bp, Oryza sativa
agcagtgtcattctgcagcaagaaccaagtgtcaaattttacaaggtcgtacaatttgatccagcaggaaacaaaaaatgttctgcacgtggtgtaccttgatggacgaatgatcccactaacattatccaatatcggcaacttcactcttccccctcgatagatcctcaaatgcctcagaaatgcctttcagaaaaataaaaacagcaaataagcacatctagagctcatttgtgaacccactatttacagctttttacacagcaattttacccagagtaaaaaaaaaaactaatgtggttaaaaatcatgctactgttcaaaacagctagtagatcattgctgcagagctgagacaaaggaggggaaattccagtggtggattggtccaacctctgtcatgttgcaaatgaagtttgggatggttggcagcgccctgctcccgacatgcacgtatgcgtccactgtcagatcctcgtacctcacttcgatcttggggaactctatctgcactctgcaaccaacaaaaataaaaaaaaatggagagcagcacagatgcttcagatcagcccatgacaagtttaccaacactacaagcatacaaacaaaattctacaccaaaatccaaaccaaccagaggagacgagcgatttacagatcctacaagccgtagctgaaattgtttcgtaaaattacagcaa

SEQ ID NO: 12124 - DNA, 1389 bp, Oryza sativa
tgatgaatcccctaatgattttgatcaaaatcattaagttaaggtagatacacatcttgtcatatgatcaaatggtttcgccaaaaatcaataatcagacaacaaaatgtgcgaactcgatattttacacgactctctttaccaattctgccccgaattacacttaaaacgactcaacagcttaacgttggcttgccacgccttacttgactgtaaaactctcactcttaccgaacttggccgtaacctgccaaccaaagcgagaacaaaacataacatcaaacgaatcgaccgattgttaggtaatcgtcacctccacaaagagcgactcgctgtataccgttggcatgctagctttatctgttcgggcaatacgatgcccattgtacttgttgactggtctgatatccgtgagcaaaaacggcttatggtattgcgagcttcagtcgcactacacggtcgttctgttactctttatgagaaagcgttcccgctttcagagcaatgttcaaagaaagctcatgaccaatttctagccgaccttgcgagcattctaccgagtaacaccacaccgctcattgtcagtgatgctggctttaaagtgccatggtataaatccgttgagaagctgggttggtactggttaagtcgagtaagaggaaaagtacaatatgcagacctaggagcggaaaactggaaacctatcagcaacttacatgatatgtcatctagtcactcaaagactttaggctataagaggctgactaaaagcaatccaatctcatgccaaattctattgtataaatctcgctctaaaggccgaaaaaatcagcgctcgacacggactcattgtcaccacccgtcacctaaaatctactcagcgtcggcaaaggagccatggattctagcaactaacttacctgttgaaattcgaacacccaaacaacttgttaatatctattcgaagcgaatgcagattgaagaaaccttccgagacttgaaaagtcctgcctacggactaggcctacgccatagccgaacgagcagctcagagcgttttgatatcatgctgctaatcgccctgatgcttcaactaacatgttggcttgcgggcgttcatgctcagaaacaaggttgggacaagcacttccaggctaacacagtcagaaatcgaaacgtactctcaacagttcgcttaggcatggaagttttgcggcattctggctacacaataacaagggaagacttactcgtggctgcaaccctactagctcaaaatttattcacacatggttacgctttggggaaattatgaggggatctctcagggtcgtgctcgtgcttgcccgtagacaaccgtgccatgccagcacaacccacaggccagtg

SEQ ID NO: 12125 - DNA, 574 bp, Oryza sativa
agaggccagatccttactatctccagaacagtcagcatcaacatttgccaatcagcggccgctcggaacaggaaagtatcaggaacagaagctggatccagctcataaaagccacagagtttgccaccgttttcttttgtcagccggaaagaaggtatcaggtgagaaaaccttatgttttcatttgtaggtatctccagagtgccccttacactgtcaggcttgaacacagctctgtagccatctactcgggtcaaaagtaagacttttgtgctagcttcagtgcagtcagtaatttcaccaattgtgtactcgaaagtatccttgctggaaggaacccaaccaggtgcccaattattgtagatggcccaaatttcccctacttgtggatgaatttcaaagtatcgtttccaaccaacttggctagtttctactaaatgagagaaagcatcattcgtgtctaactttatcctccagttgcggattttaaaagtcccacagctcacaggaatattctgctctaaccacatattctcctgctccagctgagggcagacttcgagccaagtcaaat

SEQ ID NO: 12126 - DNA, 602 bp, Oryza sativa
tacgcatgcatgcgtccatgccatctccttcatctgctcgatcgatcactctcagatagattgattgattttactatctcgatcgagttggtcgccaattcgccatggccagcagcctcattaaccttcttctcacggaggtggccggcatcgtcagcattgttctcctcccccttcttgtggggctaaattcttaccgccgccgttccggccacccggggctccgcttttttttttgggcggcctcacaccttttcttcccgttgtgttcttacgcgtgttccgccgccgccaattggaacgccgcgcgcgtcccgttcttcttcgcttgaaccggtttcctccaaatgctgcgcaacaccatgaacaccgcccgttcgtccccgtcacacaatcggaaacggcagcggcagcagcaagttcaggccctccgtcaaccacctggcaagaatggcctgggtggcgttcctaattgacagcagcaacggcaccgccggaagcccacagctcaccggggtgctcctggggctgtgggtgctcaccctcgccaagctcgtccaccgcctcgttgccgccgagctcgccaagaactcgttcgccgt

SEQ ID NO: 12127 - DNA, 1271 bp, Oryza sativa
gggccccacacggcacccgcggggcgcgccggaagccggccacgccggcacagccaccgggagtcggcgcgcccgcgtccctatggtcgccggcggcggccataggtacggcggagcggcggccgagataggggagggaaggggcaaacgaatcggcggtccacggctcaccccgggtcgacggcgacgacgggaccggcgaccggagcgtagaaaggcggcggcgcggctcgggtgaacggggtcgacggtgctccggcggtcggcgtgcgaaacggaggggtggacgaggtcgccggggatgcggtgaagccgaaggtggcgacgccgaagcgggagaaggtccgggtcgacgacggcggcagaccggagctcggctgtgacggcggagagagagaccgacggcgcgagctcgattccggcggagatagagagagcgccgagtggcgaaaacggtggaggaaggcacggggagtgtttatatagggttgggagtgagcgaggccggccggatgagggggaaacgggcgcggaagatccggccgccattgatgcgccggcgaggtttagggggaaagattccgaacgaatccgagggagagagggagggaaaaatgggggggaaagagggagggaatcacggggaatatttcccccctcttgattgcacgcggggcggacgggagcggcggtatttgcgccggcggcggcgctagggcacggacgagccggcgggaacggcgggaggaaggggatgacgggtgggccccacccgtcagcgtgggaggcgggcgggcccgcccgtcagcggcacgcgcgcggggaggaggccgaatgggccgcggggagaggagagggagggggagggagctgggccggaccggcccaagagggagagggggagggaaagggaacttttttagggtttttctttttataaaacctttttaactttgtttatttcttcttaattattatttgtgctctgaaaattcaagtaaaatttgagggctccttttagacgaaggagaatttaacaaaaattctccgggccacattcgaatttttctggtacgtattttagtgtttgccaatttctttttgaattttaatttaattctattattccttttagggaatgatttttatttcgggatgaatttatcaggacgtgacatgactccgccgatctttagccccggttcataccaccacccgggactaaagtcccacccctatatatatatgtcttcttcctcctccagcccgag

SEQ ID NO: 12128 - DNA, 691 bp, Oryza sativa
ctgcaaattacaagtacaaggaaaattactttttctcatctggagttgacaaaaatttaaataaatgtaattcagtgctggagaaaaaaaaaatcatatgatcatctaaacagatgcagaaaaagcatttgacacaagtcaacattcttataaaaactttcaacaaattaggtatagcaggaatacttctcaatataataaaggttatatatgacaagaccacagcttacatcatacccaatgatgaaaagctgaaggctctttcctctaagaccagaaacaagacagggatgctcactctcaccactgctattcatcttagtgctggaggtcccagccggagcaattagacaagaaaaagaaaatgcattcaaattggaaaggaagttatgaaactgtctctgttttcacatgacatatatcttatatacagaaaattctaaagactctaaaaagactgttaaaactaacaaatgaattccgtaaagttgcaggatacaaaatcaacatgcaaaaatcagttgtttttctacacactaacaaggaactatccaaaaaagaaatttagaaaaccatactatttacaatagcatcaaaaataataaaatacttcggaatagatttaacaaaagaagtgaaacatttgtacactgagaactgtgtaagtcattgatgaaaggaattaaaacac

SEQ ID NO: 12129 - DNA, 704 bp, Oryza sativa
ttgaaagattacagaccaataagcctttgtaatgtgatttacaaggtgattgctaagtgtttggtgaataggatgcggccgttacttcaggatgttatcgtgccagcgcaaagcgccttcattcccggccagatgttcactgacaatgctctcatagcttttgagtgcttccatgccatcaatcggtgtaaatcggttgagtctcaattctgtgcttacaagttggaccttacaaaggcgtatgatagggtggattggagatacctagagggagctcttcttaaggttggtttttgttctcaatgggttcagctattgatgacatgtgttacctctgttagctatgctgttcgcttcaacggatctatgcttgaatccttcaaaccgaccagaggcctccgacagggtgatcccctgtcgccctatttgttcctctttgtggcagacggtttatcaacggcgctgagtgaagctgaaagatcaggacggttacaacctctaaaagtctgcaggagagcccctggaatttcccatctcttgtttgcagatgatagcctgttgttctttaaatcaaatatggaacagactaatgtggttaagagtgctcttactttgtatgagcaaagcacaggccaactcctgagcccggccaaatgttctttgatgtttggaaagcattgtggggatgctctgcagtctgacat

SEQ ID NO: 12130 - DNA, 597 bp, Oryza sativa
ttccttaactggcattctaagctataaattaggagcaagtttgaatacagcaccttctttttttttttgtttttatgatgttttaccatttgattataacttttcagggcttagaccagcttagatctgggtttctccaacagaaatcttttatgcagtctccccaaccattgcaccatctacaatttctcactccacaacaacagcagcttctgcttcaagcacaacaaaatatgacatcttcacctggagagatggacagcagaaggcttcggatgcttttgagtagccgaaacattgttcctgggagggatggtcaatcaaatgcctacacggaagttattcctagtgttggcccttcattgcaaaatatgtgctcacctgtgcagcgcatggagacagatatgctgatgaaggtaagtttcacttgtatgttttactatattcatgcatttatttatttgcgaggatacattggatgtaagtaatagtaccttgtaaaccaccgggttatgcataattttgttctcaattgatatcttatatgtacatagattatattgtttaattcttgtcagtgatcagtaatagaatttc

SEQ ID NO: 12131 - DNA, 612 bp, Oryza sativa
tttttcgtttcaatttgttatcaatatatattagattgatttctaatctcagattaatttcttactattttttgttgttgttcgcatataactacgcggcactattgaggcgattgatgctggtcatggactcgaggcgtctcagtttccggtcgatcggccgcgagtccactccgccggcttgtcctcgccaccgccattgctgattgcaacaacgacttcaccaccggcctgcctccgtcgccgccgactggtgttcccgtctgcatggctggcctattatgccgccgctgttgggcgtctacgacttcaccgccggcttgcctccgtcgccgctgagtggtgcctccgcctacacggctggcctattaagccgccgctgttgggcgtccacgacttcaccaccggcttgcatccgtcgccgccgagtggtgcctccgcctacacggctggcctattatgccgccgctgttgggcgtctacgacttcaccgccggtctgcctccgtcgccgccgattggtgcctccgcctacacggctggcctattatgccgccgctgttgggcgtctacgacttcaccgccggcctgcctccgtcgccgccgactggtg

SEQ ID NO: 12132 - DNA, 1332 bp, Oryza sativa
cgcagaagccggcgaccatgccggcgacgacgccgaggaagtcgtggcggaagccgaagtggtcccggaggaagtcgacggcggtggtggtggtgatgccgtcggcgagcagcagcggctgatccaggtcgccgaactgggaggttagcaggccgtacagggtccatgacaccgggttggcccagtaataccacctccaccacgcaggaatcctctgcattatgtttaagcccattaatcattagccactttaatcacgtcctaatttaaacaaaccattattgcttcccaattgctaaagtggttctagtacatgacaagtggtcactgtaggacaaaaaaagttactggtgggtttggtgaaattattaggggcactggtatatcagggcactcatgctccattatagtacaatgttaatagaaactaaaaactactatgcaacatagcagcattttagatgatgtgctaaggaattataaagaaaaaagagtgtctcggatgagacattgcatatatattcaaaccaggaaaatagatatctcctctaagaatttctgatgaaatttgcgaagggagataattcatttttggccccagtaataaataatatgcattggaaacactatttccatagctatatatgttaatgtgacaaaaaaaaataaagatatggataatgtgcactggaagtggccttatggattggaaacactatttccatagctatatatgctaatgtgacaaaaaaaataaagatatggataatgtgcactggaatatggattatggggaaaacagatcatgggtccagtacaattagaggacgttaggtgcaaattatgcatggggttcctgttccttccgtacctttcttgggatcatgaacccacagaagagattccacagcgtgtagaatggagcagcaataataggcgcaacagtgtggttgggagtgatcgccgttgtcatcatgccatagaaagtgaagtacagcaaggtgaagtacatgaagaacaggtaccacaagaacttcactgctgtccactcgaacgagcccaagctgtagaaaatcgtgccgtagataagtgactgcacaagaatgtaagggaactccactgtaacctgcatgccgaagaacagttcgattgttagccttattatggtactactacgagcatcaaaacatgatgagatgacaggagtttttgacagggaaaattaccagggagaatgcaaaaggcagtgccgagtacatcccagctgccctctctctgtacgagacaaatctttcgatggaaatcacaggttgaacagaggtggcgttagtg

SEQ ID NO: 12133 - DNA, 772 bp, Oryza sativa
  unsure (1)..(772): unsure at all n locations
aaggctgaancctnactgtatagagacactatagaatactcaagctngacttgtattcttgttttcgtcgattgaattctatttgcttctctgaattattccaatcaaaactaatacttgttgttctctgaataactgttcaattaatagtagagattcagtaattctttattcaagatcacggatacacatactatataacacactatgcccaaaagaagaaactaaaatcggttgtatttttcttgtcagaatcgcgagcaatcgctaggtacatctttcgcaagtacaaaccagagttcctgggactcggagaacgtggaagcctggaagagtcggcaatggtggacgtgtggctggacgtggaagcccaccagcacgaagccggcgtgaggcccatcctgtggcactagatcatcaacaagttcgaaggccgcgaccgcgacccaggcgtcgaggacgagagcgtcccgaaactggataataggctcgggagagtccaagcgaagctgtctggcttccaggtccctccccgggaaccgatctgcctcgcgggcctcaaacacttctgcaacatgcgcttctncaatgcatccgaatatccccagcngggtcgtccttacctccaccctatatattgtgtgaagcgctttctgccctcccctctgtcgctttaggattagccctccttcccccgatctgccctctcgtggtgcgacaacgctacgagccctctctttgtagctttaatttcccttagacgtcgcggtat

SEQ ID NO: 12134 - DNA, 2241 bp, Oryza sativa
  unsure (1)..(2241): unsure at all n locations
tgcatcaccatcattgtagaaccaatgtgcaacaccagctgggagtgcaacaatgtctccttgcctaaattgatgaatcttttggtgctcatctctaaacttttggctctgactttggccttgagatgaaaattgttggaattgttgctggtaagtcgcagggcaaccggggaaggttaaacccatagaacctctccctaaaaattataatgttcacataaggtacatacaacattaatttgaccatggagatcataactactagttgcatcgatagagttctcgattatatttattaggatacaaaccttggatgatgtagaccacgccaggaatatttgtgtatcgaggtaccaaaaggccttgaggctgaatgacacgtcggatcacaaaagtacccgtgcactggaataattcattcttctcatcgaagtactcagtcaccccagcttctgacctcactttccgaagtggttcaaatgcttgtagtctatcaaatctacactccctaaaacttccttgccgaggactatgccatgggtttgtgctgggattaaatagctgggccatagaaccatggcataatagaagaacacaaaagtatatagaaaaccgagagaaaacggaactcgccatagctatttgtacttgcttatggaaacttaagctaattgatgtgagttcaaagacagaccaagctagtttatatagcaataaaaaagcatcttgggatacatggtgatatagtttgttgcacgtacagacaatatatggcttgtagtgttaaaacagtacaaaaggaaaggtaactttgcaagattgaactatacatttcatgactcagccatgacaaacttctggtgcttttggagtaatacaaatggagtttgttaaagaaatgtctatccatactcttaatatgtatctttgccttgtcattatatttgtttttgcaccataaagctcttatgcttgagaagatgagtctaactttaagatgataataacttgtaagcatgttgtcatttttgcgtagcaagctatatttgataatttaggtgttccttcaaaataacaaatttgtaggtttgttttcatttacttgacaattgataagtaacttgtatttttaaatgacatacttataactntgttgtcttgtaaaatataccggacaataaagcatattggtgtatgtaatttttccatccataagccttcttgcagtttattgactatataacttgcctattgattttttaagtgttccttcaaaatagcaaatttgtagggttgttgtcatttacttgatacactacaattgataagtaacttgtatttgtaaatgacgtacttgtaactttgttgtcatgtaaaatatatcagacagtaaggcatattggtgtaagtaattttaccatgtcataagcctttttactgcttattgacccatataacttgcctatatatattatttaactatttgaaaaacacatattatgataattttacacatctgaccacggagagctgtgaggctacacgtgggcccgtgtcactcaaatccacccaggcgcacggattgcttcccgtgcacctaggacggctccccgcgtgctcccgctctatgtgaatcgtgtttgcagacgagtggacccactcgggataccgcgcgggggaccgagtacactagccttgtgcactcgtcctaggccacatcctcgtccggtccactcggtcccccgttcgtcgtagctgctccgtcgtgtgttcgctcggctgtgcccacgcagcacgctgggccacacgccgccttcagcccaaaaaggcagaagccatcccctttttcctttttctttttccatttaattcaataatactttttttctttagacagagaatcaattaatcttagaaaatccatatctcttcaactgtctgttcgattgactctgttcaacttctaaaattcctcaaaaatcgagatctattcagtggcacacttagtactcactaatacgagcttttccttggtcgttttgttgagttatctcgttccacgtgtagcttcggagccagaagagtcctagtgcgcggaatacgaggaagaagctcaagatatcaagcaaggtaggtcacctttgattattttgagcccataatttgaaactaagtatttcatttctcaaaatgcacatctctaaattacacatgaaatgttggccgcagtttgcaatataa

SEQ ID NO: 12135 - DNA, 845 bp, Oryza sativa
gggaattgtatctgattgttttgatgtttttgcagtggaatgcgatgaattctatgcgaattcgctcttcgtcgtcggcgagtttggtggcaacgactacaatgcgccgctgttgcgggaagggcctttaggaggcctacaagttcatgccggatgtcatccaggctatctccgatggcatcgaggtagaaattcaatagcttcgttgtgtcgcctatttgttagtggtcatgtggagaatgtgatttcaattatacaactgttcgtgtttggtgcagcaattgattgctgagggcgcaagggagctgattgtacccggtgtgatgcccactggatgcttccctgtctacttgaacatgctcgatgagccggccgatgggtatggcccccagagcggctgcgtccgtcggtacaacacattctcatgggtgcacaatgcacatctcaagcgcatgcttgagaagctccggcccaagcaccccaatgtgaggatcatatatggcgattactacacgcctgttatccagttcatgcttcagcccgagaagtttggtaagttcttgagctctttgatagttagctagctcaggaagcatcagttcgttcttatcctttatttcacatcggtactaaattggcttttctagcaaaataactgttttttagctcttgctgctctaatttacttgaacagatcaagtcaactgatacctagagtcaacttttcctcctgtcacccttgaaagacacaatatattatttttagatagttcagatctgggtagaggtgcataatctctctagtagcacaatgcaatccttcttattgcagtaatgatgggtca

SEQ ID NO: 12136 - DNA, 3322 bp, Oryza sativa
tcctacttcatgccatggatattccattatggactatagtggacagggccggtcctatgattttgagggccctaggcgaacccatcgcgatgggccctccaagctatatataaaatttattgatatatatagacgctaattttacttgcaaaatgaaaacaaatacatctatatattaaatttaacattcctggtaattatcaagaaataaaatcgaccaaaataacaatatatttgtaacttggaactaatataattatttattaacttaatgaagaatagaaccccgtcatatccattgcttcctatgaaaagatacttcttcgggtatttcttgatgcaaaatcataaagaacggtattaagatcaatagtgtccaagatatccttctcgattgagcacatagccaagccatttaaccttatttgcgacagttgatctcaaatagtttttcaacaacttcaattttgataaacttatttcagctgaagctaccatcataggtaaagttaagagaattcgataggcaactgaaacatttggatagaaatctgcatccataacaaacttcaaaatcttagggaaatcgaagaatctggcaaactcactttcatcacctttaattctgaataaaaatcattgatctcaacatcggatgaggtactagactactagtattaggtgttgccccccaccattatgccccccaccccaccatcatgggcccccggcggtcgcctcggctccatagggccagggccggccctgatagtggatgtggctatattcatataatttatcctataaacaagaaacaacatgtcgtgttgatttcgtgaacgacatttaaatgccactcttaaggtcttggcaagatgcgggctccgtggcggcgacgccgatctggcccggcaaggcctaggccgttggctgccgctgtccccctcgtcacaaccctcctcctgccccctgaagcccgtcgcatggctgtgtgccagtgtggaaggaggggatagagagagaagagagatgggaatctgacatgtgggcccaaggacatttcatacatttcacacgatttctccctcctcttaaaccaaaaattattattttagtgggtccagtgtccaccagcaaatatccaacttttgaaagtgtcttcaccccaaagtcactttggtgtcctgcagttaaaactgcaaagccacgatgtactgtagtaaaatttgcctttgatttttgagcccctcgtttctcttcaccacgatgttgatgaatgaggagtgctatacgcagccaagcaactttcacagagcaaaataactcgcggccgatcctaatccggagattcacttggattcagagtgatcggatggatgaagagcagaagaggatttagcgtgcgacactggattccatcggtcgaacaaatggcatgcaagacagggcaccatgactgggatgggcctaatggccggatttcatttcatgggccgcgaacttgtcccgacagaccagcccacgggtcccctgttcctactctctcccccctcccgtttttttttaaatggtccttttcaaaaaacttattgtgaaactatacagtacaagacactttaacaagaaataaaccgtgaactcagcacaaactgtctttgcgctgagattaaccagcctgagaggagtgtgtgagagaaatagaggagtggggaagggataacataagacaggaaggaaagggaagagaaaatgagaatgagatgacatgtgggtcccgcgtaaggccccatgttttttaattattttttttggttaaactgacacatgagctccacgatttttatcgaattgaattgccacgtaagcgtcatgcaaatgtcatatgggacgaagacctagtcaaaagagccacctcagctaaaaccgtaaacaataccgtcgatggacctcatttacaaatgttttaaaagttaatgggatttgcgtaatattgttcaaagtacgatttaaaaactaaaataaaagaggaggacctcgagctaacattttccggggcatttaactatttgccacttttaaatttggtatttaactatttgccacccctatctcaatgaaatgtggatccatatgtgtctatgacatatgggttcagaggcaaatagttaattgccacatctaaaagtggcaaatagttaaatatctcaacattttcctcatctaagggtgtgtttagttatttgagtgtaaagtttttggagtatacggacacacatttaaagtattaaatatagactaataacaaaacaaattacaaattccgcatgtaaactgcgagacgaatttattaagcctaattaatctatcattagcaaatgtttatgtagcatcacattgttaaatcatgacgtaattaggcttaaaagattcgtctcgcgatttacatgcaaactgtgcaattgattttttttcccacatttaataccccatatatatatatataaatatttgatgtgacgtttttggcctaaattttttctatctatttggttttagttccactaaaattgaaaatttggttgaaattggaacgatgtgacggaaaagttaaaaatttgtgtgtagaaaaattttaatgtgataaaaaagttgaaagtttgaaaaaaaagtttggaagtaaactcgcctaaacaacacagtcccagtctcacagtctgcctacattctccagtctccacttcccacctaagcggagaagcgcggggaaccgaaacccggtgatggcgcacccgcacccgcggccgctggaagacgacgacctcctcgccgagatacttctccgcctcccgccgcggccctcctccctcccgcgcgccgccgccgtctgcgcgcgctggcgccgcctcgtcaccgccgaccccgccttcctccgccgcttccgcgcccaccaccgccgcggcgcgcccctcctcggcttcttccacagccaccgggtgagcccctccttcgtctccaccatggatccccccgaccgcgtcccgcggccgtgggcgccggcgggcgcttctcgctgcggttcgacgacttccgctgcaggatcctcggctgccgcgacggcctcgtcctcgccgtcaacccagtgatgccgcggctgcgcggctgcttcctcgtgtgggaccccgtctccggcgaccagcgccgcgttgccttcccgccggagtgcgaccagggacagaccgaggtgcggaacggcgcggtgtttcgccttcccggcggcggcggcggattccgattccagatcgttctggtgggcacccgccat

SEQ ID NO: 12137 - DNA, 3469 bp, Oryza sativa
gcatgactccactcatcagggtttaaattctggtatccataaatattacgtatatataagtgagatcttaaaataaatttggcgatattaggtatataccgttgattttccgtcttttcaagcatgtgttacggcccgatcatattcatatgtgtgtaagtgtggtattgcgggtgtagagatgttgtgcgttcgtacgtctaccatcacagtgaagtcgcaagaacacagacagggaaaaccggaaaaggatagaggaggcagcgagccagccacaacctatttttgtcacgagaagaagaaagcccagccctcattgaccgttcccaaaagctgaccgttgccttcctcccctcgctgaccagtcaaaccacctcctccacttgtcacttccactcatcacctcgaacctcgagccgtgggccccacatgtcattggaacagcgtgtgtctcctcttgtcgcatttggatagtcgtcgttggtttcttgccgccttgaccccaaccaccagcgtcgtatataaatcccccctgcacaggaaagctttcgtcacgaaacaaccttgcgttgagcttagctttagctgatcgaatcgacaagagacgtaaattaagcaagcggttgattaagtgtatctgttcggccgatccattatagggattttgttccatgaaaaggggtagcaactccaatgccgaaggcgaggcgggagtaaagttcaccttcatcgagacgcagttggtcacctctgacgcggcgggtttcaagtagttcgtgcagcgcctcaccgacaaaaacgcagcagtgccggcggctccgccacagaggccgcggccgtgctgtgcagacgggtggaggggaaccgtcggcgcgagcgcgtcggtggtgaagcggaaagccgtgccgccgccggtggcgccgtgggtggattagatgatgatgctgtacgagacgtgcgacctcgccaagatgttgcgcgtcgaagtcgtcggcgcgagcggcggaggacggtgccacggcggcggcggatacggtggttttccatgctgatcgacggccggcgatgagctcagtccatcttcagttttggatgctctctgcatgttgttccattcttttttaactgagattatctgtatattgctccatgccttgttgtaccctgttttatatgtttggttgcgaccaggccatgtaattccggttctaatcatgaaactgaaaaaaaaaacaaattgatagagccgatgaatcaaaggattttggagtcacaacagggtttatactttccgaaaaggccgaaattttggtaatttcagtgggcaccaacatttcatcgatttcgaaactttttcacaaaattatggaaaagaataggaataactatagttagccatatgggccgctcggcacggcacggcctaagcctggtcaaacccagaccaagatttgtcaggcctatacatatcttacatatggttgaaaagtctatttcacatccctgaagttcgtgctgtgccgaggcataggcccaggcacagcccaacaaccatgtcgtgccggcacgggcccgacatcgatcaggccatgtcatgcttgggccaggccaaaatcccgtgccttggcccgggcctcgaccttatggccaactataggaataacaatatccatgcaatacggactagcgattagtgtagattaacaaatcctccaaacattttattgagaaaactctaaatactagtaaatacgaaagggagatgggtcctctccctcatcacctccagctataatgtggagcctggaggtgaaggcaggttttacctttccgtatttaatattaaaaccatccttgaccggtttattgtataccgacctaaaaccgataaaaactaatagctttcagtcaacatcgtaaaaataccaactaaaattgacactactggtttcgtgaaaatcgatcaatttttgtgaaaaccgctcggtggagaaggatcagacagaaactgagaccgaagtctgaagataacttttttatcaaattttttcaagactaatgcttggtagcaggagcaggtggtcttctttcccgcatcctcttcgccacttatattgttcgactcttgctaacaagacaagaaaaaaatgtacttacaattataataaatgaaattgcacaaaggattatagtaatcggtagctgagccaagcacaggaaattctcttttccgtttctgtaataagcgacgggcttagatttccaacatatgtctgattattcattataagttgttttatcattaaaaacaattcaatcgcatttataacttatatatagataccaataattttaaataaggtaaacagttatacatacctataaaaatcactccatccgtttcaggttttaagacgtttttactttggtcaaaagtcaaactgttttaaatctggttaaatttgtagaaaaaaatagtatcattttataaatttattattatatttacctataaatttagtcaaataactaaaacggaggagtaacgacattaattaccgttgctcttaccggatcggtgcgaagccgccgagaacgcagagaagaataggataaggatacagtgaacctcctcctcgcacgaggcagggagtgagccttgaccgttcccagaaaggttgaccgttgtccgtcactgaccaccaacccagtcactcactggatacgaccagtcaaaccttgtcgctaatgctaaagcttcaacccaccagtcacacatccagcgaaaaacccacaccctcacctccacgtgggccccacctaacctggaccccacatgtcattcggatagtgcaggcatctgtgccgtatgtattgcattcgcgccgccgccgccgcgcgctctgtataaaaaccccatcggcacgggaagatttcgtcaccagcaaccttgagttgagagagcttttcgtcgattcgaatcgaatcgagaagaaaaggggaaagggtcgcaactgatcgagctgatctcatcggtcgatcggattcgattccatggagaggggttgcaatggcaatggcggcgtgaaggtgaccttcatcgagacgcagttcgtcacctccgacgccgccgggttcaagtcgctcgtgcagcgcctcaccggcaagacgcagccgttgcgaccgcgccgtcgctcgagagcccgcggccgtgccggcggggggtcgacgggtggaggggagccgaggcgacggtgggggtggggctgccggcggcgccggcgccgtggatggatgagattgagatgatgatgctgtacgagacttgcgacctcgccgatatgctgtgcgtcgatgtcgccgcgggcggaggagggtgccacggcggcggcggccggcgatgagctaagccgttagttttggatgctctctctctctctctctctctttcctgaaattctctgtatat

SEQ ID NO: 12138 - DNA, 802 bp, Oryza sativa
aataggtaggcaaatatatcatccaaaccagagcaatccaagaggtcgaatgtcctgatgcagccttgaacgacgccaacgtagacgatacaattgcctggaccggcggaacattggacttatcccttcgccggagatcgaagacgatgcagccctgcgtcgggtgccaagttttgccggaacataaaaacaaaagtagaagtaaaagggtggcgatgcgccgaattgtattgatcgtagcaatagattacatagacccgggtgtacatatttatacccatgggttgatacaagtccttgtcggacaagaaagaaactttcctaaagataaaaggaaaagataaagtccttataggacactaaacacactttcctaaagataaaaggaaactaacaaactattcctaattaatagataacttgccatgccgcattctctttgaactcagtctctggataagcttcttttagtagatcaatttccttaaccgaatatagcaagaatccggcaactgacgacttgacaattctcatcggctaatctcaggacttcgaagccgatgctgactctcagccgatgactactccgggcttaccaaatttcactgttaacacaaggctagggttggcacgtgacatttgaggtgaattgcggccaccctctggagctgggaaacagatggtgtggtgccaagctaccccttgtccacaatacggggaacccttgtaccatatcaccgacatattggatttcattttgggattctctgggcatgctctataagtttctatgctgcactga

SEQ ID NO: 12139 - DNA, 5005 bp, Oryza sativa
tcactcccgaacacagccttagtttatagagaaagagatgcaaaaactaaagtggagttcaaatgcacagtgaaccattcattacttagtctaaatggcccaagttgataatcaatgcaaaacaaatgtaaaaggatcataacatgatttatataattatgtgtaagcccaacaaaccttctagcttcctcatctctcatcttagcatccatctccttacttggtggatatgtcggcaagcttgatggatcacatgcataaggctcagttgcaaagaactgcaatactcacagcataaaaccttactacatagtgatagcctaatagctcgtcaaaataaaaaaattaggactgtataccaagggtggagctatattattaaataaataaataagagatttcctacgtactgaacattagggagagtcgtaccaagcgcagcactaaatattgaagcagaaaacataatgtaacccattaaatcatgtggtctagaaaattgcaatggtgctaataagtgggcatagatctccagatatcacatgtgcatgaaatgcagatattaaatcgacaattctaaaacagaaaaccttttggaacctatactggaagtcaaagtagccatttagaccttcataaagatgaggtccttggtacaaaccaaatctaaagatttaaaaacataacagatcttttccatttatagttacagtacattacacatctgaataccagccatttcttggtatttgagtgtgcaaaacgtcattttattggtgttgctccttgcattttatgtcatagcactactcatgtaggatatctacgctcagattattaggagaaaaggaactagattaatcaaaagatgccacattgtcaaaccagcagtttagtatctataaaagcttccgaaagactgaaacaataacaaagatggattgttgtttaaaaagattcttgaacacttttgctcatactgcaggatttttttttcttctgttctcaagagtatagaagtgattccacatagaggtgatatgtatcaaaggaccacataaatcacaggtcaattatgttacttcacactaacattctctgttacaatgctaaggaggaaaagatatggacatacttcactttgcaaggcagatgtagcagtttggcgctcagctggatcaattgcaagcagagtttcaaccaacggcaaggaagatggaggaaaatctttaaatgcttctctgatacaacgcttatagggctgctgaggtttgaatattgtagcatgtggcagcttggactttttccaatactcctctgagggggagccacatagcttgaaaatcttgtgcaactgttctacctgatcagttcatattgcacatattaaaattagaaaatggcaatcaattttatgtaagcaactaaagcatatatagcaacacaagataaaaacaataaattaataaacatcacgagttcaccctagatgcatggattcaaccagatagattagaagaactgaatatttatggtggtttgatcacctgatgaaacaaaatcctactcgttgtgtcacgatcaaaaagatatataagtaagttaacaattgtacgaattccaaataatcctcatcaagcaggtccatattcatgttatcttaaagaaacttcaaatgattaaattcaggtttgactatcccattaatagcatatattgctggcaaacagcacagagttttgctcagattgagtggtttgtggtactataggagttttaatcatagaccatgcctaaatatttagcttagcgatcatttcattttctggacatatttaataagcctatgtgtaccttccagtgaaaatatcatggcaggacaagttatatatagcctatatgtttgaaagttttgaaaggccttataaattggcttttgcattttatgagctataagcagaaccaatcagcttatgaatcactgctaaataaggttcagctaatcactctatattgccagtggcatcgtcgatctgaaatacaggacttctcttttcacagaaccagaacaagatgattatgttttacatttgcagaattccaaatttactaatatatggcgatgcctgaaatgctctcgagaaaaggaaaaccatccaccaattatatataaattggtacattgaccacttattacttacatagcagtatgattttataagatgtaaactgttatacataatgtaaccaccaataaaacagagatactagtcaaagtggcagcttatctgatttccaacaggagtttgccctgcaaatgcacagagcaaaggaaactgacaaacctctatggcaatcatggattgacaactttctttaattttctcctgtatttatttgtaactattgtaaactatatatttatacattaatatatcgcagtaggagcctctcctgctgttttccgtcaaaaaagaagtggcagcttatatttgtcttgtgtttactcccgacaagtatggactttaaccttcatgaaattgggtttggtttcagctgcacctcagtcctctacaacacgtttttcaggttggtggagcaaagttgttaagggtgttcccaaagagccacggaagggattgaattctttgattatttagtaacttgggagattcggaaacactgaaacaattgtgtttccaatggaactaatcctaatgtggtggtggtgttgcaagctgtggctaattagggttggtgtttagtgggagcccatgagctccatcagtttctttgtaagttgcttaccccggcagtgagttagtctcagtgggtttgttggttgggcctcacttatgtgcgaggcttgttgggacgtgttcttggtgggaggtgttccttgacccttcctttgtactcctaaatatttctctcttcttaacgaaatgaagttctcttgtgttttcaagaaaaaaattggaaatggagaaagtgatacttatgtgactaacttagaacatctactacctcagttcacaaacatatgctgttttggatatccatgcagccaaacttccaacatatgtgtacattgaatacatgaaaaatcatacgtgcagatttgcctagaaaactacttccataataaaggatttttttcgtgtttaataaattaattgcaacaaaaattaagtggcagataagtgtttggaggtctgcattgaggtccaaaagaccaaaacaacatgtattaacgacagttgagagtactatactgacgaattttaaataacaggaataatggcacaacatattttaattccaaaagacgtatgcttttcaaggaagcttcaactgaagccatgtggataaccagttaaacactgatggcagtaccctatacaaaaataatagtcatgacatatacaacgaagtcagcatatcattcaaccccttcaataaatgacaacggcgtggccatcaatcactatcaccaaaacattaaaaaaagaacaaacgtagaagattaatcaacctagagatactacaatccattggagcaaacctagtataaaaagtcaacattttcaatacacaacagccaccatggagttttttttatataaatagtacaagttgacttttggtaccaaatgagatttcgatattggattgatagaacaagtatggtccccaggattaccaaaggaatagcatataatgaagagtagaaattgtcctatgactcacctcagtacgcccaggcatgatgggcttcccatgcaagagctctgccagaatgcacccggcactccacaaatccacaccaacaccatagtctgtcgcccccaacaacaattcaggtggccggtaccacaacgtgaccacgcggctcgtcattggtcgtttatgtcgtgggtcaaagaatgttgccaggccaaagtcggcgatcttaagaatcccattgttatccaacaataagtttgatcccttgatatcccgatgcaatacattattattgtggcaatgctcaagccctgacaatagctgctgcacatagcattttatctgcgagaagtacatcatcatcaaatttaacatattcccagcaagtattcgcctataaaacgagatagcacgggatccttaaacacctgcggcagagtaaacttgacgtccgggctcgctgccaggccagcaagggcatgctccatatactcgaacaccaagtacaggctgcatgacatccttgacgtgaccaacccctccagcttgataacattgggatggtcgagtttcctcaggatcaagatctccctggccatgaatttgacgctctcgggctcgagattgtcgaaccggaccttcttcagcgccacgatgcggccggagacggtgtccctcgcgcggtacacgttgctataggtgcccgaccctatctaagagtcaattgccggacagggaaggccaccaccacgaaacggcaaaatcagtactcgtatggtaggtaacaagtggcggatcgaaatttgcggatttccggggggtgctttccgcataataccttgttgagcttctcgaaggtgtcggcgcggcggggcgtccacccgcggagggcctccccggcgacggcgacgagccacggcggccaccccgcggcgagctgctctgcggccgctggcgcggggacgcacccctgcctgggccccggcttgcgtcccagcctccggcgcggccttcccctccccggggactggtccgccgcgggagagtccgtggagggtgccggcatcggggacgacctcttcttcctcctccccttcctcgccgccgccgccggtggcgacgacgacgggcgcccgaagacgcaccccatatcctcccctctactctaccaacccacctactactgcaaccctacaagcagcatctggcggcggcggcggcggcggcgggcagcgggcggcggcggcgaggggggagtgaggcgaggcgaggcgaggga

SEQ ID NO: 12140 - DNA, 1781 bp, Oryza sativa
agaaggaaggaaggagtatttttcatgctcgtatttaccggctaccacatctattttaaaagagagaattcgatctatagcacagaaaaaaaccgatataaaaaacagcacacaaatttctctcttttagtcagaagcacgtgccactaattttttctttgatccgtaccactcctgtcaattgtttaggggcatgaaataattatttttgctcttcttttctaaccaaacatgaaaacttggactattcggctcggctcaatcccgatggatggtgagagtgagtgggtgtaggtgcggtgaccgagcgggtagtggctagcggtggtgacagagaagaaggaggaggaggaggtgcggccgatggaggtcgtgctcctaaaagaaagggcaataacgacggctgcttctaaggcgcaagtcacacacctcggaaaagggtaacaatagtgactacttgcgaggcacggtggggtgatgacattggttgcttgtgggttgttcgatcacgtgcaggggctacgaggtgcaatgacttggttgacaatgctcggggccgccgcatgatagagacttttacggatgaggtgtgcaccaatgaactagccagagccgccatggccgacaaaggcacgtcgtgaacgagtgctagggtttgggggagtgaatgcgagatgtcgaatgggaaagaacgaagaggcgacctagtcatgtatgaggaaaacaaagggtaaattagtcaaaggataaatttatctgctctaatctaatgtcgtttgctcaaaatgcgatggaagtggtacatatcgaagaaaaatcagtggcatgtgcttctagtcaaagggggaaacttatgctatttatgctattttttgtatcaggttgtttctctatagcaaccgttggaagaaagtgcatagtcgtaagcccacgcttaaatgagtggcttatactctcgctcacatcgtttgctcttccgctaataagtcgatgctaaaatttaaattttaaatcgtaattttgaagatggttggagttaatcaaggattacgacatgagcattcactatcatccgggtaaagccaatgtggtggcagatgcataaagcaggaagagctactgcaatgctttatgcaccgagggcatgtgtaaagaattgcaacaggagcttgaacacctcaacttggggcttgtagaatacgggtacgtggctgccctagaggcatgacctacgctcgtggatcaagtcagagccgctcaagtaaatgatcctgaaatagcagagctgaaaaagaacatgagggtcggaaaagcccgggatttccacgaagatgaacacggcacaatctggttgggagaaagattgtgcgtaccggacgacaaggaactaaaggatgtgatactcaccgaggctcatcagactcagtactccattcatccaggcagcaccaaaatgtaccaagacctcaaagaaaagttctggtgggtcaacatgagaagggaaatagctgaattcgtcgcactctgcgatgtttgccaacgagtgaaggcagagcaccaaaggccagcaggtttgctccagcctcttcagattccggaatggaaatgggaggagattggaatggactttataacaggactgccccggacatcatctggccatgattcaatctgggtagtcttggatcgactcactaaagttgctcatttcatcccagtgcataccatgtatacggggaagaaattggcggagttgtacctggcaaggatcatgtgtctgc

SEQ ID NO: 12141 - DNA, 1009 bp, Oryza sativa
gggggtgaaacctgaggtgtggtgtgcttggttagagggggttatgcgaagggtcctgtcacggcctctttccggtatgtcgtggtggcatgtcggcgcacggaaacgtgtcgtggggctgtgtcttgtgggtacagttgtacacctctgatcagagtaaaactattcgaatagccgtgcccgcggttatgggcggtcaaccagattcaccgtgattagactcaccctagactagtctaatggaattgaatagtataggtggatggttgggcctgttgcaacgtggtatagcgttggacagtggatgattaatattgattaattattacaactgttttactgctttcaacttctgtttataaatgcccgctttatgcaaatgaaccattatagctatcccttgataattccctgcatcatacccctattccggtatgacttgctgagtacagtgggtagtactcaatcttgctctattttccccaaaccccagaatttgagtatgcgtcagatggtggtttctccgaggagtaggcttcgtccgtgccgtcgaggatgcttgtggagtggtgttcccgctgcagtccaagtcaaggcttagctccagctatcctttaagttttccgctgcatttatgtaagacttttataatgtttgtaagacgtggatctgtatgtcaactttgtcgtttgtgtaccccggccggtcctggacggggattttaatgcacattctgcttggaattctattcgggaatttctgggcgtgacaactaatcacctgaataactcaataaactcattagtcccttaaccttattcatcattaatcaccaaaacccactaggggataaatgcaacttcacaactaaccttctcgatcgcttcagtcattgatcacccaagacacaccagatgatgacacatgaacacacaatattttttaacgaggttcagccgaagcctacatccccagggctctgattatgggcgcccatcccagtcaatac

SEQ ID NO: 12142 - DNA, 923 bp, Oryza sativa
ctagtggatcccccaggtattaaaggattttcctgggattaaatattgcttttgctcaattttaattggttaaaattatttctagagctctgaaaattccactaaaaatcttgttagcgtatttcgacatgtagaactcaagaaaaattccacatgccaaatccgattattatttgcattaattcattagggttttctcttgcttttacaccgatattttctctggtggattataaattcaatttaggcttgggaaagaacttcagggtgtgacaaacctacccctcttaaacggaatcttgaccccgagattcggaggagctggtgaagaggtgcggatgggcggcctttagctcatcttccctttcccaagttgcttcttcgtctgagtgatggctccactgaaccctgcagaagctggtgaccttattcctagtcctcctttcactggtctcaaggatacgaactggcttctccacgtaggtcagatcctcttggatgtcaatgtgctccgagtcggctcgttcttcgggtaccctcaagcacttctttaactgggacacatggaacacgtcatggataccgatcgtattggatggaagttctagctgataagccacttctcctcttcgttccaagattttgtatggtcccatgaagcgtggtgccaacttgcctttcgtctggaaacggtgtactctccggagcggagtaacacggagatacacgtaatcccctgcttcaaaagtgagttccctttgacggttgtccgcgtagctcttctgtcgagactgggcaattctcaacctctctctgatggttctgactttctcttctgcttccgttaacacctctgttccgaacagttgacgttcgcctgtttgatcccagaagagaggtgtgcgacacttccgtccatacaa

SEQ ID NO: 12143 - DNA, 5397 bp, Oryza sativa
ccaccgaaagcccgagagagagacagagagaaaaagagagagagagagagagagagagagggggggggggtagcacgatggcgccgcccatggtggtgaggaaggatagggttaagtagtcggctagggtttgagactttgagatgttaatatatatatcgccccatataaatgggctattgggccattaggggggaggttaaactattaaaggcatgatggatatatatgggctaaacgattttcgggtcgggcatggattatctgtaggcaaaatataaaacctatctgcgcccactaagttcgctggtatcggatcaggcgtgcccacagacaaaaaaaggtgcccatggccatgcccatcgagtcggatatccgtggatacccgaacccatgggcattactgccaaccataggagttagatgtgttctgactaaaatgttttgtccgtattgatatgttaacgaccaaatttggtaatatcagtatcggaaaagaagattagatcgaagcggagtcagaggcgaagatcgattcgagaacagagcatgaatcggctggagtccagatcggctacgatcaggatcggctgggtccaagttagactgggtaagccgatgcagccgattccgacagtatgacttggtgtgcgacatcgggttgaattgagatgcttcacggtgattgccacacatggatagagtcctgagaaggcaattgtatctattaattatgatattttatgtaattttcttagagatatgtttagggcaaaagtctgccgtaaagacttatggtatcttaaagtttgttagagataagagtcgtgttcgatatgaacatattttgtaattttcgggtataaatagaccccgaaccccatgtaatcaattaacacacacgttcaatacaattttggcgcatcgccacccttttgctttagttttatttcgacgagttcttgctttcgggttgagctgcatcggtttcaatcttcaataagaggtaaaacttgttatgacggcttgcgttctcgggataagtgcttccatctttatgatactctaatcttgtttatgtaattcgtcgagttatcacatatcttacataatctttggcaatatcgctatttaacctattatcggctaacatatgtcagtagaaggcagccgatttggttaaacatcgatgttgacttagattatgtaggatatccaccactctatgaaacttccagcggcttgattgtctagatattgttcttcttttcatacttaatgttgtatcagttaagtttgatctattaagtcgtgcttagaatatcaatctctagcctgcttttttgttgccgattaaggtagtatcggggtttcagccgatcttacctgatttaaccatatttattctataagcttcattgatatgttaaatctgtactttatgttaagatcttgtcgcatttaagtacattagacttttgtttgatatattctacttgttttaatatcttaatatagagtggtatcggagtattagccgacacatgctagatttatctgatcggctatgttataagcatatataattcaactattaatatatatttcgatctaagtgatttatattgtcttggcatggcgaccgatctatcccaattacttaatttaagtatatatcgatacaaggagtgtgtattgttaatatctacagccgatcgagtagatctagttttttcttatttgtttatgactgtcgatcgatatataaatgacatcggctcaaagataaatgatatgtcatcggcacttagccgatcggctatcgtttataggtttaaccacggtttctttgtctttatttcttgttgattgcaggatcaaatcaactggcatgctagtatacccggaggtgagttttggacctgcactggagttaagcagatctcccaggcctcgtgtttttcgtcaacatgatcatagcaatgttgatatgactagtaaggtaatatgggggtctagccaagaaattgtagtgtggggattagactttgatagtggctctgaatgaatgaaaggtaaccggcaactaacaatttgagaagttgattcagtctgggtggaaagagagggtagcaccgtttaggatgggtgtacgattttttccacataaatcggacgtccgattcgtagttgtctcgaaagaagatttaagatttgaagtagaccaaacacatcgctcaactctcgtctaaccaaacaccggatagttcaacgcacagccggactgtttaacacatgttttaattagacaattctttcacttgatggtttgacacaaaatcaaattatccagctcgtacacattgtattgtcaaaacggacgaaaaaaaactgtccaactcgaagaaacattgctattttgccacgtcaatagcgtggcaaaaggtttcacatgtaagttatcggagtgttctatcttaaattatttgaaacgcaactttttaaaagagattgtattggaattgatgggccaaatgaagagtgagaaaatacagataaggaaaatgaagatgactagtgacttcaatatcaataacaatggtactaatcgcacctcccaaatcatatataaccagcgacattcaaataagcaatatcacgcaacatacggaaccagtccgatgcaccaaaaagacaagacagtaattccactgagatgcatgaaccatccgtttatttacagaagaaagaatactccatatatacacaagggcaaccgaattgtcacgttgagcttaaatacctttggttccggacaccaatttgttcagaagcacctgagatgaacagaaaacactaccacatatacataagctggatgaatttcttcctactgaagcactaccgctttctttccgcacgaaaggaacaaaacagaaggaaataattcatctacagactgaccattctaaaaacttccccttaaactcgatgaaaaacatgtaaaagaaactgtattgagttcctcttatcgtgctcttgttccgcccttgtccttctggagctgctttgaataagctgcagccttcgcatctagggcagtttgcttcttccgcctcgattgccctagagctgctggatcaaccaatggtccagaccatgtttgtgaggaccccttctggatggggactactgtgctgaaggaagcatcctggtgctcatacataggctccatatgacgactggatcccaatgggttacccatagctccatcctgatgaggtggggggaacttctcacttttgctcttggcattggcatgcgttatcatgcgtcgcctctgctgttaatgaaaatttgaaaagttcaacgtacatgtttgtcttgaatggttaaagatagtgaagtgagatcagagagaacacagaacaacgctagtttacttctactgcattatcttctgcaatccctaccaattccatggacgcaaattaatagttctacagtgaagtctacttttatttccacacccacagaaatagtattgtgtaagaattttgtatacaaaggacttttgtaaacatgcttgaaattgaaagaccttgtaataaatgaggattatggagcgcgactgattctgttgatgtcagaggtgctacaattctggcccaaaaatcggaggggaacaaggtttccaaaaaagagtcaaccaggttttctagttctttttatataattttcaaatttaaagcagtataaattagatgcaatttttaaaggctgataaattgaatttaataataggggtttgggagcttagcacattgaaccagctgaactccaaaatccaaaatctgaccagtgggtattgttgtttttgcagaaaaccaactgacattattaggtttatcacatgataccatgttagcacacattaccatcagaaaaataatgattgttttaattggacttatatttcttcccagagaaatacaaatggtttgggatatatcgttagtactaaatatcactcgtagccaacccagttggtgtatgtgtaacaaatctacagtggataaggcagcaaattaaacaggaaatcttcaaatataaatagctggcttacatctaggtttgcttgaagctctgcattagcctctggagctggtcctgccctttgagatcgatcccgcgttcgagtcctttttaccccctctcctttggcctttgcagctgctcgtagcctggaataagaatatacagcaaaggcatatgacaccatgtatgatacagtagaaacaattagacagattagtgaaagacagttcaggctcatttggatgggttgggctttggcccatccaaagtgggccttagaaaagtgaaagaaaatcagctacatattgtatgtgcccgtgaggtagaatggatggacagttggacacatgccaatggatgtagcgaaagaattccaaactttctagctagcattcttagcaaaagaagattactgtccctgaacgtagtcccaaataggggtgggcattcggtctaaccgaaaaattcggttcggtttcttgatttttttgaaaattcggtctttgtaatctcaagaccgatcggtctccaacaaaacccaagaccgagcgaatcggtcttcggttagttcggttcggtctcggttatagaccgaactaaccgtaagagaaaagtttgaacaacaaaagcaaatcaaataatcaataattaggccgcagattgtcacagcaaatcgagcaaaatcacagcatatcacagcaaagaagcaaggctggaggcgacacccggcgatggaggcggcgcccggcgatggaagtggaggcggccggctggaggcagcacccggcgatggaggcggaggcgggcctgctggaggcagcgctcgccatggaggcggaggcgcactggctggaagcggcgtccggccatggagggcgaggtgggccggctggagttggaggcccggcgacggaggcggaggcgcgccgactggaggcggcgcccggccatggaggcagaggcggaggcgggaggcggcgcacggtgaaggagcgaaggagcgaagaggatggagacgggacggcgcagtgctctgatggggaagaaacggcgcacggtgtggtgtttgcctgtagggttttttattagtgggcttattgggccaactagatctattgggccttattcggttatttcggtcaattcggttaattgaggcccatgaccgaattaaccgaacaaatttcggtcttttaatggttgagaccgaattgctgaccgaatttttcggtctcggttttttcggtctcggtcttttcggttcggttcttcggttcggtctaattctgcccaccccta

SEQ ID NO: 12144 - DNA, 4080 bp, Oryza sativa
ggtcgggttgggcacgagcatagcgaatccatgctcgacccgagacctacgtgcccgcgcccgatgatgaggatgttaggtctcgatcttctgataggtattgataaacagtcgatttgggcggagtcacgacaaaactcgatccggcttctgaacaaacacgctattgagccctgcaatcacagcaccacgtctcctctggttatcaaccgtgccgaaacctagttgacctcgccgagaaggttaatccgtgcatgcgaatcgaagaactcaagtaagaacaagatagattgcaacacaattgcatatgaatgattaagcacttaaatttggggtttcacaaaccgatctagcggtcaaactgttcttggcagattaatctaagcaaaaccccactctaaacgatatggctactgaataaatatgattaaggacgtcctagagttgccctagggcgcacacccccttaggctaagcccacgatacaattaaaaggcccaaaatccaaatcagattcggactggatgaaatatgtggcttgttttgcatattcccggaagctcggtaggaattttgacatgggaccaaaaccatctgaaattaaattagacttcataagctttccaacaagtactaatgggccccgaaattccttctagatcagcggctaggtccgtttgaagttggtgctgtcaggaggtccgaatccgaatccaaaacgtgtagaacttcatctcttgtcttctatggaccaaaagtgacgtggtgaggtagaagtagacttggagaaggtcttggtttggtccccaatcaacttctttgatcatccatgtattcgttacgctcggtctcttttccttcacccaagtaagtacctctgcaaacaaaagcacacgaaactcattgtgtagcaacgtttgttcaaatatataacatgtaaatctaatagaacataaggcagtcatggttatatccgagctagttgtgtcctcatcactcgacccgtgcttttaaaaacagaagtataaatgcaaaagttgcacaacaaagccacatgtacacataatttctctgttcaacatttaaaaacatccacatcatgacatcaacataatcacttaattagggcagccataagttgcacaacaaaaccaacaatatctctgttcaacacttaaaaacataaccagggcagccatctaggctctagcatcaacacaagtcacaactcacctatgtaaggaaggaaaacatgtgcatttaaattctaaactacttacctagcatatcagctctagaccaaccttgcatgcacgtaagtgcttctgccatttttggtgtaagtctactacgatgtggactaatagtccttccactagtactaaaggttgacgttgaagccacggttgtcactagaattgtcatgatatcccttgcaatcttttgcatagttggatacttgatccatgcaaatttccaccaattgataatgtccaattcttgtctaggaggtaggtttggctcttccgtacaaatccaattctgtgtgtacatgggaggatgaaacatttccaactatggccatgtattcatgttcaccataaataggtttgtaaagagcatacaagaactaaagcttatatttaggatccaaaacatctaaccaataatttaaaacttagccttcatctcctctgatatgttttctaccaagggatctttagtagctttccattttctaattgccaaataaatgccacagatttttagaaagaaaagattagatgtgacataatttcttccagatagtagcactgttatatcataaaacatatgtaacctatcacaaagctctctagcaaacttctaatctgatgcagtaggacacatatcttcaaacaaggggcacatctagaaagagtttcaaagacaagttcatactcttctgcaatggaaagaataaggtaagtggaattctatctagttttacaatcaatagccattcttctaacatatggaatgttcatgttagacgcattttttttcaaattttctcatgtcttcttggtgtggctgtccaaaaccctacactagcacaaattcttccgatgccttgctccataacagccatgccatccttaacaatcaagtttaaactatatgttgcacaacgcatatgaagcaaagaaccttccaacataagaaagttaagaggcaactttccttgtattttctccatcaaattatcattggtggagcaattgtcaagtgtgattgttgataacttcctctcaatgtgatattccaacagaacgcatgaagtacctcacttatagcaataccggcatgtggggcaggcacataaatgaacttacaaaagagaaatggactcaataatcagtttgtcactagtaaattactctatacaacaaaataagattcaatacatcattagttagctacctcaaaagaaaactttttagcttccaatcatcatctatgtagtgtgtcgtgacagccatatatcctttcttttgatgatcagttgtccacatatcggttgtgatggcaattcggacatgcgattgttgaaaatacttgatcaatgcaagcctttacacctcatacatacccaaaatatccttcctaatagtattccttgacattaacttgaacaacggttgcaatacatcacagaacttgtgaaatccagcatgatcaacaatggaaagtgggtactcatgaagacatatcatcagtgcaagttttttcctcgcaagattttgatcaaagacatgtgtttccagcataactgaatgatgaggacatcctccactattacctgttggcaaagacgcaaaagtcgggcggcgactgtgtgagcctctgaataatcccaccttgcttagcttgggaggaggaagtcaccttaaaagggagagtcacccttcccttattggactagtcttttagggagattgggcctttccccgagtgggtgggcctaagaactgtgaggtccgggcaaccttaatttgttgggtctcggccaaccccacctgggccggattgttatcatttggtattagagctgggcccttgttaagggggtgttaagggggtgggaatgatgaggacatcctccgctattacccgttggcaaagacgcaaaaatcaggcggcgaccatatgagcctctgaataatcccaccttgattagcttgttaagggggtgttaaggggcggaataatcccaccttgattagcttgttaagggggtgttaaggggcggcgaccatgtgagcctctgaataatcccaccttgattagcttgttaagggggtgggaatgataaggacatcctctgctattacccgttggcaaagacgcaaaagtcaggcggcgaccatgtgagcctctgaataatcccaccttgcttaacttgggaggaggaagccaccttaaaagggagagccacccttcccctattggactagtcttttagggagattaggcatttccctgagtgggtgggcctaagaactgttggggtccgggcaaccttaatttgttgggcctcggccaaccccacctggaccggattgttatcactgaaccacctgttgagttatttgtaaatgtgagggtggattgtttaaggccttgtctagcttgtcgagactgacaacttttgaggtgattcttttaagtgttttcccatttctttgtctcaccagagagcaatttttgacaccaactacatttagctttccacacatttccgacctttacttgtccaaattcttgccaaatagcatattttagttttcttttgttccctactgcaacatcatcatctatctctatcacattagtatctttagagttagtgttgggtgttgtgactggtgctagggaaggagagggtgaaggcgtaggagaggtcacagcaacagcacctccagcaggtgatgagctagttcccggagttgacatttcttcagatctagcataagaaatatgcatacacatactaagaacaccaatatttcagatctggcataagatcgacatgctaca

SEQ ID NO: 12145 - DNA, 1148 bp, Oryza sativa
cgctaccaaaccacgacagatgctagcattacaagttttacaacaagcccaaaagggtttttacttaaactggtccggtctgaccaacaagaagctagagaggatgtagcacagcgtgcgcagtgttcttctgttagtcactgcgggcaggagacccgtcggcaacctggagcgggatcctggaggcgatcctgaggattgcctgggggacctccggtgcggaggggatccatcgctgtcagctggcggcgacctcctgtgaatataaatgctttcagtgtatgaccagaaacccaagaaggcatttcatgaggtaggtactacctccatcccagaattaagttaatctaatactggatgcgacatatcctagtactatgaatctggacaggtactagattaagttattctgggacggagggggtatatttttatatatatcccataagtaacgcacatacgaccaaaatgactacatgagtatgcggaaaatattcgaatgctttcccctaatccaacagcaaggcacaacagccattcaatctttactggaatatcatacactaaaagtctatcgtatgctactttcaaccatttttgaggcgagaaaagcaaaccaatgcagaacttttgcattgcaaagagcaatggaagtaagaagcactcgaacttacttttcataaccattatcagcatcacgccggtccccatctttattggcaggagaataggatctccgcttcttgtctacttcatgttcttttggctgacgcctaggagattttgcacgatgtgtgtcttttctctgtggggatgcggaatagtcatctcgtcgtcttggagcaggagagtatgacctttaaagaaaacatgtaagtgagagaatcatgaatgaagataatggcttaggaatcacatatagcaacaaaaagtaaacaggaactataattggtctaccttgaccgtggacgaccacgataacggggagagcgggaacgcgaacgtgaacgagacctccctgtaagaacagatggatgcctcagtaattcggtgtggcaacaaaataaattagaaaattacatgcatttaagaaaagaaaattaacaaaaacttgagattgaccaatagtactaatctgaaatctgaaa

SEQ ID NO: 12146 - DNA, 658 bp, Oryza sativa
tcccaaaattaaagttcctagttgcatgatgtattttccacaacccttgtatatgatatattgtcgctaactttatgttattatgtttgtctattgatgcagcgcttgaagacccttcgagtcagaggtcacacggcgcacatactgttcgacgaccggtacgtcccgtacctacggcgggcgcagctcttggcgttcgtgaccatggcgcagcgaccggtgcctctgtacaacgccgctgctctgacggccctagtggaccggtggcgtccagagacacacaccttccacctaccgtgcggggagctgacggtcactctggaggacgtcgccatgatcctgggtcttcctatccggggtcaggcggtcacaggtgacacagcgtcagggaattactaacgagtcttcgtattcatttgctaatttttttgcaattactaatgattccatttaatttccggttacaggtgacacagcgtcgggaactggagggagagggtcgaggagtaccttggtctggagcctccagtggcacctgatggtcagaggcagacgaagacatcaggggttcctttgagttggttgcgagccaacttcggtcagtgtcccgctgaggcagacgaggctacagtacagcgatacagcagggcgtacgtgc

SEQ ID NO: 12147 - DNA, 1528 bp, Oryza sativa
atattgctgcctgtaaatttctgtgatttgatgtttgcctgtgttgtgtgcaaagttttactaaagtttagcagggctgggacgtcagcgccatgctaaatggcgctgacatgtccaaactcaacgccagtgcagaggtcccagcccagccatccagaaggcttgctgggctgggccacggccgaaacggccaagtccaacctcagcgccaggtgggctggcgctgagtgtcgcacggtcagcgccattatggctggcgctgaggtccaagcccgcaagccatccagaagccttgcttgtctgggccttgggggttgcggccaagtcccacctcagcgccagtccggttggcgctgaggtagctgccacgtcagctggggatcggcccggccgccacggtggcacaatgtcagcgccagtcccgttggcgctgacacggccaacgtcagcgccaatgtgtttggcgctgaggcgacggcctatttttggatgaagtttttggcaggggttagtttcgaaataagttttccaaaagggtcaatttgtcaaaaaacctgctagttatgtggaaattcagttccaggtattgcatacatttttgttaatcgattggtgctaatgaactgccgtgtcctaattcctaaaagcctaaaattaatatatgatggaaattcagttccagatgatgcatacatttgttaatcaattgagctaatcaactgctgtgtgacgagattacttgtgaggatatgaacatgcatgaggggatagatggcagatcgcatatgcatggcaaaaacatgcatatgattgttcatctgtatccacccatggggacttaactagattggaaggtaattaaccctgtcacatgaactactttgaatccttctttgaattgaaattcaggaaactattaccccttcgcaggtacgtatatagagctgatgctgatgctgcaacagctaattatactccgtttgttaatgaccgcgatccatacctgaatctgaatttctgtggaatttgcaggattcaaaatgtctttttatatatataaaaaaaaggactatgtttccgaatgctcagacattatcttctgcaacttagctattcattattcatgcagcgatcatgttgtgcaacgtagttacatgtggtgctcgtattttgggagtttgcgaccaatgtatatgcaatcaagttaattatagtttctgtagcactgcaattatcatttgttttgcgcgcgcatgtgaaatttgggcgaaaatggatccttgttttggggagaacattttggatcctcatttctcatctagctgtataaaatggatacgatattgcagcagcttgcaagccataatctgtctcatgtgtatatatgctcccaataccagaactggattgagtcatatctaactgattagatcgatagattgttacatacgtatgtcaaaaaaaaactcatgatcaataagcagagatgattaagtaggtagaagaacaaggagactgacttacatgg

SEQ ID NO: 12148 - DNA, 566 bp, Oryza sativa
ccatttgataacttttaaattaaaaattaaaaactttaatttttttttttgtaaagagatatgccaaagattaaaaaatcggaaaagaaacaccgaaaaagataaagaaaaaggcacccgtaagcaccaaaatcggaaaaaaaaaagtgcaaaaaaaaaagacaagggagctatagggtggggcagctggcgtgcgcgccagcaatttagctggcgcgtatgcgcgcagtagccaccccccacgtggcggatcatgtccgtcaggtcggcgtgcgacgacccgccttcctccaccgccgccctcgccgtcgcggcaagctccctggcgcgcgccctcctcgccacgccgtccgcgccgccgtccatcagctcggccaccgccttctccacgccggcgccggtgacctgcacgccctcggcctcggcggggaggtacatgggcggcgccgtgacgcccgaccggacgccgacgccgagcacgtcgacgagcagccgctcgctgctgaactggtcgaggatggtcggccatgtcagcgccggcacgccgcgggcgatggcctccagcg

SEQ ID NO: 12149 - DNA, 1333 bp, Oryza sativa
ccggcttggcgcaagaggcgcggccgatgaagggaggccggattggcgcgaaagacgcgtccggtggaagaggccggcttggcgcgagaggcgcggccggcggtggaagaagcgacctaggtgtgaggaagaactgccggtgggtgtggcgcgattttcggcgctcgaaggctagccggcgggggacaccggtgcaggggtcccacaggtcggtagagcttgtgtggtggtggggcatcggtgcggcagtcgtggatttgcaggatctcgtctgggtccctttgttggtctagtggcggtcggtcacgcttagcggcggccggtccggtcctagccttctcctgggcttgtgtgttggcgacgtcggtgtgggtggtggtttatttttcctttttcctggttacgaccctccagattgtaatcttgtaatttttttctactctatcaatagaacttcgcaccgtctcgtgcgagtcgttaaaaaaaaatgatggtactgggaacagatcacaggttgcaacgacaaatttatcttatacatagcaaaataatcccaagagattgacatgtgcgcatagtaaagatgatgtcgttttaaacaaccataatttggatggatgtacattcataaccaagtggcagtggcagtggcagaatttgttggtaggaatacctgaagaagagattagtttcccgtttttttgacaaattgacccttttcaaaaacttaattcgaaactaaccactgccaaaaacttcaaccaaaactaggccgtcggctcagcgccaagcgcattggcgctgaggttggccgtgtcagcgccaacgggactggcgctgacattgtgcaccgtggcggccgggccgatcccctagctgacgtggcagctacctcagcgccaaccgcttcggcgctgaggtgcccaacctcagcgccaagtaagttggcgctgaccttggctacttagagcccggccgaggccgccccagccagttcttcctccgttttttccccagccgcccgcctagggttcggtcgccaccgcgttctcctcgcccaatctcccccaaaaacctctctaatcgaaggtgatttgtgcggcattgagtttgggatcggaagagaaggtatacccctctataaaccctaagttccccaaagttttattggatattttgcattgttttggttgtagacgtggtttgataatagttggctaaggatggattattagatggataatatgggtggggatgaagtgtggaggtggcatatctttatccatttggttgttattgatacatttagcgaaatatatttgggatggatgtt

SEQ ID NO: 12150 - DNA, 1881 bp, Oryza sativa
gattgtctccatacatattttgccaccgattcttttaaaacctcgcacatgggttcgagtgggtgtatattatcctcgtgagtttaattcgaatagcagtggcttgaaaacaccacaaataaataaaatgacacattggcacgttttccctacctaacctttttacctttttccaaccatcgtgtgtatcacaaatttcaacatgtccttgttgcggggagtacagacatgtaggaattgctctgttagctgagccatcctttttggtgatccacttctgttatctaatgcttgcttaccttgctggcaatgaccttttttatgctttgtagttagtgctttttaattagagggagcatcagcaggtagagttatgaaatcttctgcatagtttaatggccaagttgggcatcacggttcaatggccttgtcatctctagatcacatccgctagcatttctctttcattgtgtgtggtagcaacaaacacatctttggcccatttaattctgctaatagagactgtttctgtctcaactggtgaagaaaaaggattcagatgcattattgttgattaaaaattgaaaacatctaacgttcttgccttttcaattcaggattttacaagcagctacctagggcatgctgcggggctcctgggtccgttgcgaaggccgcttacaacttcaatgtcacagccaaatgtggtgaggttggtgcaaccgcgtgtgatgatccatcaacccattggagctgggatggcattcacctgacagaggcggcttacggtcacattgccagaggttgggtatatggtcctttcgctgaccaaccgatcttccaatcttcatgagaaagtcacttcttccgttgtaattgtagaggtgtatcacgatagtgcactgaaatggagcagggaaagtagttcttccatatggttccaaggttgcatacatgtatattttcattctattacattcattgcagtcaggtacaaaggtggaatagggctgtcaaaagcttgattttgtttatttgtcaggcgacataactatgaaaatgtaacagacacatgattgtgtaaattgcctccggaaatatgatacaaattgtctttttgagtatctccggtttccctggttcaaatctgccctgttattagcagcagcttttgtctgaacatgttgctgcgttcttgtacagaaaatgagctctgcctgaaagtttatttttggtgcattttagctgcaaacaattagcagaaggtgagggttactagtgctaattgaactgaacatggcgaggtaacgggagaagaatcctgaatatacaattggcagtgatggatgcagaattcagaacagtgcatgcaggtgggagttgaaactaatgaactgatctgaagaatctatttttattattgcgttgtacgttgcttgccatgtgattcgcacttatttttagcagcccacgaactgacgaaccctggtttgttttctcctttttgttgtcagtgtatccctataagttttgaagtatgagctgtcaatggagatatcaaaagatatcgaaaagcaaagaaatttcctttggtactagtaggagtgattactgaagcaagtacatccaagttaactgaagaaaattccagattgcattagtacttcttaagggaaaaaagattcgtttaaacattgagcattaggacaaacgagagacaaaggacatacttcacattccagaagagttactttgcaagtgacacatctcgtgtttcagaatcccacatggtcgtactagtgcactagttacttacgatctgtccaaaagaacgcaattgttatactacatgtactagtacagtatattgtcctactgccc

SEQ ID NO: 12151 - DNA, 2639 bp, Oryza sativa
  unsure (1)..(2639): unsure at all n locations
cataaaaaattattgatctgacaatgttgtacaatctagaaataggcatgacaaattgcatataaaatattgcgtacctttgtagatacatgccggatgtatctacgaaattagtagattaatttaaaaaatcaatctcctaattatcttgttgcgtactcgttcgatatcatgtgatctgacnatcttttggtacgcccgcggagcttgaggggcttgaatgatctcgatagggccaagttgttgacgacgatggttccgatcttgtcgaggcacgtactctggtcaagttagatcctccatagccgaagttatcgagtagtatgctgtcagagaatccatctcttaaacccatctcgtcgaaaccttgaagcaccaaaagatcccttacctggcgcgccactgtcgacgtttgatgttgcgattccggtatttgcatagtatggggatcgttggtgctaggatatatgcaatattgtagtaaaagagatgnggacgagggattttatataggttccggcccctgaatggtcaggcaataactctactcctgttggccgaagccggtattgctcttattcaccataatcacaccagtacaatattgggggtggcctatctaactgtggtcgatttggcgatatgtagtattgactcgtattcgacaacagggtagccttcctcctcgaatccgcatccggcgagatcaaagacagtgctatatctatcctgatggtagccataggcaccgtaggggactagccatgcctatatctgaagtcgatatctgacgtcttgtcttacgtatgttggcttgtctgtggattttttgacttgatctattgttcagggtcccctctcctcctagggggtcttgagtttatacccataggtgttcccttgtccaagtagaattaggaaaaccatatggatacaatccgagtagtccttgtcgtttccatgtagaactctattcatccttccttatacggaatttctcctgtatccgaaggttgtttctgtataagacatggtatgtggtgggtcctgccgagatttagtcaattactattaggtatgtggtatccataacctgacagtttagatctagtctagtcactgtaacacactaaaaagaaatgtgtttatatcagggctaacttaggatgccatcgtttggccaattatggataataaaccaaacgtcgtattagtgataaaaaataatttatgaataaaaactaatgatttaaacgtcaatgttaaaagagaaactattataaaaaaacttaaaataactttaaaaaatttaaaatttttggtatcagcatatacgttacaggaaaaaaagatgtggcccttaaattcaacacgttgataccaattgttggaacatttattaatgcgtcggtcttacaaacagcagtgcatatacacacagaatccccatgctgcacgctctttcctctatgaaccagcttttagggtattgaaaagcaaaagctagcacaaaatacatatagtactatactagttatcattatttttttgaaagatcaaaacatttactgtaattaactgagcagatggaactcacttcagggagactnaaacaagtagccgacagatataaattaagaaagaggctattnatcactctataaacctcgatgcttttgatattgtttcccgaatctgatatgcagatgctgctaggtggccctcatcgtcgacgacgaactgatcatagctcagtgatgctgagggttgggccccccggggctgagcctcttggacccctcgtaaaccgtctcgtcaatctcttctccatcatctcgctgccgcggcaatactgtttcgaccgccgtgccgctagtcctcgccgcggccggcgcagctggcggcggcggccgcggcgggggttgactgacgacggggcggcgaccatgtcgtgaagccggcgatggtgatggagcactgggcagcggtcgccggagacggagacggagacgggagaggacgagccggtgacgaggaggaggaggaggcagaggcagagacacgagagggttattagtttcatctgtccggcgctggtaattagtgatggtgttgatacatgtttatgtagaggtttaagctggcctggaaacgtctatttatagtccaaacggcagtgctgcttgacttgtcaattacgtactggtttcatttttttgattcacaagtatatattttttttaaaaaatgtgttcatcctgtagtatatactacaaaaagagcccaaattatactgtttttattcacaagcagaagtattacgtgcaggcaccatacggagcatatacaatgttctttcttcttttcccctttggcagatttacaagctgacctaactctcaacattttacagcggagcatttagagtttggtgtgttgatgtactgatcgatgtatgtgtatgtgtgtcttttagttttaggagtataattgaaaagagaaaacgtttgaagtttattttgttgttgtttcagaagttaaaattgctttcctaaaaaaaaagagagttaaaattgcttgcatgtatatatgatctcttcatggttctaactcaatcaggtaagacatgggagtgtatg

SEQ ID NO: 12152 - DNA, 1344 bp, Oryza sativa
ttggcagtatgcagaattaatttatttaatcacctctattgacttgaaaagtaaaatctgcggggctaaagagtaaacagaaagcagcaggatgtccaaaaatacacacgtcatcgattatcacaacactagaaacaagatcccgcccgagaatgcaagagtccccatacgctctaggcacgcataagagggatacggatacctccctcagcgaggagcggagcggcgacagagatctctacacacctggatgcgcctcgatcagaagccctaacaggtggacgtgccggaggcatggggaggctgctgcggcgccaattgtggccacggccatgggtgagagaaggagaggagagggtttagggcttggatgcggcggcgatggcgagacggagaagtggggaattctcgacgagacgaggaggggaagagatgagatcggacagggtaaatgggcttcatgggccgcctgagtaagtaagtagttgggccgtcgagctctctctctgctcggcgcgtcggcatcggttcgtcggcaaatggcggcgccagcctacgtgtcctctcgccggcgaatcccacatcctcgctgaccaacgtgtcatcccctcgtgcacacgtgtcaaacccgaaccgcttaagctccaatattttaagcctcccgccgcaacgctgtcccgatcatgtacagcgacccgatcactctctcactgtctcgttcacgtagctcacctgctcgacacaatggcgtcgcagcagcagcagaagcagccgaggaaggcgaagcagaaggaaggggaagggcactcggcggaagaagcggcggggctggaggagatcggcaggtatcgcgcccaggcgcagcagaactcgatggacgccatccgcgacgccgaggagcggtacgccaaggctaaccgggagcacggcggcgcgacgcgggcgcccggcgccaccgtggtgtcgtgcgtggagcgcaagaaggagcagccgccgccgccgccgcagcacgggaagaagcacgaggcggcggaggagggacacggaggcggcaaggcggagaccggcggccaggagggggtgaccgccaagaaccgcggcgaggggcggcagcagcatggcgagccggacgccgccggcgctgctgcccgggagaagagtgctggcgccacgcacggcgccaagcaggccggctcgaccgcggccacgcgcgccgcggactacgccgcggccaagcgcaccgaggccaaagacgccggcgcgcacaccgcgcaggccgcgacggagaaggcgaaggtggccgcggggacgcgccaccgactacgccagacaggccgcagcgaa

SEQ ID NO: 12153 - DNA, 1454 bp, Oryza sativa
cggcggcagcttgcgtcggagctcgaccaggtgcgtgggctttccaagcggctgaaggcggccgctgaggccatcgcggctgagtctgcagcggcccttgctttgcctgtggtggtgccgccgcctcagcttcctgttgggtatgcgcactcgcagttcgcactcgctgatcctgtgacgcccatacctggtcaagttgctggtgctattgttccggtccgctcagtgatgcagcgcgggccactaaccgtgtcagtgactcacacagagtccttcgagaaggagaagcggacaccaaaggcgaatcagttgtatcaaaattcagagttcttgcttgccaaggataagtttccgccttcagattcacatggtcgtaagaaacccaagcaccacaagaagaagcatcgttccttagcatctcatggtgctggttatgatgctgagcagaggctatactctcatgcttttaagaaatctatgtcgctgctttctaggctaatgaagcacaaatttggttgggtgtttaacaagcctgtagatgctgttgcgcttggtttgcatgattattttgctattatcaagcacccaatggatcttggcacgataaagacccgactcacgcatggccagtacaggaacccgagggagtttgctgatgatgtacggctgacgttccataatgccatgacctataatcccaaggggcaggatgtgcatttcatggctgagcagttgttgggaatctttgaggcgcagtggcccgaaattgaggctgaggttcagtaccttgcctcatgtccgccattgccaaataagtttccacctccaccaattgacgtgcgcttccttgatcggtcagattctgtaaaacaccatatggtgttggactccaagtcaaggccattaagtcatactcccacttatagtgccaggactccatcgatgaagaaaccaaaggccaaggatccggataagagagatatgacaatagatgagaagcggaagcttagtaacaaccttcagaatttgccaccggagaagcttgatgttgttgtgcagatcattaagaacaagaatctgtctgttagacagcatgatgatgagattgaggttgaaatagatagcatggatactgagacactttgggaacttgatagatttgtggccaactacaagaagaacctgagcaagcaaaagaggaaggctgagcgagccatgcttgcaaggcaggatgcagagttgcatgcacaacatgttgccccacaacaaccagtatgggcattcaatcattcctattcctattctataagtagcactatatagttaattgaattttatgattggtgctgaaagttacagtttcttggattgcagagtcaagagcctaatattggtgtaaaatctccaaagcaaagtaagttagatctgctctattttgtacttcatctaattgt

SEQ ID NO: 12154 - DNA, 708 bp, Oryza sativa
gccgcgctcgggttctccgcgcagggcacttcgcgcggttcacggcggtgagcaagctcgcgctccgctgcgcccggggctccgggacggacagcctctccgacgacggggcgcgccaggtggccgccgcgctgccgtccgcgcggctcgccaggctcaagctccgcggcctccggcagctctccgacgacgggctcgcgtcgctcgctggcgccacgccggtgatccgcaagctctccgtcgcgtcctgcagttttgggcccaaggccttcgtcgccgtcctccggtcgtgccccctcctcgaggacctctccgtcaagcgccttcgcggcctccctgacaccgccggcgccaccaccgccatcaccgaggagatcctcttcccgcccgcctcgtcgctgcggtcagtctgcctgaaagacctgtacagcgccctctgcttcgtgccgttggttgcctcgtcgccgaacctccggtcgctcaagatcttgaggtgctctggctcctgggacctcccattggaggtcatcgccgcgcgtgtacctggccttgttgagctccaccttgagaagctgcaggtgggtgaccgcggcctctccgctgtatcggcatgtgcaaaccttgaagtcctgtttcttgtcaagaccccagagtgtactgatgcaggcataatcagcgttgccgagaaatgtcacaaactgcgcaagc

SEQ ID NO: 12155 - DNA, 711 bp, Oryza sativa
attcctgcagcccatttagcaggcttactattatatttgctctaacccaaaaccaaccagaccattttcccagcgttgtgatttgccccattcgcacgccaccaccaccggtggatttacaccgcatcgctgcgcggccgcacgacgcacgtgatcccccccacgcagccacgctgcggaggcagaggtagcgcgcgccgccgccgaaacaacccaacccaacccaacgtcccgacccgatcgaacaaccaccgcgaaaacagcgagagacgtgcggcgcgtgcccgcaatttctcgtctttttttccgcgcgggcgccgcgcttccctccgctcgcgtttcacgtgccgctttcctacccgagaaacaaagattatactaggcgtttaggcctcgtcttccttccttccacatgtacacctagtatataacaagagggagacaggctacagattcacgggaaggtttcgtcctcgtttcgtttcttgcagcaggaagccaaagtgtatttcccgagctttgatgtgagctagctgattttgctagagctacaacatggccggtagtagcgagcagcagctggtcgccaacgcggcggcgacgacggtggccgggaacgggagcaggttcgcggtgacgtgtggcttgctcaggcagtacatgaaggagcacagtggaagcaacggcggcggtggcttcttgccggcggtg

SEQ ID NO: 12156 - DNA, 704 bp, Oryza sativa
cctgcagccaacctgggcctccgcgacggcgacctggaggcgtcgcgcgccgcgctccaccgcttcggcaacacgtggagcggcagcatctggtacgagctggcgtacctggaggccaagggccgcgtccgccgcggcgaccgcgtgtggcagctcgccttcggctccgggttcaagtgcaacagcgccgtgtggcgcgccgtccgccgcgtgcgccgcccggcgcgcagcccgtggctggactgcgtcgagcagtacccggctcgcatgaacgcttaagctgcagtggtaagtatgcagaggctaatgaacggaaaattactgcaacgtcaaaagacgggatcggcatgcgatgccggttaaggttcaagcttgattaatttgtgttggtgtattagcaagtcggtttatgagccatagactaccataaaagttgtgcgagacatgtgtactgaaccagtgtacgcgagttcggtgatatgtgaacttatctacgtttgattctattatttatactgtcatatgctacttgaattaacctggtggctgtttattaagtgttgctgcaatggactgatagttgttcaagtatatgtgttttatttggtccctggactagcaagatagggagcatagcacacatttcctttttttaatagagtaatttttacaaaacttaatatatttttatcaaactatcacaa

SEQ ID NO: 12157 - DNA, 1104 bp, Oryza sativa
cttgtttatgtgctgttttggtgattttgcttctttctgtttagattccgacgtttccggagagtccgtttttgcaggagaagaatttgaagagttccaaggccagcaaggcaagtcacacagatcccaaacaaccctttgagcatgttgatcccgtttaaagctactgtttctattcaactattgcatttattttcgaatgtcattgggtgaaattaacctattgtttgttatagcccttttgttcttgattactttattccgtgataccttgggttattataacttgactagttgggctatatatattggttcagctagatattagatatgattgcttagccatgcttagaaacattagcacactattgggataacttttgactcactattgtttaatgatggcttaatgatagttcacgatggtcaatcgtgattggttaattaattacatgccaactaaaacctgataatggtgggttgtgagcacatggttttaagagtcgtgctcatgacaattaaggaccggttcacgagtttcggttgtgaaacttcacgagtttcggttgtgaaacattaaccgtgccaaccacaagccagcgtgggcaacggctttaccttttgtatagcatggttcattgcggagcaccagactgagaagtggcggagataagcccacaggggtcgctccagtcatcgtcgtcgctcaggaaggtcgccatcatggtcgccgtcatgtcgccgtcctcgtccgctcctccgccgttgctgtagaccgccggagcaccgtcgccgccgtcgacccgatcttctccgccgcttcgatctcgccgccggtgccgtccgttgatcttccgccgcttctttggtcaccggtgagttcgccgcgtcacgctctacgtcctggtgccctccgttctcgtcgtcgcgccgtcgttcgccggcgagcttgcgccgcccgagccgccgccggtggtgacgtcaccgctgacgtcatcgtggccgtttgccgtgagccggtcgtggaccgttcgatctcggccgtccgttttggatggatcgatctcggctgtacagttccatgaaccagcggcgtgcacccgg

SEQ ID NO: 12158 - DNA, 5658 bp, Oryza sativa
atatgtttagattcattacatctatatttatgtgggcaatgctagaaagtcttacattgtgaaacggatgaagtattttaatattgatgagaaatatatattgtaattcctacactttggtgttgcttaggttcacaagaaagaggaaattgtcctttatttttcagttaggatttggacaagctatatgttctgaagaaatttgtattacgagcaaacggatacaccaaacatgctgaaccgccaagcaaattattccagtcaggcaattggacttctatgaatcttattgtatcaaatgcacatgctcagaaatattggcaaagctaacgaattctccggcgaggtatgtgttctccgatagatgtgcctcgtacacctccagcaccttcttcaacttctccacagtctcatccacgatcttctggttggttgggatgccatgcaaggccgggttgatgatgcactggaacatgattggcgatagtgctggattaaattggtgcgtctccacctcggtccagagatccaccatggctgcctccttgaggttaccttcacggagtagatcgacctcgctcgtcttgtaattgcggaggatgtactttccgattgcgcgggactctgaaacagatgatgcaatgagatttctttgtttttaaccatgttttaaatgtgatagtttattttatagtaaaaatagttacgaaaatagtttgcacgcctcgtggtggaatctctcctttcttgaaatgcatataagtagtaataaaattttttgattgagccgaagaaatctcttttggctgttggatatgccagtcatttgtttggctctgtgttagcaatcatgatgacagaaacatttccggtcccttcgaattacaggattgagaaaacgtaggaatataaaaaacgtaggattttgataggaataatgcaagtgtaaaacagaggattgcaaaacgcaggaatgaacgtttgattgaaccgcaggaaaaatgcaggaattggatgagagagatagactcaaaggaaagttaccaagaggttgaagctcttgctaaatttcctccaaaatctctatagaattgtccattccataggaatttcaaaggattggattggattcaataacaaagggcttcataggaaatttttatacagaattgaaatcctccaaaattcctattattttcctccaaatcaaagggacccgaagaccatgaattaatcatgaacaatagtagccaccgacagctcccgactcattaaatttagaggtaaaaaacagagtaaccagaaagtattaaaatggtacaggtgcatttctcgggtagataacatatataatcgtcgatagtgagacatctattatctattatgatttctttaatcttaagatataccgactcaatcttcaaaggagctaataaagatagggatgtacgtgtgtgcatttattgggtaagtgtgcatgggtttatatgagcgtatgcttgtgtattgtgttcataaaaaagttgatataattttttctgagttatatttaattttaatcctagtgtccataatattttacacatggatgtatattatttagtgagattaaacatcagaggttgccattaacctctgaatttttaagaaatcgtaagcctccgtctctttaacaaatgaaacaatatatgaaatgtaatgtttatcccttgttcgtatgcctattcaatgtaatcagaaaaaaggctgataagttttcatttgagagttgagagcaagaattaatcgaagccaaaatcaagcatatatactaacaaaagagatacagatccccgtcctggaaagctgggatttgcccaaacggctgcaagaagagaaagaaagcaccattcatggcgtcgccaaattcaggaattcaggagcagagcagaggcggcgcgctggtacacgtacgtacgttgcgctggaggtgttcgtggctcttgtgttccttggccttgaagtcgacgttgtgcggccgtctgaggtcccaaaatctaggggccgtatacacatacggtatatatactacgtacggtataaatttagtccacgtgccatagatctatattaagttatatagctgaatagcccaatacagaaaataaattttagttcatcgttaggcctgttttagcgaagccgaagcgatcttcatttgactcccatcgctttgccttgatcacatcacgccactcgcgtcgtgccgcctcgatcacgtcatgccgctcgctgcttctgcgctctcggtgacttctcggcgtctcgcaaacgaaaacaacaagttggcaaatcgcgactcgccaatagccacgctcgtgtcgatcgtccgccggtcgacttctctgctcattactgctatttatttttctttgaagttttaaaatgttatatatagataattttgtcacatcgaatattaaatggtatgtgtttataagactatataaatatataaattagtttatctatacatgtaggggactccatgtaagtttttgccctcggccctaaaaccccaggaccggtcctgttcaccggcgccatattctccgcgcgcgatccgagttcatggcggcctcggcgtgtgcaaacagaggatcctttggagctagctggtgcctggtggtagctttagcgtgcgatttctggagagaaatagatggattggttggactagttggtgtggtgtgtggacagtgtggtgtactgttcttgtgggacaaaagaagcagaaagaagagcaaaaatgttatcgcttgatactttgatgactcgtctagggtgaggtgagtgtcggtaatgtacagtgccttctacaaacaatattatccttttggatttggaggattctgaaggtcaaggtgctggtgcttgagacgtcagctccatccgaactgggataaaggcccttcaaactttcaacttttccattacatcgaacttctacacacgtaaacttctaacttttccatcacatcattccaatttcttcaaacttccaattttagcgtggaactaaacacattctcaagggtatatccccttgtttttgcatgtcacttaaaaaatcatcaaaaaatttaaaaaagatttatatgatagatcaatatgtgatatgtcactttatagatatgcatattcaaattcaacttatacaagtagaaacgaaaataataaatctgactatgaaaagaacgagtaattcacaatcaattttttaattgtataagtcaaattttaacttgcatgtttacgaaaagatatttcatatatatattgatctatcttgataaattttttaaaatttttttgataaaattttaaataccatgtataaaacgataggatatccttcgagggaaaaatacacttccatcatcattcgcattcgcgctggggagccggttgcgcatgttacatgttgtaagaaaggacattcaaccaaccacacaacataatggtgggatgctgtggaacaggatcatctgacacacagtgatattatgtgtgaggatgtggttgcttttctctattgcgattagcctgttaggtgtaagatttgtagggactcgaatagatgggatgcctcatgggcccaacgagctgctaggcgtgagggtgaaactataaagcgaactaggtgaaaccccgcgcgttgcgatggacacattagaaaagattaaatatggatgtaagtataaaatgtctagcagatgatgtgggaatgtatgctatactataactatttttatttccagatgattgttcagcagtagctgctggttcagaggaaatggatggttcagcagattgccgctctgaaactgatggatgtgcatagtttcgaaaacagtataagctggacgttccattttttttaagagactaaaacagtactcagtgcataggtcccctttatgcccgaaaaccacaatgtatgctcaaatataattctgacaaaactcatgtgaaattcacatatactgaactgactcattaaagcatccaatagttctcatttctttttttttttaccagagaacagtgggggggggggaagcccccacggttgaatttcatttataaaagagaaaactggaccaaattgacattacagatcatcaatccatgattgcaaaataggtctatcagctaacttaagcctagataaatgtaggcttaactcttctcttaaattcagcttccaacacgggacagatgttcgaaagctattaaagatgatatcatttctttgcttccaaagcaaccatgcggccaccaaaaaaatttccatgaaacaggcattactgaatccatttatctgagaatgaatcatctgatgaaattccaaagaggtatcccaccaaagtccaatagagttccaacatgcagtagcaaaagggcattggaagaacatatgctctcttgtctcaggagttcccaaggaacagagatcacaggaaagagggacattggggggcttactgtgctttctctctagaagatccctggtatttaatctgtccaagaaaaggagccatgcaaacacctttatcttcatatagactttactggtctatatccaagacaaacacaaaggcggttggattgaccagaaagaaattttataaaacttatgagaagagtaaacattagagtcccagatgtatgtccaaatgtcggccgaagagtttaaacttatctaagcaatgtcctccagatatagtttgtattcatcataggcttgaactgaaagaggtaaatagaattgatcatccactgccctctgtaaatgttgttggacaaagtcattcttgtgcctgacaaaagagaagagagtaggatacacctgagcaaagacctttccattacacaagtcataccagaagctcactgaagatccactgttaattgttggccttgcaaaacctctgaatagaacttcaaactgaacaatgtccttccaccaaaatgagccacaaacactggcattttgaggcaatatcctagagtaataggaattccaaatcagtttaacccaaggtatctgcatatgctggttgaaaaactttcctaactgcttgaggagaagggccctattttgcactcacaaatctattacacccaaaccacctttcttcttgggcctacaaaccttcccccaggcagccaatgattttttggtggaagttaaatcctttcccctccaccgaaaatgccttcttactctatcaatattctctatcactgccaccggaagctgaagggagcacatatagtaagtgggcattgctaacagaactgaatttacaagagttagcttatctccataagagaggaaggaagaagtggccacaagtcttctttcaatccgatcagtgagaggagaaaaatccactaccttgtgcttagaacaactgagagggagccctagataggtgaaaggcagagaacccaggacacaaccaaaagtctttgccagacaatcagccttctcttcatccaaatttaggggtatcagacatgactttgcataattcactttcaatcctgtggaaagagtcactgtattcaataaagcttttagagctagaagtcgtttcccgggctgcagga

SEQ ID NO: 12159 - DNA, 1022 bp, Oryza sativa
agttttgatgaaaccatattggttttggtggaccaactgaaccattttcccttgtagtctatttgtcatggcctttgagatgatttttactgaactattcatcaaggaaattggtctatagtcacttgcaaactagggagaagatttctttggcactagagttatgaacgagtagttcagaggctttagatcacaaaatcctccatggaagtcagcaaacaacctgtagaaatcctgagagataactggccaacatttttttaaaaaacacccattgaaaccatccggtccaggagctttatcagctggcaaaagagatataatgctatcaatctcttgagaggaaaaaggcagaactaagtcatccaaatcacccctcttatcaaacaactcagataagttaaaaagcatagagggatcttctgaaactcccagccttgatctgtaggcctcaagcaaaagggcagctttgccatcatgatctgagacttcaattccttctgaagaagtaagctgagtaattgaattttttctgaacctttctgtggccatagcatggaaaaaattagtattttcacccccaaactaagcccagttctgtctgcatctttttttccaataaacttgcttgtaatggagaagggtgataacttgctttttgacaatatttctaaaaataagttcaggcactgagagcaagcgacattcttccaggatgtccaagaagtgaatgactttatgacaattatcaataagcaaagagagtttcgacagcttcttactcaacattttaagtttcttctgagctgtttgaacttggctgaaatagcaagggcatttgaactcgcattttggattcaaagccaagcattttcaacctgttgtaggaaaccatcatgctgaacccagaaattcacaaatctgaacacattagctttagggatggacatcttcacctggatcataaggggcacatgatctaaaatgtgcttagaaagagctagaaccatagtgatcggata

SEQ ID NO: 12160 - DNA, 10522 bp, Oryza sativa
  unsure (1)..(10522): unsure at all n locations
accgggactaaagatgctcccatcttaagtcccggttgggaacaccaaccgggactaaagattgatttttagtcccggttatttgaaccgggactaaagatagcgatctttagtcccggattcgtagtcccggttggaaaacgggactacaagggggttacgaaccgggactaaaaagcatttctccaccagtgtggaaaatagttcagagagtggttgccctataatagtcacacatcatatttacacgatatacaaaagaattcatataacatattacctacattatacttagtaatttggctctatattttgtatatggagtgcatatatagtattaagctatctatctaaaatactgtgtctagcatatatgtctaccaattaatagacgcacgtatcctctctcctctcactcacctccacatcaaaaaatatactatgtggcattctctcctacacggtgatcgtaccattattcatgcccttagtgctaagtgtgattggttaaaactggaaacatgtaacttaaccatgttaatatcctatattatagaaaaggttaaacaatttattaacaaaaggtaaaacaatcgatagcaagaaataaaaaatatgttattttaattttactaattctaacagcttatatacaaaattttaaaattacaaacgtgagactaaattcaccgtttgtttgtgtatactgtcatgctataattctccgtaggaattatacaaacataaaaccaaaaccaagtacatattgaatgatattttttaatatatgatatttacatagattttattagtattaaagtaattactctaaaaagtatacatgtgcccgaggggaaaaaatcacatgataaattatccagcgcgccaataggcacgccaataggcgcgccgattttctaatgaatactactactgtccttcagttgggcacaagaaaaagtttacttctcgttttcgctatcaacggtgtgtttcatatttcttctcattttcgctatcaacggtgtgtttcataaattgtgtactgtttgcaggccaggaaggacctcgtaccacgtgcagtacagtcatactcctaaggccttgtttagttcctaaaaactttttccaaaaacataatatcgaatctttgggcatatatatgaagcattaaatatatatattagattatgctagaaacttgaaaaaaatactttgcatttttgaacaactttcaggactgaaaatcaattttaataaaagtgaggttatttgtttgggagaagcaaaaaaacaaagaggagtacagtaagatcttcacttccaatataggtaatttgcctataaagtatttgggtataccgattaataaaaaatgaatcatgaataaagactggaaacagactgaggagaaaatggaaaaaagggtaggatgttggcaggggaatttgcaatatataggaggaagagtaactttgataaactcttgtttgagcagtacacctctatacatgttgtctttttacagaatttccaaaggagtgaaagaaaaaattgattttataagaagaaggtttctttggcaagaagaccaaaggattaggaaataccatttggtacaatggccagtagtttgctctccaaaagagcaagggggtttgagaattagagacttagacattatgaacaaagctttgttgggtaaatggctttggaacctggagaaaattgattgaatgtggcaaaagcttttaaaaagaaaatacctatcaaagaaaatcttggcagcccagaaaatcaaaaagggggcttcacatttctagcaagggattatggaaattaaagatgttttctttagttattgctggaaaaaaccaggaaatgggacaaatactctgttttgggaggataactggatggggggagcctctggcacaaaaattcccttacctatacagagtcacacatacacattatataactctggcagaggttaaacaaaaaggttggggtagcataattttagaaggaacctattgggagacaatttgagggattggaattacattaaaagttgctgtgatcaagtaagactccaaagatgaaactgtttggggactaaccaaaaatgggatcttcagtgtaaaatccttttatactgctatgaaaatgcaagaggctgcttctatgatgggggtgatacacaagaagatttggcagataaaagttcctatgaagatcaggatcttcctttggcttttgttgaaagatagtgttctaaccaaagacaatttaaagaaaaggggttggaaaaaaggaaatgaaacatgtcagttctgtgataaaaaatagtcaattcaacacttatttttttattgccccatgacaaggcttacttggaatgtggtggcatgtacttttggtttgcaacctgtgaaaaacattcaatatgctttgggttgggggtttggatccagaaatgggataaagtaacaaaatacttaatgttggtggggatagcagctgtgcggtggtctgtttggaagacaagaaataaagcttgttttgagcggttgttgccataggaccccactgaaattttatatcaagcgtgctcatggatgcatgattgggttattctgcagagacaggtgggaaatcaagaaaagctgcgatggggaatccaattgctaaagcaggtcacaaatgaggtgttcaattcaagacatggatggcgcgcccttcagaaggattacaagcagctgagcggattagaagagaggagagaaatatccaagttttgaacaaggacacatttgttagcctgtttaggagagtcatctgttaaatatctgttgtcgcttttataaactctaaacgcaattgtgttttctttttttctcttatactgtaaactgtgatatttctcttaatggataaaaagaaaactaattgcacagtttgcatgtgaaccgtgagacgaatcttttgagcctaattaggccatgattagccataagtgctacagtaactcacatgtgctaatgacggattaattaggctcaaaagatttgtctcgcggtttctaggcgagttatgaaatctgcaggacaatattttttatcacaaatgtgagcatctacaaacaattgagttttttatgagaaagttaaagaggattttagttctaaaactttagtgacatatttcttgatatttgattctgagtaaaatntagctaaacacatattttttggtcatggttattggacatcacaagtcatagtgtttcacgaaacctcatcgagtctaaatttcaattcaccaggaatcaactggcacatccaaacgagctacgtatttgaaatgattatcaatttggtattattaattctgttgtggaattatttttttacgataaactacaggagaggctcctacgactgtgattgtagaattattgaatgatgaaaatattatatttgagaattcaaatttctattatttatttgagaattcaaatttctatcattacagaccacaacttgctattattaatccaaatttcgaagaaactaggtattcataagaatacaattgattgactatttatttgttatatttgttgttattaatttcaaattttggatttaccaaataatgaaataaattagattattttgtgagggaaataaactataattcaatcccgaaacaaagtgcaatttgatatttatttttttgaaatttgaaataattaaatcaccaagaaaactaattaatattttattagaacaagtatgagttggaatttaataactccagattctagaattattacattatgtacaaactttaattgagactctagatcaagtacaactctatattataattatatattattaaatcataaacaaacttatatcttagagtgacaaccaaatagaacgaggccatttattaatttagaatttaaaaattaattttcacattaatttagaaactaaaaattaatatttatttaaggctcctagaacagcaacttaaataaatagctctcccatgaaagtgacatcatgggaatgttttctgtcattcagcttatttcttgtttaggcctgtttagttcccaaaataaaaactttcacgctgtcacatcgaatgtttgtacacatgtatgaagtattaaatgtagggaaaaaaccaattatacagattgcgtgtaaattgtgagatgaatcttttaagcataattgcgttatcatttgacaatgtggtgctacagtaaatatttgctaataacggattaattagtcttaataaattcgtctcgtaatttttctgacgaaatctgtaatttgttttgttattagactacgtttaatactttaaatgtctgtccgtatatccgatatgacaaccaaccctaaaaattttccacaactaaacaaggccttaggccgtatttagatgctgtaaaaatttggccaaaatttttttttgacgtatacggatacatttgaagtattaaacatagactaattacaaaacaaattacagattccgactgtaatctgcgtgacgaatcttttgagccaaattaattcgttattagcacatgtgggttactatagaacttatggctaatcatgatgtaattatgctcaaaagatttgtctcacgatttacagtcagactgtgcaattagtttttctttttgtccacatttgatgctccatacatgtgtgcaaacatttgatgtgatgaaaaaataggaagtttgaagaaaaaaagttagaatcaaacacagccttagtttggcacgtttagctatgagtaaattgcgccagcggtaaaaaacttggcaggtgggtacgatttagtgtaaaaacttgtaaaataagcaaactggtacataaacttaacaatcatgtgcattttgataaaaacacggttacatacctatggttcatcgtattttattggttgtatttgtaaacatgactgctagattaattgttggcaatgagtatgttttacagtgctcatcaccgaatttgtatgatcagatggatcgctcggaaattttgttagttggcatgcacttagttttgataatcattatttttctaattttaaataataggttattttagtattataaccaagcaaatgcaatacatctaaaaccttattcggaactcaagatgacctaactggctgctttttctttacatagctgaaaaagtatggtgtggaagagagatattttaaccaaaatgcacgtactaaccaagttgttacatctatataatcattttttaaattcttgcactagatcgcacccacttaccaagtttgtgtactgtagacgtaatttactctttactatcaacagtgcgtttcatagatgtgtgtcctgctcgcggcccgctgggacgtttgtaccacgtccactgctagctgtcattgatcctaataaaatttctcccacttgtcagcaacaagtgcatccaaacatacagtttattctagaaatcacaaattaataagagcatctacaaacaattgtatactgataaacttattggaattttaattctaaaattctaaaatcggggcgttacaaataaattcacggcataaatttttaggacaaacagactataattttaaaaataaatgctctataaacatattttcaaatatgaacctatttgccagggtaagattgccatgctggtaaccaataatgccgtatatcgtttgttaaaagaaaaaaataatggcatgaaaggatttcaccatagtggacaatgcaaacacttttactccatgtaccatggtgctacagtcattttggtgggaaaatagggtagataagaaccggtctaaaattttcacaagaccaagttcaccaagttctggtatttttctaaaggcaaattttgctacaggacatcctgacttcgcggttttagctgtgggacaccgcgccgaagtgacttttgggggaagaaactctcaaaagttggatatttgctggtggacaccgcacccattaaaataataatttccaggtagggaggagagagaaatcacgtgaaatatcaaaaatacccttgggcccacatgtcagctctcctatctctcctctctctcccctcttcccacgctaagatggcgacatgctgaggtgcgagctcgccctggacgccgggctcttggccacctccgtgccagagccggtggcgtcgccgacctgtggctgcgccatgtcactctcattctcctccaacaaccgcatcatcatctccatcgtgaatgcgccctgtcactctcattctcctccaaagatttctaatgcttgcaggcttgcagctcaaaattttctcatatgaagatgttggaaattcgtgcattccattaacacatactgtgtcagcaaccataaaaatcactcattgtctcctttattcaatcacaacttggcagagttcatcaaatcaaagtaggaaaatttttcgcacacccaacagcaaacaatggcgcgtggccacgaactcggagatcacgcgccggcggcgttaacgaaggcgaccatcctgttgagcaactccttggccttgccgccgtcggggtcgaacaggtggaagacgtggccctccccggccgtctccagcacctccaccgacgcgtcgccctttgccgcggccactgcggcggcgtacgcgtgggcgcgccacctgaggaagtcccccaccgcggcgcacaccatgaccctgtcgcacgccatctgccccagcgccggcgcgccgggcaccatggggttcatccgcgggtcgtccatgccggtggtgcaggggcacgcgtacatccacagcccggtgcccatggcgcacccctcggggtcggggtactcctcgccgatggcctccgagccccagatctgggactggaacaacgtcatgtcccggcctagccagaaggaggggatagagaagagagatgggagagctgacatgtgggtccaggggtatttttgacgtttcacgcaatttctctctcatctccaatcaaaaattattattttaatcggtacggtgtccaccagcaaatatcaaactttttagagtgtcttccaccaaaactcactttgcgcggtgtcctacagctaaaaccgtgaagtcacaatgtcctgtagcaaaatttcccttttctaaagcacttggaatggtgtggtgtgatgaaggtagggtgctacagtaatttaattagattaatgggagagatagttttgattggaatcatgctatacgtacgacccatccatccaaccggcgtaccactgaaacggcagagcaacacattgcgagacggcgtgatgattcgtactgcatgctgctgacgccgcgtacatcgacattgtagtcatctgagagtcggatgttgggtcgtgtgtgtagcattttccttttgattgtaagcactggtatcaaataaatgtcactccaagaaagattggaaaataaattttggtaggttctatttatgtagatggaaaaaaaatctaaattactcctaaactatcgcgatggtctgaattgcacaactaaacaacaaaacaggatatttgatatcccaaactctctaaaccgaacgagtaaacccctaactcaatctgaagcggttgtgtggcgcatacgtgctaacctagtcaacactaaaaagttaaaaataataaaggacccacatataatataggcattcttccctgctctctccaccctaccctagctaaatcacccatccaccgctgccgtgtcctaaatccgcatagcaagcatgccgactgtcgccaccatcggccacctcccagcagcgcctcctcccaaattgtgacattctagcccaattaggatgaggcctatgtagcctacgagagctgtgtgtatatgtttagtaccaccttgctagtttagcaaaagtggaatcaatttataaaggtttgtccctccaaccatactactcccgggttaaccctcttacacgaagcaaggatgaaagtgtaagtggaatggtatttgtaagtgggaatgcccgtcgaatgggttggctacgcggttctagacgaagggccattacaaatggtaagtgaggcacatgacatggcatatgggggccggtactagacatacggacatgcgctaagaggggtgtgttcctgtacatttgcctatatgcctgtgtggctatgtgggtgagttggactgacggggacgtcgggtcctttgaggggggtgtgtgtgacatcctgactcaattaggatgagccatgtgtggcccatgactgctacgtgtacacgtttagtaccaccttactagtttagcaagagtggaccatttgcctatatgcctatgtgggtgagttggactgacggggacgccggatccttgggggggagggggtatgtgacatcctggcccaattaggacgagagctgtgtgtacatgtttagtaccaccttgctagtttagcaagagtggaaccaacttacaagggcttgtctctccaaccataccactttcacttacaagggcttgtccctccaaccataccactcccgggttaaccctcttacattaagcggggacgaaagtgtaagtggagtggtatgtggaagtgagcctgcccatcggatgggctagtgtaagtggagtggtatgtggaagtgggcctgcccatcggatgggctagctacacagttctggaggaagggttgttacacagacgtgttccctagttctggctccggctgcgacctcctccttgtcaatcccattgcctcctcaccccttccccttcctcctctcccccttcggcagtcatgtctcgagtgacgacctcctcatagatgagcccgctcactgttgtcctccatgaactaacacgaggagcgtgccgcacgctgatttggtcctagggccatggcgcgccgcgccggcaaatgaaaaactctaacgaatgttcgggagttagggaataatttagaccccttccccttcctcctcctccttgtcaatcccattacctcctcaccccttccccttcctcctctcccccttcggcagtcatgtcccgagtgacgacctcctcgcagatgagcccgctcactgttgtcctccatgagctaacacgaggagcgtgccgcacactgatttggtcctagggtcatggcgcgccgcgccggcaatggaaaactctaacgaatgttcgggagttagggaataatttgggaaaaatcgggaactgcaacctataggtcgacagggaagacatggctgtacgagtgcatgtcgcgggagactgatgacatggtggcgtggtttttgtgtgttaacgtcaaaatttggtaagccccgaagtcatcatcggcctaaagtcagtatcggcttcgagttctggaattggctaatggaaattatcaacttctagtagttggattcttgatggattcgtttaagaaaattaatcaattaaagaaagtttatctagaagagagttgaaggaggatgcggcatgacaatttatctattaattagtcagagttaaatagtttcttttatttttaagaaagtgtgtttaatgcccgatctggacttgtgtttctccttttatctttaggaaagtttgagttttatccaataaggactagtatctacacataggtataaatatgtatactcgagcccttgtaatttatctcacggatcaatacaactaatctcgacgcattgccaccctctttttcagtatttttcttattatcggcggaacttggcacctgacacggggctgcatcggctttgatctccggcgaaggggtaaaccctacgttctattggccttagtgaatgtatcggctacatcggtgttgttcaagactgcatcggttcgacctcttggattgctctggttcggttaagatatttgcctacctgatagttcaattttatctttaatagcattgtgtttagagacgtatcggtttagttgagactgtctcggttaggtctaatcttctgacttagccaatatatctcaacaatcacaatgatactttagatagattagttatatccatcatattagacagatttattggctcattgagtgcttcattattatatacaatctcatgttctattggttaggtctgacatactatatagttgttgataatccctaagtcttgctaagcccataggttcatgctaatgttttatcggagggttagccgatcttatttgatgtgttaaatttccctttgattgttttactctcttagttaaatttaatacatgacgagcaccctggaaaacaatcaaaggctcgattgtttacaccttatacttccttcatactaagtgttcatcaattgggtttgacctactaagtcatacttggaattgtaagaactaacttgctgtttggttgctgataagggtagcatcgggg

SEQ ID NO: 12161 - DNA, 3824 bp, Oryza sativa
gatgggttatttatcgtcaatatatctatctcgtcagttacatgatcaaattgattgacacgcccacatctcatcaaatattaggaactacacagcagcagcagaagatctcccaaaccttcgtagtgtttttttttttgcgtcaacactgtgccaaggaggaggataaggccttgccggtgagctcaacaggctggccgtcaacgcgtacttaaggtaggggagggaagagaaaagaataaaaggaattgagtaacaatgactctttaacatgtgggtcctccgaattttttctttttttatgctggctgaactaccacgctggaacaaaaccaatccagatcgagatatggaggttatttgtctaatttaaaaagtttgaggttttacatatccggttttgtagtttatggggtgtaattcgaacggccgcgagtctaggggcaatccagattttttttctttttaaaatatcaaattttaaaaaggtttaagtaaaacagaactccatgactccatgtgtttgatggtctactgcaacaagtggtaccgcacttattaccaattaatgtagctcggtttcttgctactccgaggttcacgacttgttcaagttttcgttgaaacttgcttttgtaaaaagaaaaaaacatttttatactttattcacttcatcaaaacaaacctctttagtttgccgattgggatttagacaagaaaccgaacatgctgaaccgccaagaaaattgcacagtcatgcaattcggctgctgtcttatttaatcaaattgcacatgcgcgaaaacattaagaaagccacagcaagattcaggataatcatcaagaagagaactatccgattggccatccaccgaattcaggatttcaggtcgtcctcacgcctacgccccctgaggagccatgaccgcggcgagcttcttgacggacggcctcgccatgagcctctcccaccatgccttcacatgagggtacgagtcgaacagcgacgcgtacggtgtccccatgaagtagaaggtgtaggggaagtggttcaggtcggcgaagctgacgaagtcacctgcgaggtacgtgctctgtgacagtcgtgcctcgtacacctccagcaccttcttcagcttctccgcgctctcgtccacgaccttttggttagttgggatcccacgcatggctgggttgatgatgcactcgtacacaatcggtgaaatcgccgagttgtactggtgtgtctccacctcggtccagacatccaccatggctgcctccctcaagttgccttcccggagtaggtcagcttccctcgtcttgtacttgcgtaggatgtactttccaatagcgcgggactctgaaacggatatgacgtaagtcagatttctgagccctcgctactacggtgctctataattatcgttgatctgatttgatcaaaatatttaaatctatttataataccaccttgttagttagtggtagtagaaaagtaaagaggcattatgttaaaaaaagatatgaaagggtataatcatcacttagcagtgactaaattatatatatttttgttttttatgaatatgagcgataccaatgtaatcgatgaccacatattgatctagccggaaaaaaacataaatgataaatttaccctaatcactttattagtaaattactagtttactattaatacggttcagattatttctaccagtagtatatcactataaatagagagcatcggagtatcgcttaacggtgtattattgtgcagtaaaacatgtttagtttggttagttctgtgttaacatcatgatgacaaaaacatttcagcgggaagtagctagtcatgaccaagagtagccaccgacactccgacaactccagatccatctcattagatttattagagttacaaaacacgctttttagttattttcaatcttactaatttttgataggataatgttatttatattggtccaacataggcaatatgcagagtgatgtctttagatgatatgaacaagatagggctgttctgagggccatatttgtagacgtgtgtcgtatgcttcgtcgatgtaaccggaaaaaaaattgttccaagtaaaacctggtacggctcttaagagttgagagcgagaattaaccgaagctaagctaagatcaggcttacttaccaaagaggtacagatccccgtcctggaaagctgggatttgcccgaacggctacatcaaatcaggcgtcgtcaccaccaaatcaggattcaggagcagataaaatcatgtcgtagagggcagaagagcagaggcatcacgtgtgtacacgtacgttgcgtttgaggtgttcggggctcttgtgctccatgaccgtgaagtcgacgttgacgacctcgtactcggcgccgacctcctccaggcacaacagcaccctcgccacgttcgtcgattgcgccggcccaaacaccttcaccggcgtcatcttctcagctatccgagctcacggccactggtcggctgcgcgagtgagcgtgcgcaaacaaggaggagtctttaattggagcttagctggtgtgtgttgtacgtgcctggtggtagctttagcatgcggtgcgcgaggccggcttttataagctagcggtgatttcttgagagaaaaaattgcagtggttggtgtggtgcgtgggcgttcgaccctgttgggcgcaaagatagatttgcgaccaattcttgtggcgcaaagaagagcataaagcctaacgaaagagcactagtgttaccactggactggagcactagtgtgtggtgtttaccatgttgggcacaacacacacgtgctgttcgtgtggtgcacagagaagagctggagagatcgagttctggatggctcgtctggctagctagctaggtgaaagagccggtacgtaaaaggcggtgataatgagtagtgccttctacgaacaacattaaccttctggaggattctgaaggtgaaaagaaaaggtgctcgtggttggctgcagtcttgcagacgtcagttcaggattcggaaggtgaaggtgttggtggttgccggttggttgcacagacgtcggctccacccgaatacagtaccgaatgtgatccattccattactgcgaatccgtgactggaacggcgaataaaggtgatcttcattcgctggggaagggaagaagaatccagtccagtccaggatggagctgcttgcgtacgcacggtacatttcgctgtaaaacgcccttcaaccacagaaggaatagttcacctgtgctcccttaacttaacttatcgatgaacccgattttcgtccttcaaccgaaaaccagatacaacggtacctttattgctaaaaccggtgcaatataagtcccataacggtttggacgacggttttagctgacgtgacgcctacatggctaaattgactcggtcttcatctgacgtggcaatttgatatggaaaataataaaaattgtgaccccacatgtctgttataccaaaagaatgaattagaaaatggtgggacccaaatggccccacgtatcattctcacccctcctctttttcctcctctctccctatctcccctctctccatctctctccctttcctctttctaggcgccacagcatctcggggaggtccagtggaggcggcgggcgatggcaacgacgacgacatggagggtagggcgtcggcggttggagcgcttgggacgggctccacacgggcatcacccacccagagaagctgctctttgtctttgcccgcggcgttggcgcagaccctg

SEQ ID NO: 12162 - DNA, 597 bp, Oryza sativa
tgggagatgtcttggctgtaaagacagcggccaaatcatcaggaagtctcatcaggattgagggataggaccgtcgtcttgatctggtcgcggaggagtagattggatctcgtccgagtggtttgaagccgacccgagagagatgatcttggagtaggcctcggccgagttcggaataccgaacggcgcggggacatggtctctccccgactggttcgaatccgagtcaaggagagagatcttgctgaggttgttggtgatgaagttgaggctatcgaaccggaacgcctgcccgggagggaaggcgaagtcgtcgatgccggagacggaacccatcgtacttagtcagcaaaaacttgatgctgcccctacctggcgcgccaactgtcgaaacaagatttcggcaataataaaaagggggtggctatcaagctaggaaagtggatgggtttgaagacaaggaattttatacaggttcaggccttcttattcaaaaagtaataccctactcctgtccggggatgattccgccgagtatgttattgattgtataaactggaaaaaagatcacgcccccgcacacagacccctccttat

SEQ ID NO: 12163 - DNA, 582 bp, Oryza sativa
agtggatcccccgtttttatttttggatcaatctttcccttttgtttagttttgttttagtgatatgatctgtagtattctgaaggtatctccaaaagcatgcggacatacacagggaaggaaagttgtctcaagggaggaagcaattatgcatataaaagctgctgtagatgccaggaaggagagtggctctgacattgttattgtggcaaggacagactctcgtcaagctttgtctcttgatgaagcattatggagagtacgcgcttttgcagatgctggagcagatgttctatttattgatgcccttgcttcaagagaagagatgaaggcattttgtgcagtatcacctggagttccaaaaatggttagatctgttacatgctatcttgcttatccaagttgtctgtgatggccatgaaacaattgtctcatcatattctgtgctatcttctgcaggctaacatgttagaaggtggtggtaaaactcctattttgagccctgctgaacttgaagaaactggttataaactcatagcatacccattatctctgattggggtatcaatgcgtgcaatggag

SEQ ID NO: 12164 - DNA, 1230 bp, Oryza sativa
taatttgttgacttgaccaccctaaactctctctgcaaggaaactgcccaatgcttcactgcctccttcatctcatccttatgagcataccttgcaccgtcaattacctcgttctccttatactcccagggtacatgatcaccctctgatataacaagtccagagaagtcctcatttgcccaatcagtggccattacatcaccttcctcatcggatgatgcgtcgtcgtccgcttcctcattatccgaatcttccctctccatttcatcaacaattataccgactctctccccctcatccgccatgcccatggcctgctcctcccttggttgattttcctcattttgcatcgatggtccaacaacatcccctgcattgataggaccctctacatcttcggtttgcattgaaacatttatatctttctcttgtaccgacacaaatataacgaggggccatgaccgttcaaaagccatttccacataccgtctccaagcagcagtgctgtccatcggtattagttcccaaaaataaccttctgttgcacgactcactacaactgatactgtcattgtgtagacttcttggtctattctaaatcctctcaacaaccaactataaattgactgaaatgttctctccgcaggcctatcgatgcccttagatgtcattacaaaatctgacagataacaccatctggaccaaatctaatatttccttcaccgtgaactatctgaaatgtgaccttatttgacattgtgcctgatgaaaacaataactgcgttaacctcgcatttctgtactacgccctaagttacattctctacaatattgttctccaaaattctaaaagtaggttacattctccagatcaaactaaattacatcttacaattaacactactgtctatgtctcaattcatactattatattctatactctggatctacacatatgtgctgtgtgctacagatatgctaaaatatatggaactaaaactaaaacgcaacatatatactcaaacataacatattagtacaaatgtaaaagatgtatgggagcaaacctgtgatgaagtgagcgaaccagcagggcttcgccgctccccttctgctgccctcccctctctctctttcgttttttttggatttttagtgaatataatgaaatttcagagaggggggactgggctttatagggggaggcaaaaatcgccctcccccagggcg

SEQ ID NO: 12165 - DNA, 843 bp, Oryza sativa
caaaatgctgagacaggctgctaacatgtacacaccagtggtctttgaaatttttcgcagggagtttgagatgtttgtcgattccgtgatttatagctgtggagaggatggaaatgcattcgaatatagagtagcagtaacagataggcctggggaacactatgttaggtttgactctggcgacttatctgttgtatgcagttgtaaaaaatttgaagcaatgggtatccagtgttgccatgtgttgaaagttctagatttcagaaatataaaggagttaccacaaaaatatttcatgaaaagatggaagaaggatgtcaagtctgcaagtacaggcaatcaagaacttctgaatggaggagtttcacaaattcccagctcttatttgaatgttcccgtgccatttatagatccacaacatgtgcaatcaaataacgagcttaaccatgtaagttgatcaaatataactattcattaagtttattttttatccttagtaaaggttgaggttcaatatgcgtgatcaactacaggacacttctgtttctaactcccaccagcaggcccttcatggaggtgcacagggaagtcaggtaagaccccttggtagaactgaactcacttgtgcaatacttaatttctaaaagcaatattggtgcttttgctcttctcatagtattttgtatgcaccgccttctgaggcaagcaatccattaagtttgtatgcactcaaattttgttagaaaaatattctcaagatcgccacattccatggttgtatacgatttgagaccactggtgacaaaagaatacgctcacatctttttgtgcatttctggcttt

SEQ ID NO: 12166 - DNA, 1817 bp, Oryza sativa
atacttttaattcaaacgacatgaaggtcaaagcccaaatgtaacaaatcaaacatacgggaaacatggattaccaggagaatgaagcagcacaaactggtaatccacaaccgaacatatcaaccacctaaaagcaaaatcgtcaagttacacgcaacagataaaaaatgcctattttttcaacagagcggatgcttatgagttataccttcataggtaggtctagccctgaagaggaagtatgcaatgatacacctagatcagccgatcctgtaattattcaaagaatcagcatttatgctacaacatggaattcttttggcaatcaactagtttaccaagcaaaagagggtagtcctctgatgcaagccacatagtccggaaggcaacacgcctcagtttcaacctctttatttgctcctcatacttcatcctatcaggtcctttgccttcaaaattgatattcatggatatcataacaatactcaaaaactggttactggagctaattagcagaatgcacaaaccagtgataatgaatagcatcttgggtagacaaattgcttcccgttcttgatatcaatccaaagctttccctcgtccattgaatcatcttctcctaaagttgcagcaacacgtctatcgtacataagtgctgcttccagaagtatgctgaaatcttcatctggtgtcctgaaatatgtggcaaaggaaaagattcttaattttactttcattttaaccacatgtgctgagtataaataatgatacaactaggatcacccagatcaagagaacagaccagcttgtgctgctgacaacaagagctggtctattaggcttcaagaaaatttcaccatcgacccagcttgtaaatacagtagtgttcctgtcttccacttctttctctgtgttgtaagagcaaacagtagaaactatatcaaagtgaaattttcttacagcaatcaaatatttagagtggctggagaacataccaacagaaatgcaatcgtcattgcccatagcactacaaatggaattccccaacctgctaaacaactatttcatctaatggtcagataggcagtacagcaaagatgaggaaataaatgaaaacagatgctcacctcatgtttctctgtcaatgaagcaggatggaaaaattcaggagattgatcgtaaagaactgttgcgctgaaatccaaccagttaagttaatataaactgtagctagcgacttcaaaaataaaagtagttgtgtgctaacacaacagccttaaacatgaaaagtgcctgaaagtttgatcttacttgattccccatttttgatcaagctcgtgtttcattgcttttgtaacacagaaggcaccatcagccatccgtccaaaatgcttctcgaacctagaatgcaaagaacacaccactatattaacacacacaatcagtatgctacatctagcagataaacaaacaggacaggaattaccagaagtagattttaacaatgatatggcttctgccatgagacaacccaagcagtgtatatccaaagttatgccagtccacaataaacttagcacctcttagccagctagccagttttacagcagccaatgttggaacagagggtggattctgttggacagaagatgatcgaataaaagaatcagttccatgctagtgtgtgagattttcgaattaacaaataaattgtaagtatcaaatagaaggatttctaggtaataaaagtccatgtcagttagtaaggccaaaagatacttacaaaatgacaaaacttcgcctaagtaaaggctgca

SEQ ID NO: 12167 - DNA, 1301 bp, Oryza sativa
atacttataattctaaatttaaatttattttttaataaaataaatatattttaaaagtaaattttctagttgattattgtgatttttaatcatagtttatcttaaaatatttatttttaaatacctaagaacatatataaaaaaattatcgttaaattattttttattgctaacacataatcaacaataggtcttgctattgcactacgtgtctacaggtctcatcttttcgtttatgtttatgtttagtagctaaaatttaaatttttaacattaaataaacattaaatttgaagctaattttgagtttttttatcgaaatttatttttcagtctttgtttttagattgctaagaacacatatataaaaattttattcataaattatttttcgtttacaaatatatcgtttggcttattccacgaataagctaacgatgggaccgtactaggggtgaaaacagtacggaatttttccggattccggtcatgttttcggaaacggaatcggccggtcggaattttttcggaatttctcggaatcggaatcgaaaacggaaatattttctcggaaacggaatcgaatatgataaaagcagtttccgtcggaacccggaaacgatcggaaacattccggaaaaattgtcggaatttccgaagttaaaaatcccatagattcaatagtccataatttatccctagcttcccagcccaacccaaatcgcggcggcatctaccctaaccggctaaccctataggagagagaccgtcagactcagaactcagacgcgactcgcgagttggaggctgagcgacggctgcggcgtccagatccctgcatcgcggcgccggcgtgccctcacgcccaccgcccgtggcgcgggcgccccaccgcccaatgctggtcgcctggccgactggcccccgcagtcctcgcccccaccatctagcgccgcccttgctcttcgtcgtttcgccgccggccaccgccaccatctcgcacctccgccggcctgctcggtccccgccatctcaaggcgccgtcccaccgcgtctcgccgtttcaccgtcgccaccaccgccgccgccgacggaacaaccaccacaccgacgaggcgacgacgacaccaccactgcagtctcttcctcactgccaccaacgccgacggctcctcgcctcgcagcagccagcagcccagcggcagcatctgagcaaccagcagcagcaggtgtatatagtgattgactttgcacttttactaatgctctatcattttttttgaaggctatggaacggaaca

SEQ ID NO: 12168 - DNA, 1469 bp, Oryza sativa
gcaaatatcatcttctgtgaataaaaaaggaagaaccaactgatctacataaacataaagtacgcatggtttatatttttagcaataagcaagaagtacatatccaatcagcaagagtttctatttaagccccgggttaatataaagaatccaaatatgccatgagcgagggagtaagagaatataaccattgccctaggatcacaagaatttacttttggagcttgattgttagggaacaaatatcaaaaactgctctttaaattaatggatgtcacttattcactctatgcaacaatcacttagatcccctacatccatctcagtatcatctgcaagagcgccatcatccatgatatcatctgaatcttcacttttgacatccaatatagaatcagtagcactgctactatcatcattaccaaacaaatagtcctctgaatcaaacaactcggcaaatttaccaagattcttgatcctccctctatagctggtaagttgaagaactttttccttccacctcaccagtgggcacttttctatcaattttgtcccatcataagacttcgtcaagagcacgctaaaccgcttccccctctctatcacataaaagatgccataatgcttcagaagcagcctcatcaacttctgcggcataacaaactcacgacagaaatatgtgaggtgatcaatcaccagcctcttttccaacgtgaagttcagtacctcgtgcatcacagcaactgccctcttatcaaattcaggcgagccaggagtcaatcctcttgcctctgaataaggatataggtatgttgtcttctgaaactgctcggtattcccttttttcacataatgatgaacttttccgtagaatttgtagtaacttgtaaaatttggtgggaacttcatggggaatgatagtgagagctctcctggtggactgccaatgccgttagcatttgcatcaccagtcaatgctgctgtctttttctcgagctcggtgactgcccagtttgggttccaagagacaagctccaggtaatcgccatcctccaacctgaccaccctgaactgctcggggaacatgtgaacccatcgtgtcttgaaatcatgaggaagccccatgtcgcgcctgaaatgtgcaatcttgtcgatagccagacgacggtccaccgacatcatcagcagcctggtgacgtactcagcggccgtgcgcgagtgatcctccagcaggcgcgcctcctcctcgatgagcgcctcggcctgcggcgagaggcccgcccacatgacgccgcggctgtcgcggcagacctcgaagagctgcggcgagcggctcacgaagtgggcgaccttgttgggcttggtgagcccaagctgcgggcgcaggatctcgaggcgcttgagcggggtgacgtgctcctcctccttcttgagcgcgtcgaagacggcgagcaccttggtgagcacct

SEQ ID NO: 12169 - DNA, 691 bp, Oryza sativa
accagatttcaaatgccagaatttcaaggcctggttcaggagcaaaataccccaattgacctgtgtggtcttcacgtaagcgaggcgatacacgccctgaactatgagctcaacaaccggcggaagattgctcgatccacaggccgtcgtctccaggtgatcataatatcaagcacacgtactccggcgaggctgaccgccgccgtcgagcagtacctcctggagcacggcattcagtatacgcaggcacagccgggccttttccgtgtcctgttacagtgaagtaacaggatggtaggctcatcatgtttgtgtacacctttgaaagaagaagaaaaaaaagaggaggaacaaaaaagaattgacccctgtactactgtatatggcagagatgagtagtactagcagaatagaaatttgaaatagctgttgtaatattcgtatagcaaggcttttttttttgtcagcaaaaaacgttgtaaaatttgcggaattaggcgatatgttctttcaatgtggcgtccctagctgctcgttccaatctaacacgcatgcgatgcaggatgctatttggactggaatcagctgatttgcgtgcagatttgcgaaagtaatacatgacgcgacacaccatgattgatcttcgtttaaaatcaaaatggttgacaactttctttgcaagatttttctt

SEQ ID NO: 12170 - DNA, 686 bp, Oryza sativa
tatgatggatagaatccttataaaattgatatgtgattgtagaattaaatagtgtggttttgtgaaacttaatcatgatacgtgaagttctatgccatatgccaaaatctatgaagttttgtgtaatttggaccataatacgtgtggtttgtaaaatttactctaaactaccattttgaaatgattattgggtgaatttcagttgaattgttgaactaaaatttctttgttttgcttaggttggggagagtggggtgcagttgtcaggtgggcagaagcagaggatcgcgatcgcgcgggcgatcgtgaagcaggcgaggatactgctgctggacgaggcgagcagcgcgctggacctggagtccgagcggcacgtgcaggaggccctgaggagggcctcgcggcgcgccacggcgatcaccgtggcgcaccgcctctccaccgtgcgcgacgccgaccgcatcgccgtcgtcagcgccggcagggtcgtcgagttcggcggccatgacgccctcctcgccggccacggcgaaggcctctacggtgccatggtgaagtcggagactgaggcacaagcgttcaagtaaaaaaaaaaaaaaggttatctcgttgctgggggatttgcaattataacactgcaaatattaatctttgttataatgatactagacccatatttcatagat

SEQ ID NO: 12171 - DNA, 1096 bp, Oryza sativa
cattcatacctagcagcagaagaattatagtgctctataaatcatagaacaaatcaccaagcgtaacgcagatctatttcacacgagtgctctataaatcgtggatcaaattaccatgtgtaaagcagaatttctcaggagtgctatgtaaaggttgtgtttagttcctgaaaaaagttgaaagtttggggaaagttggaagtttgaaaaaaaaagttagaagattatgtgtgtaggaaagttttggatgtgatgtgatgcgatggaaagttggaagtttgggatagttggaggtgaactaaacacggctaaaatcacagaacaaaatcaccatgtgtaaatgcaagaatttcagaacagtcgaaggaattttatatcattaatcaattcagtccccataggaatcgaaaaaaaattcaaacgggatacaatatactacagtacttgtcagatccatacacccctctctagtcctgatctaccgactcaaggccattgcgcttcagtgaccgtgcttaattatacgccgcgataactagggtaactgctaatcacgaaatcttcatacttccatggtaatcaactcaaggtcaggctcggcgaaatcaactcaaggccgttaatgcgacgagaaccatcttccaactcgaccggccttgcagcatcggctaccgggtgaccacatggcgatcaatcgatcgagctctcaattctcaaatcgcagacgtgacgtcgtggcgatgatcatcagcgcgagtgcatgtgtccaaggcttcccagcgcgagccaatcctcgcgcctctccacggccgccttcgctttcttcgccggcggctgctcctcctccgccgccgcagcacggacgacgtacgacgaccgcgcggaggcgggggtggccttgcgcttcgccaggaaccgcttcagcgacgccttcctcgcgatcggcatgtccaccagcgcgggcggcgcctctggcgcgccgccgccgccctgcgccgccgacgcgaaccgcatcagctcggccgccatggccggcgtgcagcggtcgatcaccaccaccttcccggcgtagaagatcgtgaactgctgccccccg

SEQ ID NO: 12172 - DNA, 661 bp, Oryza sativa
ttagttctccaattttttttccctaaaacataacatcgaatctttgaacacatgcatggagcattaaatataaattacaaaaactaattgcacagttaggggggaaatcacgagacgaatcttttgagcctaattagtccataattagccatatgtgctacagtaatccacatgtgctaatgacagattaattaggctcaaaagatttgtctcgcggtttccaaacgagttatgaaattattttttcattcgtatccgaaaaccccttcgacatccggtgaaatatctgatatgacatataaaaaatttcttttcacgaaaccgcgttatgaaattagttttttcattcgtatctgaaaacctctttcgacatccggtaaaatatctgatgtgacatataaaaattttcttttcacgaactaaacaggcccttatatgctacacatcactaagttttggaaaacagtttgttggctaccattattttgttggagtcttgaatgcaagttaggaggcacctttggttgggccccagtccttggaagtgaatgggcagggcagggtcgaagttatgacgagctggtaggatgctttcggttatggccaggccagccggtgactcgatcagtcgatcgctctcacttgctcgtgtcatcaaata

SEQ ID NO: 12173 - DNA, 1750 bp, Oryza sativa
tcctcgcctccggtcaccaccgcctgagctcgaaccagcagcctgagctcctcctgcagcctgtcgagctcgtcggcgcccgccgccgccgtcgtccacggcgtgccagaaccatgacggcccttcggtccccctaacgtgcctatggacagcatcgccgccgcccagccgtcgtcgagctcgtcgccgttccggtggagatcaccggaggtatgagcgcctgcaagagatcaaagattcagcaacaattacgtgactgaaactctgaaacgctgggaattctgaaaggagaaaaaaaaaaccatcgtcacttacgtcgagatgacactgcagtgtgatcttgtttcctcgtcccgtggagccttgtctgcacccagttcagagcctgaaaccgaagtagaaccagcagcagcaacgattgctgaattagcatttgtcattcgatgtaaaaaagttcagaagaaccagagaatcgagtgtgtaccctcatgagcagttctcgtgacctcttgtgtgcgagttcagaagaaaaatgtggatgaatggactcaatgggaagaagaagatggatgatgatccaagactccaagttcactatatataggggtaaactctgatcttgttgcaactttacagaagcatgcgtatgcaggattggagaatgaagaatttctctctgactactacagtgtcaaggtgattactgtcacatctcacaggaattatggcagaaatgcagagctcaaagatgaatggcagcttggtactccttaacattccaaatagggatctggcctagttgaggagagatgaacagatattccatgtgaccaaattactcaggagatttggttgatatcttatcttaggataggctcatggccactgccatgtccagcaaactaggatgcaattttatatatcttgagctgtacacattcccagttgagcttgattggaagcaggacccagtaccgatgaacaaaattcttgattgcagctgagatgaaaagggaaagtcagtactagagggggaaattgcaccgagagccgagaaaagaaacattaagatagatcgcagtatggtgcttccaagaagcattgccgtgtgacaaacttagccacataaattttcaagtgtttgttgccatatcatgtgtttgctgtgttctgaaattgacggtttcatactcaaatcaggaagcaagtaagcaggatagtgggagttcttgtgtacttttttcggcgatcagtgtggaaaatctaatatgttgtattctgatgttttctgatatattggatcgaccctctcatggggtatatataggagtacataggggatagagacttggagtataggattctatctctaggactctatcttatctctaggatatatctaatctctatatttgtatttgactcttatctctaactaacatattatacttctaacattccccctcagtcgtaacgggagcaaagctaacgattgcgactggatttgaaatcttctatttcttcatctctcggagtcatcatcatcgattgcatctctgatggtcgttcctccacctggtgcctgcgtccccttctgtgtcgtcccttgactctcctctattccctcccgcagtcatagcgggagtgtcatggatgatagcgatgacacggacgcttttgactggagtttccatcaatgatttttgttgtagatgttcgtcgatgtagccgatcatgaagtagccgtggt

SEQ ID NO: 12174 - DNA, 16914 bp, Oryza sativa
ctggttattaacataatataatacaaggaatttatctacagttctggtaggaattgcagctcattcctgcgtttcaaactgtagactgtcaaagttaagcaaaagtaaattctgccatgacgcgattagttttttttaaaggaatcaacataaagcacaatataaaaccatcttaacaggaagcaggaagttgaaacttgaaagcacgaacctgtaagagaaatcaggatccatgagaataatcaagatgtccgtttccacgcaatcaccactattttattcagattattgtcaacatgttcatataccaggcatcggtctctgctgtccgtcaatcgggttacacggtattatcccgaaaattctaattccctttcgtgtaatagtcccctttctacgacgtactagtagtgatcactgatcaggatttggttgttcccctaatgatcagcagcttacaccctttattcagacatcaacgctagtttaatagcactactacttctgttgtcctctaaaagcatctttcccctcttgaacgtgagcttcatttcagatcgtgcgaagaattagcgcactgtattatgagcaccaacactgggtactttccagctcgctacttaaaatctcatcccctactagtaagtgtgatttttcggcattatcgacgtgtcagctagcctcaaaacggccatcgcgtcaacaggtgcactgaccttctctgctacgtgtgcgtcgatctcatcgtgtattccgctacgagcttggagaagagagacgacttgtcctccagtagcctggtcggcgtgtcgcgctccacggccacacctgcaaaagcattggcacggtgtttcggtcgtcagacagacgcgacaaacccatacaatatgtaagataaattgggattggttagttggaactgtggttattgtcgttataaaatcggagattgattagtggcatctgtgattggtttgggacttggaaggcgaactaaactcaccgttgtcaaggagcaagaccatgtcgctgtcaaggacggaggtgatccggtgcgcgattgtgatgaccgtcgcgtcggaaaactgctgcctgagagttttctggatgaggttgtccgtggcggtgtcgacggaggccgtggcctcgtcgagcaccaggatcttgctccgtttcaggatcaccctcccaaggcacaccagctgacgctgacccacgctccagttctcgccgttctctatcactgcaaccaagccaagccaagccaaatcgggagaatattcaccaagaattaccaagtgtaaaagtagactttgaactgcatgattctgaacaggaaaaagaaatgagtccagatgcagagaaccgaacggacctggtgaatcaagtcgcagctccttcctcctaacttcatctcctagctgacagcgatccaaggcctgaaaaggaagggcaagatattcataaatcataatagaacttcactgcaagtccacaaatagtatgtggcagctgacaatggtgaagcatgtgaagactggaactacctcccagatttggctatcagtgtactctccaataggatcaaggttggttctcacggtaccctcgaacatggttggctcttgcgggatgatgcttagcctggatctcagatcatgaagtccgatggtgcagatgtcgatactgtctacgagtatctgaccaacggtagggtctatgatacggaaaagggcctgtatgagagttgatttaccactgccggttcttccaacgataccggtcttcatgcctccagggaatgtgacagtaaggcccttaagaacaaatggcaaatgtggagcatatctcacctgcatcaaattgaaatgttcagagatatgtactaccaggttttgaatttgacatattattggacctgaactcctgttcatcttattggcagtgggaaacgatgcagcttattcaaaaaagggaaaaatattaataaataaaatgggaggataagatgagtgagctattacatggacgttattgagcataatttctccttctgatggccagtcctgcgtcaatttatcatcttgtacagaaagagggggctctgcaggaatgctcatgtattgcagaattctctctactgatatgatcttgttctccagattgcacatgctccatacaacccatgcttgcagcatgttcagattaagcccgtatgtgactgctagaccagaaattcctgaaaacaagatacaacattagctgcaagctcatattaacaaagttggaatcatcttcagtacatatagtgtcaccatacctggatcgatgagaccagtcggaagattgaccaaaaatatcaaagagaaggcaaatgtaagggatgcagcatatccaggcggaagcaaagccattccattgctgcagcattataaaattttggtctagaaaatgcatccattaaatggctattagttgatacaaactggttttctttgccaaaacttctgatggttgttgatcctgttattgattctgcaaaatgctgtatgatgggagctttgcaaacccctactagtctttgcaactctctggctgtatcgatgtagtaacgctgcaaaaccataaacgtggtgaggattgaagagtgttgatcttgcagttgaaacggcaagaagaacaaagcaaaagtacctgataccagaagcaggcagcaagcacaggaataaaaacaacaaaaacctgccatgcaacctgagacatcacagcaataattccaacaagttgtatgatggaaaatgcaacagatcccatctggtaagcaatgctggtgtccacttcgctttgatccgttgaagcctaggcaatttaaacctgttagcacgagcgcagaaaataaaccaagctttctagaaaatttgtgcaaatgaacatgacttactctattcaaaatgcgcccactaggagtggaatcaaagaatgacattggagctctgaatatggacatatgcatcttgttgaacaacagagttgctgtcttgtatgcagctgtgacaagaatgagtgctcttacgaggttccaaaagccagtgcaacatagacgtagatcagggttgacatgcttactggaggctcaacgtcctttgagacaggagcagcccaggccatccagtaattgctagcaatctgaagtacttggaaaagtatttgggccagcaagatgaatggcacaagagctcccctgtaagctaaggtgaggtacttccagtagacccagaaccccacccttcctttctccctttcctcttcctgcaccagctgcccactctgagcattggcatcgtcttcttttccattctgtttatctttcttctcaactgacactgacctggccaggcttgctgtcttactagaagaggaagcctcgttgcctccatttgtgacatctatcgcatccaatgcggtaagagcatccttgtgagcaccaaccagttccatgaactcttcccctgatccaagtatttcgtcatatttgcctgcctgtgctattctcccacctttcatgacctacattatagttagtcattaggcatgtacatacatttcatggcaataaatatagatgaaaacttttccaatgaaatcattaccagaataagatcagcagcaggtaggaattcaatctgatgagtgacataaacaactgtttttgaagccaattctccaagcaagcattcctacaaagggtataaaaccttaagcaatttacgagcaaacatgccaaaggttatgcacttgtcgatattgtagggaataaatcatgaaatgctattgaaaatagaagatcatatcataccttgaacaagtgggatcctgtatgagcatcgactgcactgaaaggatcatcaaacaaatagatgtctgcatcctgatacagagctcgggctatctgaatcctttgcttctgaccaccactaaggttgatgcctctctctccaatgacggtctggtcaccaaacggcaatatctccaagtctttcttcagcgagcatgactcgaggaccctgtcatacttctcattatccatctgcttgccaaacagtatgttgtcctgaatcttaccactctgtatccacgccgactggctcacatacgccatcgtcccacaggtcttgacctctcctgatagctttggaatctcaccaagaatgcaagacaacaagcttgattttccagagccgacagtcccacagactgcaatacgcataccttgttgagcttgaaagttcagatccttcaacgttggcacttcaggtgaggcatcccaagaaaagcacccatttctgacctcaattgcaacatctgagctaccacttggaagtttcagcacagcatcagtcggcaattcctcgaggcataaaaaggatgctatcctgtcaagagacaccttggtctgaatcaacattgagatcgtgtcgggaagattgtatatcggttcttgcagcacgcggaatgtggccagtgcagatagcaccttccctgactccaatggtatccccatgagcatgcaagctatgaaggtcaccactgccacaaatgttggggctccccagaacacaaaggtaacaatggtcgatgtgtagagatatttcttgagccagtttgtctccgtcttcctcaggtcgatgatcttggacaagaacttcatctcccacccctgcaatttaagaatcctcatgttgcgtaggatctcagatgttgctttcatcctgacatccttgcagtccatcagcttctgctggaacttttcctgcatttgccctggaggcacattggcaagcatgacaacaacagtggcaccaagcgcagcaagcgaggcaagcccaagggtggagtacaggatgaacaatgccatgcctacttggagtggcaccaaccagaggtcgtgcatgtaccacgagaagaggccgacgcggtcggcgtcgacgctgatgatgttgatcatctcgccgctcgtgcggctctgcctggattggctagacagcacgagccccttctggtagacgacggcgacgagcgccgaccgcgcgcgtatcccggcctgctgcagccggaagaaccagtgccgttgggacaaacactcgaacaccttggcgacgatgaaggcaaggacaagcagctgccccttgctcgcgtacctctcgtcgccgttgaggtattgcacgagcgagtcgatgaggtaagggccgacgtaggtggagacgttgtagaccagcgcgtagaacgcggtcaccgcgacgtgccaccacacggtgcgcaccagtgccttggagagcgtgaacgccgtgaccttccgcccagagccgtcgccggcgagcgcctcgaggttggtcttgaacggcgggagcagaccggcgactctgtcgccggggtcgaggcccgggacgtcgtcgaggtcgagggtcttcctgtgtccgacggcgaggaggggacccatccacgagaaggtgaggacgctgaggaagccggcgccggtgaacatcgacgcatcggcggcgcaattgttactgttgttctcaccggcggccgtcgcgcttgcaccgctaccattcaggagaggctcctcgatagcagagtcgcccggttccctcctgcccaggaacccggcgaagagcagcaccacgccagcgaggaccgacacggcgtcgagcgcccacgaatgcgcgggcacggggcgcccgtcgagtcccgtcacggcgtggacggcgacggcgaggacggagaggagcaggaagagcgcccaccagagccgcagcggcgcggggaaccgctcctcgcgtcgccacccgaaccggtactgcaggtacgccgcgagcagcagccacgccaccgcgcgcgccgcggcgtccgcctcctccaccaccgcgccacgcgaccacccaccaccgccaccgccaccgcccaggtacccctcgtacgccgcgaggatgaccccaaacccgccgagaacccacgtcgcggaggccgcgacccaacgccaccgaaacccgcctcctcctcctcctcctccccgcacctccccatccttgccgcggcggcaccaccagccgaacaccatccgcgcggcgaccgcgaccgcgacggcgaggtgcgccgcggcgcccgccgcgtggaggaagaacaagggcacgtcgtcgccgtcgtctcgcccactcgccgccatcgccgcgagcggcatcggtgcggcggccaagggcatggggagtgagtggctcagtgtagctctgcaacagatgggccaattagggggggttgtggtatagtaggcgcgcgcgcgcggcggtcaaaggcggcgggcggcgaggggggctccttgcggtgcaaggcagcgggagggagacaccgccaccgccgtcgactcgtcgtctcgtccccacgtttcacttcaccgcgagaggatggcaaccaccacccgccgcatcctttttaccgccggcccgcgacggcgaattggggattttattttgttttttcacacctcggggagggcagatgagtcgattttttttttcagttttaaatgtgacaattaagaaattaccaatctcaccatctgtaatacgtggatcctaaattatcttattaggtaaaaaattacccaccatgccacccccactcccttttacacttgcaaacccaataatccaggctctaataatttaggaaagaaacaactaaccgcttattctagtacagattataacaatcaagtttatagtaatatgactcaataatctagattataataatcccaaactgaaaaaacagggccttagtttccttcaaacttacaaaaattatgtcacatcaaatatttagacacatgcatggagcatcaaatgtggacgaaaaaaaccaattgcatagtttacatgtaaattgcgagacgaatcttttgggcctaatcacaccatgatttgacaatatgttgctacagtaaatatttgctaatgatagattaattagacttaatagattcgtcttgcagtttacaggcggaatctgtgatttgttttgttattaatctacgtttaatacttcaaatgtgtatccgtatatcttaaaaaaattgaaaattgaaaaggaactaaacacggcctatgacgtgtgcgtccggtgataaatttttaattgtaactagttaaatatatctcttgattttaccgtggagataaaattaaaaaaatatataattagtgcgggagacgacgtggggtgggttctcgatcgaaggtttagtaaatgtaaatctgggggttctgattgtgtttatgcacgtcgttcggagaagaccgagacgtagatgcgagattagttagataaattcaggttttgttttgtttgttcctagtatgtttttgattttattattattattattattattattattattattattattattattattattattacaaaaggaagggcaactttcggtttgtgcgcgacttaaaaatgcaccctggtagattacataagctggtgagattgtcccaacttttacacgggaagagattcttgcaaaagttatgtagtactactattagtttggcaaaagttatggagtattttcttcctcgaacataactgaattttatgtgtaactatgtcgatcgctcaacatcgtcatagtctaatctctcattgtaatataattgaacagtgtatatttttttaattcaattagtacatttaagccccgctatttcctcccctcttataaattatcatgaaatcgtttcctattcttctaaatggtacggttttttaaaaaaaaactttctatacgtaaattgcttaagtatcttttcaaaacaatcttttaacgtagcaatagttaatatggttgctcttttgtattcttccttaataatatactctctcctttcctaaatgtttgacgccgttgatttttttaaacatatttgaccgttcgtcttattcaaaaacttttgtgaaatgtgtaaaactatatgtatacataaaagtatatttaacaataaatcaaatgatatgaaaaaaattaataattacttaaattttttgaataagacgaacggtcaaacatttttaaaaaagtggatggagggagtactagatatggatcgatggatgtagcatttgttctctagatacaacttcacaagacgtgtgtgcaagtaaaatggcctacctgtttgaatgatttgatgtcttttgaataccaaatgtccaaaatgcaatgtattgcttatgaaactacttattaaaaatatacctatactgcgtatataactcatccagtaccaatctaaatactattaatacaaacttacacatgtagcaccatcttattttaaaaaaaggaacaacctagaaatgtttcatggccgtaatgctttatttttctactgcgatgcatgcatgtcttcaatttaatatgattttaatgagtttagaaccgctgtcggtctcagtttttcatgcgtatgcctacgtgtgtgttatacttaaagcaagaatattagtgagttaaaagcctactatatgtttaaaaaaaagttataaacttactataaacttattagagaagagatgtaataaaaaaagaaaggtgttgactcgaatgcagaagctagcttaacacgtactcaagacaactatatttaatatataagtgagagaaaaatagtggagaagaaaaattaaaatcaatcttatatatgatctattatactatatgctagttttaagataagctaatatttattaagctctactattaaacctactcttgcatgactacacgagtcgtagagggcgtgcaatttcagtcatcttttaatttgccattcccaactgtttggttagttctcggagtacgtgaagagagagagagagagagagagagagagagagagagagagcatgcaacatatcttttctgccctgatctcgctcaggataaaaaaagttatactgcattagtattttaagattgccgaggtatttcaccgaggcactagcaccacaacaatatatattcaccttgtctttcgacttcttaattcgtgtgcgcttttttaaaaatttagccagttattctatttgcacctatactgtggactagtcaaatctagcacaaaagctaaggtgccatcagaaagatatagaaggttaatgacgaatcagtgacatactatatttgaaatttcagtgatacactacagtgcaaccaataattaaaataatatagtatgttttggccggtcgctttcagaagatgcgtcagcttgtttagtgtgatttagacgatcaaatttaaaaaataatgctgattctccagctaaaaggtactctattggctagtgcttcctggtaattaaaatttaaatatattatatcctcatttatcttattagtactctctccattttaaaatatagaatgcttcgtttcattaatacaagattttaataatcaactattttgtaacgatattatttatgtgacacaaaagtacaatcataactaagtacttagaataggaatctgatatatactgataaagtaaatgttgacaggagtcttattctaataaaataaaatatatcatatattttgaaacggaggaggttacactggtggataaataatctttgctgggtcaacccaaagccacaataatcctggttctaaaaagaaccgggagtcccggttgaaaaccccataggcattctatgatcttaccaaccgggactaaaaatcatctttagtcccgattcatcccctgattgatgtcagggggctgaggatctttagactaaagatcagcactttagttccggttggtgttcccaaccgagagaacaccaaccgaaactaaaattcaaagcatagtatataatctatatcccttatcctctcctccacctgtctttcccttcctccttcgcttcctacatcctcaacccgatccatcccctccacctcctcccctctcctccacctcctctccccttcccctccacctcctccccttcctcctcccctctcctccacctcctcctctcccccttcctgcccatcctccccttcccatccggcagccggcggccggcggggccatgcccggtggcgggccggcggccgtggcaggcggcggtgggccggggcggcggggccgcgccgggcggcggcggcggcaacggcgttgttttctctcttttttttagtttgtgatttacatgtataattttgtgatttattggatggatctgagatgacctgtgatgtatttgatttgtgtgtaattttttaggatttgtgatgtatttgatttgtgtatatatgtaactttaagatttgtgattttactttatttgtgatgtggatttgggatgttactttgatttggggatatgcttcccacttgataagattagggagaaaataaaaaaaaagaaaaggagaccatctggaactaccgctattctctctttactcccggttaccaactgggactaaaaagaggataacaccaaccgggaccaaagatccatttttaatcccgcttatttgaactgggactaaagatagcgatttttagtcctaaattcgtagtcccggttagaaaaccggaactatagaggagttatgaattgagatcctaagtcgccagttgccactgcatcatcagcaggacggaatagattcattcccgtagttccatgagggattaagagcaatcatacgcgacttaaccgtacttaagttctccaaacaagtgataaagaaagctgttgagaaattccgtcaaaagagaggctgttcaaaaagtgattaataagaagcacttatctgccctgaaagaggatgttcagaaagtgatcagtaaggaaagctgatctgttcagaaaagcaatcagattccactagtgcataatatctattcttaggcagtatcgaacccataaatatatggttcagaatattccaaatcaaggaaatcagatccaaatctgatttcaaggattagggtgtgtttagttcatgttaaaattagaagtttaattaaaattgaaacaatgtgatggaaaagttaaaagtttgaaactaaactcggccttagttctcaactttttcttcaaacttctaacttttctatcacatcaaaactttcctacacacacaaattctaacttttccgtcacatcgttccaatttcaatcaaacttccaattttaacgttaactaaacacactccaaatattattattggccatgtataccagctgcagctatatataggctatagctaccagcatcctatattcatgctgattttctttttaatgaaaattcttagggcctgtttagatcccctgacaaaatttataaccctgtcacatcgaatgtttggacacatgcatgaaatattaaatataaacgaaaaaataactaattacacaaattgcatgtaaattgcgagacgaatcttttaagcctaattgctccataatttaataatgtggtactacagtaaacatttgctaatgacatattaattaggctaaataaatttgtcccgcagtttacatgtggaatatgtaatttgttttgttattaatctatgtttaatattttaaatgtgtggtcatatatccgatgtgacacgcaaaaacttttcaccctggatctaaacacagccttaaaaaacaaagagactcatatacacatacacatatataactttaacatactagaccaatgagtatgtgaagtcacatacttccgcagtccgaaaaaacgaatctagcactagatgtgacatattctagaataatgaatctggacaaatgcatgtacagattcatagtactgggatgtgtcacatccagtaccagattgattttttatgggacggaggaagtagtatgcttctttgttgtaaatgtcaacacctatatcaagtctagatcttgttgggtagggttcgccattagggcatgtacaatggtgtttattagtggtctctctctattaccatgcaagtaaatttaatgatatggaaaaaagagaaaggagtatggttgttatgcatgaacagcttataatcgactcttagcatttattagagtaaattttgttgcatggtggtgaaagaaaggaaagaaaaataagaaaaagtagtttgatacattaatgattagagaccatattgtctctaactgttgtagaatgctagtctgtaaataacgtagatctcgtatctgactttacctttgtacatgccctaagttgcctagctagctgagctgcgttgagttcgtaaaatcgtaccaatcaagacctctcacaattataattagcatgtgtttccctccatttcatttcatggtgtaagaagttttgtatttgtcataagccaaatttgttctaatttaactaagtttgtaaaaacaatgagcaacattctcaaccccaaattaagttttattaaatccacccgtgaatacactttgcaatatattttttttgttgaaaacgtatattcttttataaatttaattaaactcgtaaaaatataacttagagtaagacaacccaaaacgcctgtgggaatagctcaacatgcgacggcagtaacaaacaaattgagttaattaacttcgaatttaccgtgtgctcgaccgcaacaggtgaatctttttattttttaaaaaaacaatcagcaggtgaatctaaaaatgatttggcgttgacgacaatagcgtcgtctttgacgtatgacgggtgacggcgatgcactgtaagctgaatagttggttgcaattggtataacttgattgcaactgttagaattatagaactaacgtgcgcgccagtagagatgcaagcggattaacccgtaaacccgattatagataaaattagtgagtaacccgtggattgatttacgggttacctattaatttgacctcaaaataaacttatgaattgatctacttgcatctttacgacacgataagctaagccatgacgtgaaactcacggattattttttattaaatatataagtaggttcacaggtcggtccgactagccagtgaccatttgagcaaattggcagcttaattagctatacagaacttggccccccaagcatcgatcatcgatcgatagcgatcgcgcaaattttctgaagaacttcgccgctgcttcttcccgtttgatttacttagcggtgactcattgtcgatcgatcggcctgatgaatccgggagtctgatcaagatcgacagcgatggatgatgataggagaagctaagtactttggcgccaaggcagcgaccggcagaattatgtctttttgatctttgaaaagtgaaaaaaaaaagaggccacgtccgggacaagagataaataattaacgccacgtgcgacgtaaacgaaggtgcaacaatctctgttgagctcgattaccatcttagttttttttttaagataatggacttaaataaaacttggcctctacatcctaagggatgtacacagccacaaccatgcatcttggcttcttgctgagaaacaaacaattgtagtttgcgagacgcagcagaggaggctagagggtcgaattaacggacatcgcgtcagtgtatggtcaccggttttggagggagatccaacacatacctataagatctgaagatatgctcactcgtatacgctcgtataaatacatatgtacacatatccctatcagcatacataggtatatcatatccctatcagtaccttttaaaaactgttattgaattttagagatgcatatgcattttatctcattataaacttccgtgcaaacgtgtaaaaaaaacaagtcatgaattaaatactttgtgataatataagaaaaagataaaaaaaaaactggagtgagtacattttgtacgcaaaattgcaaaaaggtacagaggttctgccttatgggtttggttcattgttgcttgttaacatggcggttttagtatcgtggggctttgacatatgaacgccggctcaacagatgtctcacttttttcactcctaaaagactaaaagtgcttttaatcacatttcctttcgtatagggagtgccttaattaaagaataaagagtacaaccggagacctaaagacttaattaaagaataaagagtacattttaatataaattttgtaaataaaaatgtaacagattgaaaattttgtttgaaagtaggacagtggatttttttttggtcgggatcatttatataaaaaagaggagcatatctgtaaaatattatcgtgagcatcagtagccctatatttatatgaatgctccttttttcatgactttttaataaataaaataaatacatactgattttctttcgttatctaaaaataaaatttgtcataaataatgtgttgcacaataaaatcataactataatagtttcatgcagcaaatttttgcattttcaacaatgtaattcatatatttctatgttaaaccatgtgtaagggtaacatggtcatttttatagaaattagatagtcagctgatggaagaggcatgaaatggagcaattagacagtcaaatgacgggaggagcatgaaagagaacaagttgaaatttcagggatacaaaaagtatcgagtaaatttcaagggtttgagaaggattgagtggtttttcaagggtatacaaggaatttactctattctgtataatctttcaaagtttatactaattttatttactagcaaaatgcacatactttgctataggtaaaagaaaatatataacaatatgttatagataaaatatattttcattaaatgtgctagtattagttgtttgcttatttggatacatggtattcatttgattcaaagaaatattagactatctgttgacgaaaaaatcgaacacaccggcttgggagatctgcttaactccagtgcaggtccaaaggttggtgagatgcgagcgtgccagtcagtttgatcctgcaactgacaagatatacaaataatagatcaaacagccgatcggctgacaagccgatggagtagttccagccgatagccgataatagccgatgccgacaccagccgatagcgatagggtttaagcaatcgaccatatgtccaatgtagataatgatataaaggcaatcggctgatgatgataaaatctaacaataatatagtctagtagaaaccaatcgactagcaatggtatgatagaataagcactgattcgaaggttaaagcgtacattggctgaaggtccgatgccataaaatccacagattagattaaacagtgaaacttttgttgtcatcggctaaatccaacttgtatatatatgtaatccttatgagccgatgcaatgtccagataacttatcggctagcaccccgataaaacattagcatgaacctatcggcttaacaagacttatattatcaacaacgatctagtagatcgaacctaaccgatgcagcacgagattgtatatgataatctaatattcgatgagccgatagatctgtcaaatgtgatggatataacaaatctatttagaacctcattatgattgtagagatatatcggctaagacaggagatcagacctaaccgagacagtcccaactaaaccgacgcatctctaaacacaatgcaattagagatagaattgagatatcatgtaggcaaatatattaaccaaactagagcgatccaagagatcgaatcgatgcagccttgaacaacaccaacgtagccgacagattcaccagggcccgacagaacgtaggacttatcccttcgctggagatcgaaagctgatgcatccctgcgtcaggtgcccaagttccgttggaagataagtaaaaacctcagggaagagggtggcgatgcgccgagagtattattgatcgatagattgatatattacaatggccccgggtgtacatatttgtcacaccctgaagttctcctcctagcctaaaattgaattaataagagactctaagaaaacaccggtgcaaagcaagagtaaaccctattaaatcaatgcaaataataatcggaattggcatgtggaatttttcttgagttctacatgtcgaaattcactaacaagatttttagtggaattttcagagctctcgaaataattttaaccatttaaaatcgagcttgcaatattttaaatcccagggaaattcttttcctcttttctttttttcctttcccctccttttcctcttcttgggccgtcggcccagtccaccccgccgcgcgcgccctcctcattgtgggccggcccaagccgcccctccctctctccccgggacgccgacaggtgggccccacctgtcgggcccgtctccttcctccagccggcgccgccgcgcccgcaaccgccgccgcgtccacgcctccgcctcctccgggccacgtcagccacgtccgcgcgtgcgccgcatctcccgcacccatttcccctctctctcgcgcccgcgcccgcgcccgagatggccgggattcgattttcgaatcccacctctctctcctcccccactccccacgttggccggcgaaatctcgcctctcccggccacgtccggctccccctctccctattaagctccgacgccaccccctctctctttttccccatttcgccgaactctcccgagctcctcatcgctcccgcgccgtgcaaccacccaccgccgccgtttccgttacttcagccgccgctagccgccgctagggtcgccgccgcaccgcgccgtcgccgccgtcgggttcgcgaggggctgca

SEQ ID NO: 12175 - DNA, 1126 bp, Oryza sativa
gtcattgcattgatctcatgcatgtagaaaagaatgtgtgtgagagtttggttggcctgatgttgaatattcccggaaagacaaaggacgggttgaacgcgcgccttgatctacaggacatgaatattcgcagtgaactccagcacatacgagatgcagagacaggttgagtgtacctccctccagcctgccacacattgtcgaaggatgagaagatcgcaatgttatcatgcttgaaggatattaaagttccatcgggctattcagtgaggataagtaagtatgttaaattggacgactaaaacttgttggaatgaagtctcacgattgccacgtgctaatcacacaaatcttgccagttgctatcagaggcattctaccatcgaaagtgcgtcacacgatccaacgtctgtgcaccttcttcaatgcaattggacagaaggttatagatccagaagatctagatgggttgcagaccgatattgtgaataccctctgtcacctgaagatgtttttcccactgtctttctttgatataatggttcatctccctgttcatctggtgaagcaaacaaaactatgtggcccggcttttctaagggaaatgtggccgtttgaaaggtgcatgggagttttgaattcatacgttcgtaacaaagctaaacccgaggggagcatcattgaaggttacacgaccgaggaggctattgagttctgcgtcaattacgtccgatgccgatcctatcggagtttctgcgtctcgtcacgagggaaggttgttaggtgttggcccaatcggaaggaatagaattaggcccgatcaagcgtcgtacgtgcaggctcattacactgtgctccaacatatggcagaagttggcccatactttgaggagcacttagcgaaaatccgagatgagaacttggggcgatctgatgcatggattaccagagaacataactctcggttcaacgaatggttcaagaatcatgcgacaatgtccacggatgtcccaaatgagacagtacagttgttggggatggaaccgtcttggaccctgggagctaaactacgtcaagttcaaggttcctttgttctgctgccgttgggtgaatctacgcactggtg

SEQ ID NO: 12176 - DNA, 872 bp, Oryza sativa
ggtccaatctgtttttttagggttctgacttcctacaggctagtaataaattattgattgaagaatctaataaaggtttcagtggtttgcctaaaaatagccacatggacaagtgcatagtgttctttttatcctcttaatcaatataatgcttaaagttatctagttctttgcgaggtcttggaatgtccggtggaatcttgctaagcatatatagatgcgcatctccttgctattttttactattttgagaatgttttactgtgttatattcattaattggatgatatatacttttcatctttgacttcacattttgtaataccccagtatttcctatattaatttgtgaactaggcaggccggtctcaatttaataatacgttcacatactgtatatttgtatgcacattaaatagttcatcataattttgacacttaattaattatgtcacatcagctagatttttagatatttttttcatatatagtagtattatcttgccagcaagttgccagtagataaatgtataaccaagtcagcgcgcggtgtaagtcccaactgaaatgaggcgtatatacctgcagcaatacacgtataatacaagatatatatgtataggtaatactgcaaggaaagtggtgtgtacgtgtacgtgtacgtatagtatacgtacccgaatccgtgcttggcgtagtaggggaggttggagagggaggtctcgtcgatgtcgaacacccagatctccttgccgttgccggagagctggaggctctcggcgtaggcgatggcctcgtcgatgacgacggcggagtcacggcggtagtggccacccgagcatgtagtggccgacgtagcccttcgcacctgg

SEQ ID NO: 12177 - DNA, 675 bp, Oryza sativa
caacagacagaagtggggcgcataatcagaagatgaagatgagcatgacatgtttataccttctccattgggcggtgaaatggttgatgtggatcacgatctgctgcaagacatgttacgtgacggtgaagacccagcccagaatgagagagattccatgaagttcagcaggttggtcagtgattcccagacgtctctgtacgctggatgcaaagcaaaacacactaagttgtcagttaccttggacctaatgaagctgaaggcaagtagtggatggacagacaagagtttcacagatcttttaggaattttgaaggctatgcttcctgctgagaacacattgcccgagacgacatacgaagcaaagcaggttctgtgtccactggggttagaggtccgtagaattcacgcttgtccaaacgactgcatattgtaccacaagcaatatgcggacttggatgcttgtcctgtctgcaaggcttctcaatacaagcgaaagaaaagtgctgacgaaggaaagaagtcaaagaggggtggttcggcaaaggttgtgtggtatctacctatcattgatcgtttcaagagaatctttgccaacccgaacgaagcgaagttagtacattggcacgccacggagagaaggaatgacggtatgcttagacacccagcggattc

SEQ ID NO: 12178 - DNA, 5922 bp, Oryza sativa
gcggggaggggtgggatggtggagtgggaggtggggcggcggcgggattcggaggacgtgatcgtgctgcgccggggccgccggcgaggaggcggccaccgccggtgaaggcggtggagccggagtccggcgggttcgcgtacgagccgccggagaagctgttctacaagacgagggtgtgcgagacgttcgtgaccagcggccggtgcatgttcgaggacggctgcacgttcgcccacggcgacgaggagctccgcccctcgctcaccgcgtgcgccggcggctggaggaagccttcgccgtcgttgtcggcggcggcgcctcccgtggcggtggcgccgacgcctccgccggcgcaggtcgtgcacgagctcctcgccaggggatccggctccggcggcggcggccaccgcgccatcaccaaggtgtgcttcgagttcagggacaagggcatctgctatttcggggagacctgcgccttcccccacgtctccgctgcaggtaacgctcgctcgcgatcgccatagcttagcttagctaggtcgatcgatcacacgtacgtgcgcgtgcatggccgatctcacgtcgatcgggatctcgcggatcacggctacacctgacccgtcctcacgtgttcgacgcagagatccgccagggctcaaggctgtcgtcgatgtcgtcgtcgtcgtgggagatgccggcacggaggagcgtggcggtgaccgtgcccaggacgttcgtctccgtgccgccggtggcgccgccgccgccgccgccccactaccgtgtcaacaacagcagcagctacaacgcggcatccatggccgccgcggcgcccgccgccagcgacgccaaccttgtcgcccagcagccgccgccggagcagggaggccggaagatgacccgcctggagatgctcagcctcaagaagatgaccggcatctacggcgactggctcgaggggtatgagcatccataaaccaatcgtcgatctctcgctcgccatgattgatcgagctccacctgccaattgccatgccatgcatcgatcgatcgtttcgcgttgctaccttagctcatcgatcgtcgtcaagaaccagaacaattttatatttaatttattttccaaatctgctcccaaaccgaacattgatcttgtcattttaccatccgtgtctgtcggactcatgtctgtatgtgtcttaaactgttgttgaattctgtgcgtgtaagcagacctgcattgccgtcgtgtcgtaagaactggaacaattttatctttgtgagattgtgtttgtgtccttccgtcttcctctgtggtggcttgggccgtttcctgttcggtggcaacgcggcccaatgggcttgcagaccatcgctttgccgaaggaaatggttttggtttggttgttggagaattgtatatgcagggcgagagagatgcggatctggtgttctttagtgcaggtgaagaggaggagaccggaggaggggaagagggggaggaggatgggatctgggattggagccgtgctggtgcttgttgcagcatggctaacatttgcgccgcctggtgctctggcttcttcgcgcaggtattgctgttcttgctcttgctaatttttgatgcaaggttctctgattggatttggcgcccaagaaatctgcttgtgtttagggaggaatatgtgtatggatagcatgattcagtttctaaggttggattttcatgagtgtcgatgtcttttgcaacagttgctgttgtgggtaattttgacccaccccacactcaaaaggaagaacattgtaggctagtggtagtgaacaaaaacatgtctttgaagtctaaagtataatgttgcctgtcttatattgttccctgatgatcttgtgttgattatgatcatggtattgatgcattaggattgatttagaaggtcttatgtaatgtaaagagcaatagagcattatctgaatgctggtgttgttagtataaaactttggatgaatcgcttcgattatcgtgggttgatgcaaccatttggtggcatatgtgagattcctattataaaactgagtccataccaattaaatgattacaatcaagaggcagtggagaaggggcaacatagatgggggaaatggtaatgagggctaagcctgtcatctaaaagaatggtaatgagggccatgagagaagggggagacttctattttgtctatggatgttccttctaatttttttatgggggtctggaaggcgctagaaaattataaaaaagcatacgaaggaggggagaatggaggagaaaatgttctaacattgataagaacaggaaactgagatgtaaaaaggaaaacacggttttgagttatttttctttgcagaaacttatattatggaattcatgtattactcctttcaggtttgatctgagtattgcacaagaaaagttagtgaactccacaggtggttcaactgcttcaagctcacaccttgtttttgatccttcaaaatcaaagagactctcatggcatccaaggtcggttttgtcaacttgatatgactagtaatatgcctgtgctaaacactacggtactactttagttgtctttaataatttttaaaattttcatgttagcaaaaaaaattattatatgaattgtgcatttgagttttaattcaatttatgtcatagatcaaatatatttcatgtaaagtataataatatgatataccaattcatgcagatatataatgcatatatctgtgccttaagtcatatgatattaaagatatatgataatacgtatatttatgccttaagtcataataatgcataataatatgatatattatgcatatatccgtgacacgcaaaataattcacaatggcgttgatatcaatatttattcatctcacaagcgccattttatttattcatattgatatggaaggatcaatatttatttatcccacttccactgatgtgtttacatatcttattatgagaacttgggttcttatagtcatgtacttcaaactgtctcttaaacatcttaatttttcagatatgtcttgttttattcttctttacgtggtgggcaaatcccatttcttaccttaatataggatcttcttgtatgaaggttttctttctgacatggagtgtgaccatttagtatctatggtaatttttgtaacactgttatcacagcttattatttgcatttgtgttatcgaagcttatctgcttatgttttcattatcacagggacgtggtaatatggagtcatctttagcatttactgatggtgatagaaatagttcgtataacaacattgaggtaggcctcaaagtgtacctagctaatagcgaagtgagcatacatccctctttcataatttgtggtattttggaatcatgcagaaaatatactctcattgaaataaatacaagagaaacctccaatccctatatttgacaatctagtatgatttagcctgtaatttgatggttagctgtggctgcagttaaatgaaattgaagttatatacctttcctgatatttatttcttcatcattcttttggatatgtagcttactgtaggtgttaaacttgtggaattttttaaaaggatgaacttatgatctactgtatgaagtaccattagccgtggactgtgctacttctaaacacctatattgttgtactcttgaaggatatagttgtttccaagattgaggacaggatatcgctatggagctttcttccaaaaggtaatcactcactcgacaacacagaaacattgcatgccgtgtactggctgctgacattcctgctggtcttcagaaaatggagagagcattcaggtcttgaagtatggagtgaacagaagtggcagtatcaaggaggaacctaaatcaagcagtggtgcccataggcttgcgaccattttgatgtatctttctgatgtcaagcaaggtggtgaaactgttttccccagatctgaggtaattatatcctcaccaggcctactttttcagaacaccttatcagaataactatgcactgcttatagtctaggcacatgtaatttcttcagtgatttgattcagttgagcagaagatcttatactaaactatgattttagatgaaggatgctcaagctaaggagggggcaccatctcaatgttctggttatgcagtgcgaccagccaagggcaatgcaatactgctgttcaatttaaggcctgatggagaaacagataaggatagccaatatgaagaatgtcctgtcctcgaaggagagaaatggctagccataaaacatataaatttgagaaaatttgattatccaaaatcatcacttgcatccgaggatgagtgcacagatgaagatgataggtgtgtgagttgggctgctagtggtgagtgtgacaggaatccggtgtttatgataggaagctcagactactatggctcttgccgaaagagctgtcgagtgtgctgattattttgcaattttttgctagtagaaatattgatgtcataggcagagaatggtgtaacaaactgtatatgttgcccgtttttcttttatgatttactttgcgtttgttaggaaatttaatttggagttaatggattgaccactgttcccaaattatggaaaataattttgttccatcagatgataatgatatatgcacatcataattaatcatgatatgattgtagcttatattgttggttaaatgaccttattctttcagcatataatcacgagaaaattataatatgagaaatggtaagcaagcaaggcgtcagatgtaacttaccaaattgccgttccatgtgaagacaccatcatacttggcagttggcacctcatttataactctcggctgtactcctgaaataaataaaatacagtgagaaaattataggagatattcttacagcccactgccttagtttttatttatgaccatttccacttacagctatgtgcaatacatacagagttacacactaatacttgtctattatacaaacaaaaaggttataccaaacgctagcaagccttgcatattaaaacaggagatatttgccatatctatctatttctttgaaagctagagaattaacagatgaccatatatacaaaagtggttgttaaatgagtgtttctattacaccctagtgaaagatgattcttatcacttctaccatatatttttgcctatttctaagcttgcttagaattttagttgaagtttactgtttcaattcattaactaacttgctacttgaagaaagtttcaaagggtattacctaatactctgtgaatgcatactcaaaattgtacgtactacatatataagatatatatgagtgttttgcctgaaacaatcttaaataatcacaatgataagtacctaaatttagagggctatcatgcctacttcaccatcggccatcccctctgggatctttagggttcaaaagtagcagccagtggtggagccacctctcgggtaggtcaggtgaccgcctaggctccgtcatcgcttctcaactgctaactggcttcggtgtctacaaaaagtggttgcacattaaaaaatgctattagtcgcgaggttcaagcgctttgcccactggtagcaacactagatctaacggttaacatggcaatcacaagatgcagatctaataatatgaaggaaagtggattacctctcacggcggtggattgacatagatccacccatgatagcatcaaagacaaggaaggtggcgacgaccggtagagatagatggcggcggataatcaactaaaggattaggttagatctgtgttcctctccgtttcaattggtagcatggcacgaggcgtacgaccatggcggcg

SEQ ID NO: 12179 - DNA, 714 bp, Oryza sativa
tcaatgcaggaaactaattgaagattgttgagctatatcaaattataactactcatttcaatatagttgtccacatagtctatgctcacagaacaagggagacaaaagatcaaagtaatgtttagggatcttttttgttttgggagttggtgtgcgcttgtgtggtggggaaaatgggggctagaattgagagctggtcaactacaattttcatccaggacagtttagagcccccaagccagcacatattattttttactcccttcatcccagaaaaaaagcaacgttcataatctggacagaggctatgtccagattcgtgtatagaagttcccccggtttctagagtctgattaaccccttgttaaatagggtacttggtatggatagcagggttagagaatacaactacactataaattccctcaatggagaattattttgaaaaggcaagtcccaataaactggagaacaattttgcacggaggggttgagaaaacaaaattttcaccaatactaacctttccgatgcatccactttggcccttaagtcttccagttctgcttcagcaattgaaagcctttgttggcatgcagtttccgcttcatttgctgcttttactcgaagttcaagattatgctcttctaaacattttctcaaatattcagcttgcttgcgagctcgggttttctgattcttcaatctctgaaatt

SEQ ID NO: 12180 - DNA, 37786 bp, Oryza sativa
tgctccgttgcatatcttcatcactttgcaagtatagcttttgtataggatcagcatgtggtggaaggctgcatatataagatgttagaaataggaaattccataaagtaaaagaaaatatgcaggggattaaattgtacttaccatttctgaaacatcttgatttcagggatgtcattttcgttgatataccaacgacaagctgttgttccacttagaaattcatatgttcccttaaggattttcattgatgtaccaacaaatattgctattatatggttattttgaccaacttccagtattgtctctccatcaaactcaacagctctttttcctgataatgagaggtcgatggtttttccactttgaagaaacaataaagtcagtatcaagtagtttcagattagtgttagtgttcagatggggaaatatagctgatattggcataaattaccttaaatcttgtagtttgactattcttctcatcctataatctgatgaacttgtagaaatcattgctgcattagaaacagcaatgatttttccaataacatctgcaaagatagaataaagtatttgattataacattgcatatagaatattatggttacgtgtaatgaaataaaagttaatttagtacctagaaaacgatcagtcttgcttgtgaaatcatgaagtttatcaaatgacaccaagtcaaatgtatactttggaaaatccataggttgatctttggcttcaatgatacaagttcttttgtttagtttgatcatatatggattaccaactgctctataactgggcttagcattgttaactgttatcttgctgatgtagacgatatttccttcctgtaaatattggttcaataaaggtatagcatcaggtgggatctcagcatagatagcatctccctgcaatggccatgcaattttaataaaataatatatatttaatgataaatatatgttaggagaaaatataaataaaggatatagtattaccttttgatcaagtaaaaccagatctaaatgtttgatgttatcatcttcattagttcctctaaattcccatatcctagatattcggacgcatatcatgtagtcatatcgccctgggcgcagctctgcaattggagtgatattcatctgcaaattataagcaatggaaaatgttagtactgtgtttgtgtttatatagtatatagagaaaaatatagtatacattaagatctaaatgaatctaaaatttctctatatactatattttttgtttgtgttgcacatgtcccatcttcattttctattagaatttttaaacctttactattgcttactcgtgagattgcgacatataattggccatgtgtaaagactggtttttttagatataaaccaacattagataaagtttgtccttggcttttatttatagtcatagaatagcacacttttattgggaaatgtcgtcgacacaaggtaaatggccattgatttcctcgggttgttaagtttattctgggtatatatgctttttctcctatatgagttcctgttattattataccttctataatattgtctcctaaatttgttattatcaatcttgttccattacacaatcctaaattttggtttagatttcttagcaaattataggaactccaactttcagcttaagtacatgagttggaaaattattggcatttagagaatttaatattcgacaggatataatatgtccgcatcattagttgtatccatacattgagatagtgtgtcagcactataatattccttctcttgattaggtactaagctaagtatatagttgttcacttcatcaacaatctcattagttgtagctagaattgctctatttttcaaataatttggattaaagaaactatttttgaaatctgggtatgtaaactttaccaactcttctaatttgttttctcctgtgtttattaataaattttccggcactagtataatggttgtatctgtgtcttcattttgagcagtactttgtttggtatttattttaccattgcctatatccagaatccaattattaaagtcattgatttctttatattctaaagtattagatttggttttttgtaatcgcatattttcaaatagaaatatttttttaacatacccccaaagatatgactttacgattgatgcattaataatttccagttttgatgcattttctataactggtaagatttgtttagggtctcctcctagaacaacaactttacctccaaatggtttatcgatagcattaatatatttttctgataatatatctcttaatgttctatcaagagcctcaaagcattggcgatttgtcattaatgcttcgtcccatattataagagaagtttctattagtaattcagctaattttgttccacgtttaatatcacataatgatagttcatctatatcaactggtattcgaaatcttgaatgggctattcgaccatttggtagtaataatgatgctactccagacgatgcgactgttagaacaatttctttttagctctcaaaaatgatacaatagtattccataaaaatgttttgccagttcctccatggccagatacaaagaaaaaattactttctttatttattacactatttactataagatgaaatgctttcttttggtcatcgtttagctgtaagtacaatttgttagcttgctcttctaaatcatttgcattataatttaattcatcttgaattagtgtattagttgaatctaatttgtatcttactgtcatctgaggaagattaaatttatctatacttataccacttttggataataaatattctatttgttcaattagaatatcttttaattctatatcagtcgggttgtacttaattgggtgatattttgatattaattgaaattttatatcatctaccattttttccaatttgtctcaaaaaatttcctttcatcttctaaattgcaatacaatagtaggattataaataaagatcgtagttgtggagatgttgcccaacttgcagcttcgtcaaatgttttataccattcattatcatccattaataatccacgtgctgcacatgtttctttaaaagttttataagtaataccattgtatgttctaatatcttcatagttttttgctcctttaactatcattaatagcatacgtagatagaaacgttctccttcagttggtttgacataatataaacgggctattttaaaaccatgttgtcgtttgacccatttcctttcttttttatcccatttccatttttgtgggaattcacagtatgtcaagtttcttgcttcttcatgtaactgatttgccataaaccattctgtaagcatcgttctttgattatctggattttctataatattttttagttttgtatccttagttaatttgaccatattcattaagggaagatgaacaggcattctttccactggtggccaatgataatgtatttcatatccaagtaatctccacataccatcttgatcacaaatatatctacattctaaatattcttctatttcatctattttttctgtttgctcattttcagaatgatctattccttgtttgatacgttggaaaattattttagctttatcccctcctttgtttacatatttacataaatattttaacattctgctttgattaacaaactcaacatttaaatgggcttgatatctttttaataggaataaattgtgtggaacaacccatctattgtccaagttatggttatctttacgtatgtatatattagtatttctacgtttatattgtgcaaatccattttcagtaaaattagtttgatcattgaattctttagggtaaaattttgaacatttgccttttttcatgcatggacaattttcattcttggctccacatggtccatgcatcatatgttcagctataaggatgtatcctagaggatcttctctaggatctggtatttcagttgatatccatttatctatcatttcaatcgttatttcacttggctttttatctaaccaaactaagatatgtacatgtggtaaacctcttttttggaattctaccgagtataaaatagctgttgtaggtccaaatattgtgccggattgtatatcttctattaattgttctagctttatatgaaatactcgaactataatatcaggtctatcattgggttgttcgttttctaagattgtcatagtaatttcaggccacctaggattacatgtaaatgttataaataaatgtggaggtccatatacacgacatattgctatgccatcgtaatagttttgcattgtatatcgtttagaaccaacatggcttgatggtaatattattttttttcctatttggtttccttccgttaaacctttttgtactgcatcaaatattccttttaaacattcagctcgtaatttgttttgatttttagcaataaacattagtctatcttcatcttctattgcacgggcatcaactattgcttgttttgataatctaccataacataaataaggatttggttgatttggtcgataatgcatatgatatttgtagtattcatgtactgtaattgttgatcttgtttttttactctttttatttgtattactattataatatggtatgccaagttgaaatcctctttctccataaggaaataataaagggtattgtaaagccatataggctggatggaatatagatatgcgttgtaatccattatttttattttgaacaataatatctcttttataattttctagatttaattctccaactattaaaattgctaaatcttctgtatgtggcatttcatattgtattggatcacctttatcagcccctattattcgaatactaaaatcaacacctttatgttcttcaaatagatcgcgagcatagcgaaatgtttttaccaatggattatattcatcaaacattttttttaattgttcaactatatacggattgatatctgtacttcccatttcttctttatttaaagcatgtattctattttctatttcatttttagtatcaaaaatatatagttctgcaaactttggaatttcattaggcttaggtaggagacatccaatacgatgatgtatttgtccatttacacgaaacacatatggtccatcgccattatttatatttttatctattgtgccacccattgaagtaaaagaaaataaactattatattgtctaatcttctgcataaaatgttttgatagattatcttctttattattaagtaacctagcaagtgtttctggtgggttctggaatggtggtatttttattttgttatttttacagcaatttgaatatataatttcaccttttcttttctttgtctctcttttatttctttcttcaaaacaaaatatagcattgcaatgtttacatttatactctggcatacctataaatgatttgttttcatatgattcttttagatatttaatgtattctggggtaaaggacaccatgccatgtgaagttgataaatatgaagatatatggtctatctctaaacatttcttttttgcaattttttctagataatctaaattatattgtatttttcttttatttttaatatttttttgcttttctgtatatattatatctcttatattactattttttgatgtttcttcttcatctttattacattttttattgttattatgcaccatatttttttcttcttctctttttcgctttttctctcttagaatttgtagtctgatatatcttcttttcttgcaatctgatttatcatattctgctatttttattggatcttgctttctctttgatggcatattaacacttctgattatataagcacaaaaaatagccaaagtcagaaatgaatataagcataaaattaaatatgaataattaaagatattggttgaatcaatacaaaacttaatcattcatttcaacagctatatataatcagaaaattacacatgaatagtaaaaaaagtgttagctaatacaaacacttcaatatttatgacgacaaagattaataggagctacaattattgatcatacatacaatggggcaatagagctattctattgccattctctaataattcctagcgtacatcttttgtacagtacatccattccatttgtattacagtttcttacaaccatcgcacaaaattttcaaatttcaatagatagtgttgatatttttatatatatttctgattggttattgtttttaattagttccatactaaaattcagtgcatttgtggctatagataaaatggatttgctgatttattggtaaaacaatatcttatggaaataaaaataaataaatacaaaaaaaatgtgaagcttttgcactggttctagtgcaagtattttttctgtcttcactgatgttgctacaattctccaattctccataggaacattgattttccagaagggttgtagtaggatcttggtatgtctacgcatccagcataatataactttttggtcattggtacaacacatccagtacaataaatataaatataaatatatatatatatatatatatatatatatatacatatatatataaaattttccagctcgttattgttttttacctttttgtacttcctagcttcagtgtcttgctcctgtttatctccttttcttttccttattcttttatcccctgtaaaataaacatttactaatatcattgcagatgatcaatgtacaatgatgaaaaatactaaaaagaatagacaatgttttttttttctggtaaatatccatactacacgaaatgttattcacagctgattggttgtgctatagcttttctaaatagaaagtaaaatttgctgtaacttgctgcaaattatttagaggaaaagattagactttgtgactaattgatttacgggattgaagttagtataattacatgtaagtacctaggtttgtcaattaatggtttgtttggatcagaagtggaggctacagctacattgtatagtaccactatataaatcaatgtattttgaataacttttaaaaagtttaattgaaaacagttagtttggaatggtggtcatcgtaatatactatgagttaatttattaggagtacacgaaagcttgacttgttagcaaagatcaaacagaaatcaaaaggaacacatccatatgtcctctctactaagttgtcattggagatttaggtgacagaataagacgtggctggacgtaagatttctttccgattgcttccgttcccagtgacttatattataacaaatagtctaatactcctatatagtgtcagagaagtaacagatatagtatatcttgttgtccatcgtgcacatcatcaggatcagggcaagttgcagtaggctggtgttgatgttctttgattcggtataaatcaatcgatcaaaatgcaaaatactactggatctgggctaatttgggggctttcgtgatcgtgcaaggtaatgcaggcgatcgtgtacctgacctcgtcctcgtgttcactaatacatgtgattcagttcactgacctcgtcctggtgtcgccggacctgctcgccgcagagctaccggccagaggccaccgcctcggaggctcctcctcgtcgttgtgttgtcgcgcacggcgcaggatgtgcttgccgcagaggtactggctggaggtcgttgcttctttatccctcggtggatcagatgtattgccggtggatgttgatggtggtgtttggtgccggtgaatgtggatggtggaacggcaagaaggaatgtgagacaatgacgagaggaaagaggaatgatggagaatgaatatatatacagagaagaagaagagtcaatcaaggaagacgaagagtcgtggcccttccggagaaatcaggtggctttgcactttttcattatactccaacgtaagattgtcttttatattttagtccttttcgcgttttggagcgcacgcacgaaccacgctgtgccacgtggcatcgctaatcgctcgataacttgcacggatttcgatagtaagagatggcatatttgtaccttcatctacctcattgctgaccttctggttcgatattgacttcactaaatgtgcactaaaatctcttctattccaatgcagtagcttcagtttggcttcatgaaatttgagtaaatgtggcattgcctacatctgaactctgattataataattatggtttcacgtgtaatatattttttctattgtagtaaaaagtctgtaaaatatgcacataatgcaactttaattctcaacagcgaaagttgctaacttcaacagttagacttataaaaagtggcaaacgctaatcagaaaaaaaaagttagagcattatattgcttttcctttttcttacacatattctgctttcaggctgtatttaggctaaatacttatattctgctttcagcctaacgtaattatcaataatggagccggtagtcccctgatgagttcccttatctaccgatcattgaagtgtatgaagctactcataaaggtcagtgttttattgagtctatatttggtcaactaatgctgtgttttaattttgctaactcaagacatttgttccatgaacatatggagctaaatattctattgcacaatgcttttctcaggctggtgctgatgttaatggcaagggtacagttgtaacccctttgatgcttgctgcgtcgcagggaggctatactaacttcattcagtttcttctgaaggctggagcaaaccccaatattcctgatgatgtatgttttctattcttctgagtcagttgttgcttctccactttggtctataagtctgattcttttgtgttttattacaactctgaggatgttttgtctaaggtcatgtcagtttatgattaagatacagattttacctcggtttttgttagcaaaattttcaaattgttaaactatgtatttcgtgcgaaaactttctatatagaagttgctttaaaatatcaaataaatccattttcaagtttaaaataattaaaactaaattaatcatacactaatggttttcttgttttacgtgtcccatatttaatattcatccttgtcacatcctaagagggcctaatttaacaaaaacattgcacttatgatttgcatattttgtagtttcctatggattatctgaacctgtgttcttttattttattgtatgtgtaagtatatcttacgagttgtacaaagcatggatgacctttcagcaaccgacgagttctcaaatccagcctatatccaaaataccattttgatagaagttcatatcaatgtccaaaaagcccatggccagctttgaacctacagaccatggtgttttgggacgcaatgagtcgtttggttgaaacttgaaagccacagattgtgataataggccatacactgatttcaccaatattgtttgttttaggttccttgctgaattacgctgtatgaaactatttttcttcattctgttgtgcttgtgcagttgggttggttgccaatagagcatgctgcattacgtgattgcagggaagaagttgaaatgctatttccattgacttctccaattccaaatgtcccaaactggagtgttaatggaataatcgctcatgcaaaagtcaaaaatacaaagccaatggtacgtttcgtacagatatgcacttttgatctttctgtactaaaggtcctgctatgctctctgctcatatttcatgttgcttaccatgcactttgcattgcagagctctatttcacccacttcacgtctttgatgcttgttaggctgtaaaactggtttagcttacatatcaacggcatttaatagtactagatagaaggatcatgtcttaacagtactggttaatagtactggtttagctttgtaatcctaaataaatgttctgatattcaaaatttcaaaagttaacttcagatttgcatcaagatactattgtttacgttgtttaggatcaacatcagaaggagagtagaaaagtcgttttgaaggcacaggcagatttggtattcaagcagaagaattacgccgctgcagcaaaaatatatgatctggtaatttcttgcaccttatttctgattgttaacgctaatcaattattgttgttataaagtttttgtatgttattcttaagcttgggaatgatttgtttatctgatgcttgagcataggcaatagctcatggaccgactgcagttttgtacgcaaacaggagcatctgtagattgctcatgggtgatggtgaaggtgctctttctgatgcttacagatgccgaatgatgcggcctaactgggcaaaagcttgctaccgtcagggtgcagctcacatgctactcaaggtaagactcactgcagttaacgttttgtgatcctggtattatggtcggtgtcctgaactcctgatttactctaaaaccaggagtacaaacatgcgtgtgatgctctcatggatgcacaaaaattagattctgggaatgtcgagattgagagggaactaaggtaatcttctgtttcgctcgagtatgccttccaaataaaaatgtggttgcgcagggaacatgaccattagtactggcattccgttgtgattatgcccacatttactgcaactgaagcaactcaacactcaactgttcttttcggttttatatgccattcttccatctttgggtcaattttacgctttgggttgttataactgacatttttttggtccaaatcttttgtaggaaagctagggaattaatggcgaaacctccagatgagcagtgaggcagaataaccgcataatcgtcagctaagcaggaacttttcttagcgctgcactattttgttggatatgtgatgaaatgtaaataatgcacttcacggaactctcaccaatcgacagccagctgactgtcacgctcacactaacctcccttatctatctgatgctactcacaacccctgaacattgtatcagttgattcagttccacgcaattatcagaacattgctgaatgcttacgaagaaggtacaaccatttttgttatgcatgtacgaaggactccctccatcctaaaatatttgacgcccaaaatatttgacgccgttgatttttttaaaaatatttaactgttcgttttatttaaaaaaataattaattattaattcttttcctttcatttgatttattgttaaatatacttttatgtatacatatagttttacacatttcacaaaagtttttgaataaaacgaacggtcaaacatgtttaaaaaagttaacagcgtcaaacatttagggatttagggaagaagagggagtatattgcattgtcgtcgcacgtttgtgcaccggtccgatttctctgtggatattaggcccctaataagctatgtggcggcgtgccgttcgtgggccagccaggcggccacctactatcttcgccgctgcgccggcggcaaccttgggccgatggcaaattttttaaagtattaaacgttgtctaatttaataacaaaacaaattataaattccgctaagaaactgtaagacgaatttattaagcctaattaatccgttattagtaaatgtttactataacaccacattttcaaatcattgtgtaattaggcttaaaagatttatctcgcaatttacacgtaatctgtataattggtttttattttttccacgtttaatactatatgtatgtgtctaaacatttgatgtgatagatgaaaaagtttttgttttgggaactaaacagggcccaagtcgtgtgcagtgcaccggtccgcttccgtgcgtgtgtgagatgggcgttccagatcagctccaagtttgcttgaaagcgtcgcttctcgttgcgttgccacttgccaagcagcagcacgtgaattcgttgctgttatcttatctatcctggaaagcgacatcgccccctgtggcttggagttgcacgtattccattccatctctctctcacacacacggatcgacgatccacgatccactgtaccaaccgcggcatatgcttaccttaccggctcctacccccaccagcatataccacggttctaccgtagttgtacggttcagacagcgtgtgatcggcccacccacatgcatgaaccagaagcattcaatcaatcaaacaaacaaacaaacaagatcttccgcgcaggtgcaccagttttggctccaaacggggacgacgacgcgacccacttgagcctcgccctccagcccatcgatcgatccccctttagctgagcgaattattccacaagttccacgacgacgacgacacggccgggcgaggcaggcgtacatatgaacagcgcgacgcggccggaaacggtcgcgtacgtggaaacggccggtgcgtgccgatcgatccgtgagccaccttccaggcgcgcgggagcagaagtgtactatgccattggcagcgacggcgagcgaagaccgcgagcgagctagtggacacgggaggttgctctcgcggcgcgcgggaggggaggagaggagagggagaccggtggcgcgggtgcgctggaccggttcacgccccgcgtgcgcgccggggaccgaaatatctgtccgcgtcgtcgatggccggtgtcgccgtcgagcgagctacggaccaaaacgccgggatctcgaaggggcgcggcgctgcttacttggttgcttgattagttaagtttatccgccctccgttttacgcttttctgtttcccccggttatttaagccagactcaagtttctcgaaatagaatttaaggaagggtgtgtttcacgtcaaaattgaaagtttggttgaaattgaaacgattcgacagaaaagttgaaagtttgagtgtgtagaaaagttttgatgtaatggaatactttggatctaaactcggccatgggatgcatcagtaactgttactgttgctactatatcacttgatattcactttcattttggtgctcaaaataataataaaaaagctttcattttgggtatgcatcgtttgacatgtatatttttaaaatccactttgagaaaaaaaaaacatatagtaacttattctatatttgaacattgcaatcatagaaagacaactctactgtacgtgaacatttttcattatcaagatgtgaaccattcactaaaagaacaaggaaaacactcgttttcgatttctaaagaaaggttttcaaactatagataaccccatccttggccttccccctgccgataaacgtgcttcttttttcctctccagccaaatttccaaaggcgaaaacaaaaccaccggtgaaaaatccccaaagaataaaacaaccgaaaaccccgtgccgttgcccacgggataaaccaacgaacggagcgggtcccatttacccaaaagcgcactccccccatccccaccgcaaaagcgacggcccgcgtgaaaaagcgcaccgctcgatgcgcgccacgtgtccccccaccccccacgcaaccttatccactcgttcgtctccctcctcctcttcccccgcaataaaatcccacctcctccaatccacagcctcgtcgatccacttcaaaattcggagggaggaatccaaatcgaatcgaatcgaatcgaagaagcttggggggatattcttgatttgatttgttgttggaagagaagcaaatccaatggcgattgcatcgggggcggctttctcggtgaggccttcgccggcggcggcgaggccgtgcgtcgcggcgtccgcgtcggccgccggcgcggcgaggttccgcggcgacgggagcggtggcggaggcggaggcggaggcggcgggaagtggtgggcgccgctgctggggtggtcggggcagcccgactacatcgacgcgcagccggcggcgcgggaggaggcgcggccgaatccgatggcggcggcggagcagcgtggcggcggcgggaagaggttcggcgtgctgacggaggagaaggcgcggcagctgcgcgcacggatgatggagacggagagcttccacgactgcatgtaccactccgccatcgcctcccgcctcgcctccggcgcccccgccgacgacggcaagcactgagccgccgccgccatccatggctccccgcctctgcccataccgcgccgccatccaacgccgatgatgatgatgatgttgttgtgtcgttttggtatcaataacgtcgccgccgccgacgccgtcaatggccggagaagtattagtatgaggcctcgacggcggcgtgcttgtcggattgattccatggagatgggatgatttcatcctaatatctccatttctgtaactcatagtatagcagctaatgcatctaaacgttgttgtaacaagaaatttaatctggtttcttcaaccatggcttcttctgtactatacatcacaatcactctgaaattttcagaaatttcagtgttcatttttatctctgaaagtttcgagaattcaatgtttttttattcctttttcttctccaagatatgtgcagcatctaagatcgaagaacttgatcatcgaaggctcctaaatttgtcatctttttacgcataattggtgtcacttttgatctactgctacaaacttcgatctatcaaaaaggctcctataaatttgtcatctttgtacgcataattgatgtcctcctgatcacataacatgattgcactttgtgtccccgtgtgagtcactaagataagtactctctccgtactcggaagtcgtttagaacagcgtcacggtctctaaaacacaactttgacttctttttactataaaatatttattgaaaaatgatatatgtatacttttatgaaagtatttttcaagacaaatcttttcatataatttttatattttcaaactcaataacttgagagttatttatgatttatatttctaaggtttgacttaaacttaaacattgtcctaaacgacttcatttataagtatggagggagtagtaattttatgctaacttatcctaagggtctgtttagttttttagtgtaaagtttttaaagtatacgacaaacaaaatatagactaataacaaaacaaattatggattccgcctgtaaactgcgagacgaatttattaagcctaattaattcgtcattagcaaatgtttactgtagcatcacattgttaaaatcatggcgtaattaggctcaaaatattcgtctcgcaatttacatgcaatctgtgcaattgattttttttccatatttaatgctcgatacatatgtctaaatatttgatgtgacgtttttgtaaaaaaattttgaatctaaacgaagcctaagacacgtcacacatcatagtggtatactactccatttaactaatcatttattacttgtcaagctatggctcaactcactcaattaagcaaagagacactgaaaccgacatcaagcaaaggctagtggaacactccaacttgagattaaggtggtgtttggatccagggacttaactttagtccctatatttagacactaatttagagtattaaatatagactacttacaaaactaattacataaatgaaagctaattcgcgagacaaattttttaagcctaattaatccataattagagaatgtttagtgtagcatcacataggctaatcatggattaattaggctaaaaagattcgtctcttgaattaatccaagattatggatgagttttattaataatctatatttaatatttataattagtatccaaacatccgatgtgatatccgatgtgatagggacttaaactagtgccatctaaaagaagaagatttggacatgacgacgccatcaactgcttcgtctacaagttcactagaagcacggcaattcggcaagacggtgtgctccaatgtcaagggcttctttcttccacaggcaagcgggcccacatgaccaagagccccgtcagcagtcagctccgcttatctagaaaggcaccgtcggaataattgagtactcgtatcaaaaaggacagaaatggagcagacttgcaggaaccggccactggaattggatgctggtttctctagaatcccgtaaccggccactagtagattttagagttagaaaaaccaatcaaatacgaaaattttaaaacaatgatttctagttgcgctgttctatatggtgcgttctagttgcgctgttgtatatgaattttgtgggcaactaattaaatccattcagttgtactgctcttcagtagtgatcacaaaattatttagccattccgaagaaccatagtccataggcactgcataagattcataatttaaattcttcagtttaaacatgcagtagcagtaccaattctgagccgttgttcggcggcagactggttacgagaacacctacgccgtggaaccctttattattattattattattttaattttttgctgcggttgaactcgatcatcgccgcggttttgcctttccgacgcgaagtgcacagaaactctcccaaaacgacgaaccgttggacacaagcaaaagcttgtgtatatgtttgaaattaaacatccaatagtattttttaacatattaccactgcttgatcagactagtgtacactacttaacattatatatgcttatattatttgattactcacagaaacatccttcaagatccaatagcagaagtctcaggaaagggaagaaatggatgggctctgctgggccaggaaggcctaaatgtgtagcccttttgttgggctttcccttaacgtacaggaccttacatcctacatacacagggccttgatgaaagctgctcttcttcatttttcgcttttaatttgttgtgacagcacagtgtaaaactgaaagaccaacaaatttatgcagctatatccactaattttttgaatgctcgtcagccaggtcgaaccgaaatttatttctgagagacagcaagggaaaaatatttgtatttttcttaatttgatttcttggatgtagaattcaaaacaaactgacgtttatgtgatatgttattacaaggcatttttggtacgttctaagtcaaaattatttaaatttgatcaatattgtagaaaacataacgacatctacagtatcaaaatagttttattaaatccactgttgaatgtattttgcattgaaaatgttgttactttttcatataaacttgaacaaacttgaaatagtttaacttaggataaactaaaatgatttataataataaggaacggagggaatagtatatttggatagaggagatctacacccggccccatcggttggctgtttataagcataagcgaaacgtcatatttgcaaatgaaaaataatttacgaataaaacttttatatacatgttcttacgatctaaaagcaaatgctgaaaaacaaactataattaaaaaaataaaattagctctaaatttaaggttaaaagtataaattttagaagtttaagtacagatgaaaatatgaggcccgaccgtctcgtaactttgtctaagctgcgcgtgattatgcttcactaatggtggcagaaactgggccatttttcagagtggcgcaggcgcagtgatatgaggatttgagcagcgtaggcccagcccatttggctagttgtccggtcctgcctgccttagcttgggcatgccatctgctctgacactgccactttgcaaacttcactcaactttgtctctggccagcttgcaattatgcacatctcttctctatcgcgcaacattgatagcgcctgcacgaatctgctccctccgttttaaaatattccacttcatcctaaaatatattattgtaacatacccctttatagtttttcatggaatggaggaaataaaactgaatacaacacaaacatgacacatctattcaaatcattcgcagtactggattgtatctcatctagtacaatgtttctatattttaagacggtcataaaaataacttataacatttgaaaatttgttttaaaatacaacttcttcatctatcttttttttaatcaatcgtaataactaccaatgttgaagttgagactttatatattctcaccttttatgattcaaaagccaaacccaatcgatgaaagtggtaaagaaacatgtaaattaaccctaacattaaatccccattattcaaaattggttgatctttgagttgtagctctataaggataccatcatctgtttttgttgagttatcaatcttacatcccatattgatcacatatacttaaattgatcatcatataatcttggtctcttcgtttggcgtacggtgttttttctatgcatgcaaattgagtatgcgtgcatgcacgtactccttccgtaaaaaaaaacgaatgtaatatatattacagaatctgatagacttctgaccatattcgttgtatcaagacatgtctttttttttatagacgtagtaggtatttaggactagttaagcactcgttttcttgtgcatatggggagctatagtatgcatgcttttttttattctttctcactacacactcgcattaaataaaatacatggttagttaattttggacttatttttctcttatcagttgtagctgcacctatcaaagctacgatactgatgctaatgttgacagtatattgatacactgatgcaatcatacaatattgtgaacaaactttacgatagattttcgtggctccagtaaaaagcagggcaaaaatatactacctccgtcccgcaatagttatcgctttgggtttttcctttcaacgtttgatcattcgttttatttgaaaaatttgtctaaatataaaaaatgataagtaatacttaaagtacttttgataataaaacaagtcacaaataaaataaataataatttcaaaattttttgaataagatgaatgatcaaagtttacaaataaaatctcaaagcgacaagtaatatgggacggaggtagtattctccatcgagattcgcaggagaccgacttacgagtactagtacttactccctccgtccctaaataaatacagttttacgctattcatgttcaacgtttgacgttcgtcttatttaaatttttttatgattaatatttttattactattagatgataaaacataaatagtacttaatgtgtgactaaatatttttaaatttttcacaaattttttaaatcagatgaaaggttaaatattgggcacagatatccaccattgcaattattttgggacggaggtagtattaccgatccccacgataaacaaataccacggcgcgggaccaccaccgaacccacggccagcaacaacaacacacagcaacaggcctaccatatcgcgagaaggcccccagcgtcgcggagccgaaggatcaggattcactccgccctcgccgacctcgtcgccggccgccgcatcaccaccgacacctccccccatcgccgccggcgaggtgcgccctatcatcacgcatcctctcctcacccccccccccccccccgcgctcccacagccaatcgggccgcgggtctgctgttttttttttttcgttttgttatttttccaaatccgtgcagccaagggctcccccaatctcgtacagttccactgttccatttgtggcgccaccggggggctctctgccaccgccatcacgcgctcatgtggcgcagcgcagcgcagtggtggtggtggtgccctcctcctcctccccctcctgctcgctcctcctgcgatctctggtagattccctactccacgcactcccacgcgagagaacccggaaaagtcgctcccctttccgccgcccaaatccgcctttccctttgtatcgcgtcgcgtcgcgtcgggtcgggttgggtcgccactgccacttccacttccacttctcccccctcgtacgcacgcgcgcgcgcgcctctcctttatctggtggtggtggtggtgatgtttgggttgtttaccttggtttggattggattttttttttgtttgcagagttgggtggtggagcgagcgtggccgcgaggggacgcggaggggcggcggcggcggcgattgttcgcgggatgagcagcttcggcggcaccagctccgtcgcctccggtggtacgtttcgttccattgatcggtgttgaatgcgttgaggagggggggattgattcgtgaaatgggatgggattgatgctgtgatttgattgcgttcgtgatgctcctgattttgattcgaatgcgttgggggatttgggatcgaatcgtaaaatgggggtgggattggatggttggatgcaggtgggaagaggctcgagtacgggcggacgcatgtcgtgaggcccaagggcgcgcacaaggccaccatcgtctggctccacggcctcggggacaacggagccaggtacgcccaccctctcctccccaattccgccgccgtccatcctctctctctcgtcgcgatcgatcctctcgttgtgattgatgtgcttaccggatgcgtagatgaacaatagcgccaatgcacttttttttcccaactgtcaacaaataactgtcaatttattgacatccgggcatccggttagcttactgccaaatgccaacgatggcagtttctcattgtcaatttcctttcttatagccccgggttattgcaagctgattgctcaagtaatctgattggtgtagtgtaccgtgtacacaaatatcctgctctgtttatgttgtagtgatttttctgatggtttcttcccaaattccaccaccactgtacaatgaactttttaacacgcacacaatttattagtattggcgaaagaggtagattgtatgaaaccacgcgtagataacaataactctgattgcgacatgcaaagcttttgtgcgttcgaaaaaaaaaaaaactctactgcatcattgcaagttaaaatttgggagatactgatataaataatggatatatttgcagctggtctcaactactggaaacccttccccttcccaatgtaagtttggacatagatttcaaatatctatcctactccaagttgttcttgtgattatttcctttgtgtatacatcgctaaatccagtagctccccccccccttcataatgtattttgtatcaaccgcagataaaatggatttgccccaccgcgcctacaaggccagtggcagtttttggtgggttcccatcaactgcatgtaagttccatattttgtctaatttcctcctttcctcttggtcatacttctaccaacctttgggaattgctctggtatgcatgcactggtattccatacataactttgaccccctctttttttgtatttgtagggtttgatgttgctgatctttcagaagacgctcctgatgatgttgaggggttggatgcctcagctgcacatgttgcaaacttattatcaactgagccagctgacagtatggttcccgagttattctccatttgttcatttattgcggcataacatgatctttttaacctactttatcaagcaaatgtgacacatgagatcacatatgtttcctttgtgaatatggcgtatgacatggaaagaagctatgcaagagaattaagtaactacccagccaccagggatatcaaagctaaaactttatctcctatgtaaaactttgtcaaaaaagtgatgtactgtggagctcacacattattccccagaaacaaactaatttgacctcttatattgataatgcaacagacagaggccccgcaataatgcaacactcagaccagcctttatctctaacattgtcctatcacattgactattgcagtcaaacttggtgttggtggctttagcatgggcgcagctaccgccctttactctgcaacctgctatgctcatggaaaatacggaaatggcaatccatatcctgtgaacttaagtgtgtctgttggtctcagtggctggcttccttgtgccaggtttgtcctagtatgttcacgtgtttaggtatcactgaaatttcagccctgtaaatgatattgactgatatacttgttggttatcacaggtctttgaagaacaaaattgaaagctcacaggaggctgcacaaaaggcttcatccatacctcttttgctttgtcatggaaaaggtgcataaactgttctgtgaccttcattagtatactaagtttctgttacatgttacatttacatgtaatggcattaccaaatcagttggcattgttctaacattcaacttgaggtagtttggggtttatacttgtttcgttgctttatgctagctgaaggcataacctaatataccaggttctgagttttgacaatagcatggcactattcctaggaaagaaaggctacatgagtcttataatccacagcccaaatttgaatttggaaagttaattttaaattaatataggtgtttttttaactttttctattattcatatgacattcagatgttcacaatgtgtgctaacatctcagtgaatgggaggtcgtaattatttagtggcatatgcaaggatttttctcaccaactgtgaaaccgatatatgctctcaccatctgataggcatataaggaattactcccagaaaacaaaccatccatcctatatttagtgttttgtttcgattctatgcagctgatgatgtagttctctacaagcatggtgagaaatctgctgacgcactgaagacaactggattttcaaatgtggtgttcaagtcctacaacaggtttgatgcccctccctatttacttattgatgtaccagttctaatcacttacatgctatttgctccctcttgaagacttggacactacactgttccggaggagatggatgaagtctgcaaatggctcaccgcgaacttgggggtcagcagctcatcgtcggcttgattgaagaattgagctgtccgaataatacctgtggttgttccaaacaaaattgagaggtaaatggttgaatgaatagcgaagaacttggggcttgggtatacggccatggggtagcctggcgtgtcatcatgcggacatgcctcacggcatcttaactagaactcttataatttccacagtttgggtctttgttttgtttgtttcccttccctcttaaagcaggggacggcatcgtggtgtattatttgttttggttagcacggatgtttttgtttggtacgccgtgtgttcttccgattgggtcagttgtatgtttcctttatgagttatgagatgcattgggattttgggttcatcagctagtatgacaatgcatatatttctcatcacttgtcaatcagacgatatacgtgctcggttgtggtgaaatatcaacatgagatacgatatgtgtaactcacaccgtcgcacaaggatgagatcggataacgcagcaaaacccttatatgcgctagtgctgagaattggttggttaataatcccaaggcaaagtggtactacctccgtttatctaagtacttcccccgtttcacaatataattcccctgtttcacaatatagtcattctagcattttccacattcatattgatgtattcatatggatgtatctagattcatttaacatcaatatgaatgtgggcaatgttagaatgacttatattgtaaaatggagggagtacctccttgtatatgcacaagttgtttgaatttttcataagttaaaattctttagatttgatcaagcttatagaaaaatataacaatattttcaatgcaaaacaaataaactatcaaccgtttatataagtacctccttgtatatatacaagttgttttgaatttttcccaagttaaaattctttagattctttagatttgataagcttatagaaaaatataataatattttcaatacaaaacaaataaactatcaaaatatgttcacgttagatgtaatcaaactaaattggtggcataaatgttactatatttccttcataaacttgatcaaactttcaagaaatttgatttaaaaaggggtcaaacgacttataatatgaaacggaaggagtaaaacacaacagtccgtacatgagaccctaatcatttatagtcgcagcttagcccgaaacgatacaaggacaagtggcatttatttatcgtgaaaaagcttgtatacaactggaacagagggttattcttcttccaccatctttgacatgaaaagctcaaacgataggagaaagcaaatccatactacataaacgggaacgaaaatttggaaaggaagaatccagctcccatactgatgctaaagctcacgtgaccaaaatggcgtactattgtcatcttcatgatgattctttttgctcatgcttttgtgcaatatcgccaagcacatccttaagctgacccttctgaagaaaattatacaaaataaggaatcaactactgagttaagaattaaattgtagatggatacacctggtaataaaacctggggacaataagctcacttgcctgatgcatatctaatatgatatcagaccccccaacaaactctcctttgataaatatttgtggaaacgtaggccagttgctgcacaagcaaaatagaataagtagtgaatttgtcgaagaataaacagttacctgtttctaagaaacagctgaaaggcacatgccaatccatgtcttatatgatacactatatttcaactcaatgaaaactaagccttcagcaagtggagctccataatattgtagtatgggacacaggctggtgcctctgataatatattctggaatagaatgctgtatataaagcctcaatggtgatcaatgccaatctaatagtcaaaactcatcttgggttgtggttagcttaagccatatgatttttttagcataatcatttcttgaaactgtttttatgacctcaagttttaccacataacatcatactgtgttcatgtcatgaagaatttaatctcccagtctagttccttcccatgttgaaaaacataagttgtctatcatctaaaagaaacttaatgcaagattaggaaggcatgagaagaagccacttacgtgtgggctttgacacactctttgagcttgaggtctcccaaaatatctctagcactgatagggacatctgcaatagattatgatatatggtttaagaatttatggcgcacccacgtatcatcaactgtatttcaaacaaatcagaactcagtgttaacttaccatatagcttgaggactttaactgccaatgcactgaatccacacataggagactcaggaaaacccttcatgtagatcaagactgggttctctttgatatcctgcccaatgattgtgttgtagcattaacaaatggcagaaacacaaaatgaaacatttaagatatgcctagcctttctagaaaataagctcatctcatcaatttaaatattccaaaaatccatttataaatgttaatacctgagcaacaatgtcatcaaaagacatgttggaacttttgcttgtaggctggaaatcttgatgtgtatcaggatcagcagctactcgtgttgaacttgagtccccacttcctctagaatcaccaccaagtcctggtgagtagttcctaaactgctggatagctggttgtgacacagcctattattccggttatcatgaaaaacaagtttgttacgcaaacatgagatcaatagggaatatttattacccaggtagcataataaacaccaatagaatattgctaacattttaagtgcaaaatgatgaccccatattgcataactacgtaaaaggcaaagctatacaatttgcttgcagaaatttagcagtgaaagattagtctctaaaacattggaagtgtaagaaaacctaagaattatataccacagggatggaaggttaacaacacaggtgaaatctggaagacacaatggccagagaaccatatgcattgcaccaaattaaagcattaacatgggatcaaacctaaaccgtgagaagaatatgatacgtactacatgaaaactaaacagattgcccccacatcccattaaaacaattttgttcaccagatggaagctatgcacatatacagttttttttgaaacctatgcacatatacagttactgaataaaaccaggggttttatgaaatttactcaaaagctaatgacgcacaagacaagagggcacagcaatccatactccaaaccctagatacagcgttctcatcagataaattgggtgagcaattcacactccaaatcctagatacagtgttctcatcagataaattgggggtgcaaacgaagaccaaaacgaaattatggagtaattacattacagaatcacctcaatgaacagacaaggcagacaaaatgcaccaaactatcgattaagaggacgcggcaagagagtctcacatacagctactctcggcgcgcggctcgatctcacgagccctctcatgagagcggtcgacaccaacctcgccatgaatcccctgcagcaacaacaacgaagaaaaatgttaaatcaaacgcatgaacccccctcgatctaccaaaaaaagggcacaaaaatcaactcccatccccattcccacccacagcgaacccgcagctacggtgtgaaggttgcaacgagtacctaggcagcggcggagcggagccctacggtggtcggaggagccgccggcgatggccggaggagggtagggagagcacgccgccgccgcgccgccggatatgctcgtgccaacgctggtttgctgttttgatcacggcaactgcttctgttctagtacattgggcctcaaaagcccaaaagttttaggcccaaatctaggcctaccaacggcccaaatcgaggccgaattttagcccatgttgaggcctactgaaactactccggatttgtctcgggcttcgtcggatcggcggcgaggctgcttccttccccggcgccggtgtcggtgaggcggcgaggaggaggccggccggcgcggtcaggtctcgcgcgacggggcattttccctctacctgcggtctccgcctccttcaggtgttcaggttcgtgctctgctctggccggcgcgcgtagtgtttctgtggccttgccgcctccgctgctctgcatcgcgtgtaatcccggcgatgttggtatcgatttgatgctggatgaggcgagggggggaagggttgccgtccgcctctcccggcgactgcggtggccggccgtggcggtgtgatccatgggccgccattggtgtgcctcacagtcacaactcacaagtacagtttatatattcaggagtatcatcgagaagctgctatattgcgcttgattgtctttgttgtgtagctgtcagcagttgtattagtctatcatcgggaagatttctgattccgtattgtattagttggggtgattcgaacgaggaggtgataataattgtttttttttttcaggttaaagggtggttatgcctcatattttaaaatggagggagtatgaaactactagtgttccaattactaacagcctgaacctaactgttacagtgggatgcacacagcacataggttatatagattggtagattagacagggcggaacactattctttttaacggagtgtgattagtttacatctctttgagtgctgtaactgggatttcttatgtggtttccacatgagacggttgtggagagtagaggccatgtagtttcaatttttaactgctgcttctctagtctaaaaaagtgtttcctatgacgaaggaattatacttcatgctttttatgaatgattgttcttagttctatagcattcccagttttaagtgtatcatacaaagatttcagctatgagttcacaaatttattagagctgcagcttgtcagtacatatatatgaaaaatcgccgccaaatgaacattgctggtctttacacaacagttttgttgaaaatgatacacatgcagacatgctccaccatcttgtatttagtgtgctggtctcgtgttacatttgcatttggttgattgctgatgcactcggtttctacctaagtgcattcctttgtttcttgcaggctaatggatttaggtaaaacttaggccaattatccttttctattgatttagtaagaattacttgttactatatcatcgacaatttccattcagcaagagataacgtagggcatgcttgcaaagcctgatttgcaatttccattcctttgtctggaatgcagccacattggacctttttcttgcatatattgaataccgttagcagtgttcatttactaagtactgctatttatcattgtgaatatatcgtaagggatgttgtttttgcatatttgcactacagtgctatctgtgtttggtttaggttcaggccttcaggggatgagtataataaaaattctgcaggggggcacacaaaagctttgcatgtcattccattagagtagaaataaagttgattacacaacaagaaaactgggagcatacaggctccaaagaatttagtttttaaaaaggatttagatcttgcataatggtttgcacttcgacgacccagtgcccctccaaactctgagttcttggaagttcttggagcatgttctcgagaacctgctgtattggtgacatcttgtttctcaaaaccgcgtgcattgagctccttccacattgtccactctaatgagagtacatgggtggggtcctattcattcttctatacctcttggaggacagaatatgcaaattaacgagaagacatgcatttgtttgcggagaaggcgagaactgaattaacttataaaaaaaatgtgttaatcacccaagctcaagagatgcgttaagtgatattattactctaaccttgaccaaatgggacctcagggtaggagcactggatattatatgagttgtaggcaaagcaagtctctaaacctgtttgcaattgagacattttccttctgtggaccaccgacccagacaaagtcggaaatgtggtactaagtgaacactgatgttcacgggctacagcactggtccatgacagaatgattctaattattcaagtctttttgcaaataactgttgtgcatcactaaaaacaaactttatgcactgttaacctgggacctgcttgctcaagctgtcaataatcacatacatttttccatttcattttaagagaacaatcatccatgctgttatactaatacaggtgaacggtggcaggcaagccacgatcaaataaccatcctgaatgcgaggtttagtctatatcactatcctgttgattagacgcctcctatggatattcccttctattattgtcttgttaccttttgtttgtggacctgcagtgaggccattcctttctccagctcttctccaagccatgggtaatggtatctggctgtctacagtgttggtataattgcgggaaacaaaactttttcaccccgatcagaaccttttttgaattggtctcgtttggcaatgattccaatgtgctatgctttacagtaagaacccttttcttcttggtgctacccaatggtttcggtctccaaggtaaaaggtagcactagatagtgatccactgctatggtactgtatattctgcataatgtcattgtgctttttttggataatacaatattagttgaagtgctgaacagtatcttgcaagcttatattatgtcataactgcaaggtttgcattgttccaatccatgcacaatgcccttgaatagcttggctcattttaaaactgtggaatcactaggttggcttggtttgttacaaatagagcttgagttttcatgttcattttcttcttgttttgtttaaactttttttccacgtacaagactacaagtatgcatagtttagttcatctccttaacacttgaactattcttgatatggtgaagtgttaaattgctacctgtgctttactggttactgcttcttatctttggtcgactctattcaaaccaaccgagtaacattatgcagggatctacatgtatttgcagcacataattaagagtttttgtggcttctgatacatacataatcttgttagctgcacccctgctcctcgtaactacgtaaattaagtatgatctgatatgtttgcaatcgcaatgcattttctgcaaagtgactgggcaggatctgccatcgagatatgtgggctttgaatgttcccacagttccacttgcaaatgtcttagtgaatcctgctagacaggattgtacaaaacattgacctgatatgacgaaaatatgacatatggcccttgtgcttgtactggcagtagcaaaaacacactataaaaaggcatagaaaatctgggcaaatgaaacatcatggtccctgactccctgtacgctatatgggagtagaagtatagagaactgaactaccactaccactactacttacctctgtctgacttgacatttgaactttttcctggtacatatactcttttgttctcatctgactgtcttgtttctcgcaggtgcatataggtcatatcaaagcttttgctgcttgctccaatatcacctccaaagaaactgcttgatgcaagaatcagcactagcaatggttcaaaggggacatttgttagcacttagcacgaacaagacatgacctgatgctgttcatgttcttgcctttctgttaacttcaggcaaacagctgatgaacagaggcttaggcaggcaaggcagcatctaaggcatgggagaaacagatggaaggaaggcagctgatatgtacagtgcgacgtggccactaaatggactcacatgaggtgattatcccttgaagcaggtatgcaccaaaagagagagatgaaaaaggagaagcatctcctttagtttcagtttggcgttaccgcctgcacgggcgatgcatgcagtgcttgtaactttcaactgcaaagctttacttatctccttctttctttaataccaaagcaaacctacttgcccttggctcctcttcatgtgactccatccaggcataaagcaaagtgtcaccatgcttacacttcactgtgcatagcatgattccatttcccctctagtttctgttctgttatttatacatatatactacacttttacccatgtaatacttactgctttggctttcacttggtgcagctgcttgtggacactgagccaggtagttccaactatccttgggggtccaatgatgtaatgattgtttgcacataatcatccatccaagtggagaaaaaaaaaggtgacaatcaaaactctagatcctggagaatagttagtatatacttggcaagcagatactactctacagtagaaaagctgggctgtgtggctttatagtcttttgagctcttgccaccatgccgggaaactattctaatccctcgaggggatgttccctcgtttgctcaaaaaccatctaaatggttatgaaaaattctggaaaaatttgacaacattcatacaacacatatatacaacttcacaaaatcttaagtccaaactcaactcacacgtcgagatataaaaaagacaaattcagcgtatgaatagtagtgtactgtttatatctaaatttgtcttttttgtttctcgatgtgtagatcgaatttgaacatgaattttggtggactagtaggtatcattatactctacattgtcaatttttttcagattttttcacaactatttgcatcgaatttagaagaaaaaggtatacgaggggatatccctcgagggattagaatccactcccccaccatgccatccattctctcaaggtcacaacagctgcttatatagcaaagaagagagctggaagagctagtagctagcaagcctccttatttttgcacttgcaaactgcattgtttcacttgtctgcagctagtttcaatggctgccatcaaagaggaatccgactacgacagtagccggtcttcgctgacggcgccggactcccgccggagctggatcagtgacattggtagctccagctcggtctcggcgcgctccttcggcggcgacacaccggcgtcgtcatgccggtacaagccccacaaggcgaaccaggccgagtgggaggccatccggcgcctccgtgccggcgccggccgcgtcgggctggagcacttccggctcgtccgccgcctcggcagcggcgacctcggcaacgtctacctgtgccggctgcgcgagccgtggtcatcgtcgtcgatgacgacgacggcgggcggttgcctctacgccatgaaggtggtggacaaggacgcgctggcgttcaggaagaagctccggcgcgcggaggtggagcgcgacatcctccgcaccctcgaccaccccttcctgcctacattgtacgccgacttcgaggcgtcgcactacgcctgcctcgtcatggagttctgccccggcggcgacctccacgtcgcccgccagcgccagcccggccgccgcttcaccgtctcctccaccaggttcgtactcgtacacctccacacccacgtcgaacgtgtgaatgcatgcgtgcccccacccatgacccattcatgtttagttactgctccactagcctttttctttgttttaccactactactactgtggtctgaatgaatgtatctgatgatctgaagagtgggggagaaatgctctgttccagggtcaagctttgtttcagtgtcacttttgcaaaagcttagacctcagctttaggttagtgatcgtctttccatgttgcattggggctttcatccaaatcctttttgtcttgctgtgccaatctaaacagatttgttggcaccacttggggttcatactaagctaatgatttagtaagatttaaacccaaaccattgtgcagcttaagcttttgatactcacaagagggggaaaaaagagagaagagaatcttggggttattagcattcctagtctcttactgtggatggattatctttgtcggacagtgaactgatgttgctgaaaacgaattaacattgtgttgtgtatggcaggttctatgtggcggagactgtgctggcgctggagtacctgcacatgatgggtgtggtgtacagggacctcaagccggagaacgtcctggtccgcggcgacggccacatcatgctctccgacttcgacctctccctcaagtgcgacgtcgtcccgaagctgctccgccccgccaggagcgccgccgccggtggcaagccgccgctgccgccgccgtcgtcgtgcgtgccgccgacgatccagccggtgctgtcgtgcatcttccgcggcgtgcacaagtgccatcacgccaaggagtgcgccggtggcggcgcggcggcgggtaacaatggcgacggcgacggcaacgacgaggaggcggagaccgagacggcggagcccgaggtggtggtggtggagccggtggcggcgcggtccaagtcgttcgtgggcacgcacgagtacctggcgccggaggtgatctccggccagggccacggcagcgcggtggactggtggacgctcggcgtgttcatgtacgagatgctgtacggccggacgccgttcaagggcgagagcaacgagaagaccctcatcaacatcatcaagcagccggtcaccttccctcgcctcgccggcgccgccgccgccggcgaatgggaggagatgaagacggcgcaggacctgatgttgcagctcctggcaaagaaccccaagaagcggctggggagcaccatgggctccgccgaggtgaagcggcaccccttcttcaagggcgtcaactgggcgctcgtcaggtccgtccggccgccggaggttcctgcgccgccggcgccggcgccgaagaaggtgatgacgatgagcaagaaggagcggcaagagccgtacaactaccgaccggaaaaccacttcgattacttctgatcaagtagctgccatgcatgagcatgatgcatgatgcatcttggttaattaattaattaatcacttgtaagaggggagattagtagtgtacatagagtgctaatcaatgagtaaccagtgttagtttctcagtgagtgagtgagtggcaggcggccatgggtggtgggggtctgcatgcttgctctcatggcgcggttgcgcacgcgcggttcgtcactgggttgggctagtcggctacccgtgcgcggcagacacgagcccccaccagttccgtcggtcgatcgatcgatcggtgaagcagcagctttgtttgcgtggccccggacaccgtgcgcgcatctcccagccgatctcgctgctgcgcctgcgcgcaatttcttgtgccgcctttcgcggaaataaagccagccccctccccgcgaagtgtctaagtaacttatcctaaaatataacaactttttctaaaatataataacttttgacttatcttgtcctaaaatataacaacttttagctaagtgtccaaatttataggtaaaaatgcttatattttgggacagaacgagtatactctatactcatcatggaaaatgtcaagcatgtctgttcttaggccgcccaggctagtcgacgaaaactccgttaaattttaatactgacgagtaaatcgataataaaatttaaatttttatagtaaatactagttatattgaaatttgctcatgcttaaaaaattttcgggtaggcttttttcccctaaaaccaagtgcaaacgttgctcatttgttcacatttatctctataaatatacactcactatctatataattgtacacatgcaatgcacatcttatctctctggcctccgtaaaagattagactgaacggcttattattaataggtatatagcatgtcgctaaaaagaatcattaaccataaatataactactcggaacataaccagctgagtgtcagctagccatacaatttatgttcaacggtgccaatgatggcaatgctaaattttgctataaaattgaaaatgcgaacttgaatttcgatctatggaagcaattttgccaatagtttaagaggtcactaatggccaaagttgtaaacagttctgatgacaagtaaataggtaaggagagtagctaaaaataatagtgatgttcaaagtattaaaaagaatcaactcgaaacacatccaagatggattttggtggacaaaatgaatatatatatataggcacgtaatccatccgtcccataatataaggattttaaatttttttgcttgtattgtttgaccactcatcttattcaaaaaaatttaaaattattatttatttttttacttactttattatccagtactttaagcacaactttttgttttttatatttgtacaaatttttttgaataagatgaatgatcaaatagtgaaaataaaaagtcaaaataccttatattatggtacggaggaagtataagtgtcatggtgggtcagagctagcgagaatgctgtggtttgattgactgattagttagcacgatctaaccaacaaaccacgtctcacgactgacagctactagtagtaccaccaatttaccgaacgaaaacgcaatacagaaatggacacacacacaccggaattaatgaaatcatgaatgctcaggggttgaaatagccaggtgcattgcatatatagtcgccggagtttcgccgtccgtacgccgtcgtcttcgctcaacagtcagcaaactggagtagcagccgcagcagcagcacaagctctcggacatactccctccgtttcattttaagtgcaattaagttttcgtgtccaattttaatcgtctgtcttatttaattttttataattagtatttttgttattatgagataataaaatttaaataatactttacatatggcttatgtttttcaatttttttaaaaaaatttaaataagaagaacggtcaaaattatgcatggaaaataatgactgcgcttaaaatggagtatgatgcctccttcgctttgtctccaccctctcggagccacctgatccgtcacgtcgatcgcccacgaaactgcctagcttaccatgtgcatgcgtagccatcgaccggtcactcgctcgtgtagcatatacgtgcgttgatgtgatctctcacccgatccatcggtgtcggtagactggactggtagtagtagactattcttccttcgattcgattagacaaatcggatgaaatgataaaatcactcacgtgtgattctctttttgatggttatactcacgtgtgagtgtgattcgcttaattaagaaaatatgaactatatttagctcaatatggacgacatgatgaggatggagtagttgatgatcgattattagtagtagtatagattgagctagctccatacatattggagtacgatatgattcgatggcgtatatacaaaccatgacatggatatatatgatgcatgcatgtaaatgtggttgttcgctgattgagatatcaatcacaccattcgcagttctctttcatcaagttaatgccctacgttcgaaagcattatttttgcgtgtttttgtaaaatatatttggacagaagtgtgtctagataaattttgaaaaaatatacataaatgcctagggtttatttgattcggtggaatttgaatccatatgaataggaaaaatggagaaataacattgtttgcacacatcaatctagagaaatttttccaagaggcttgagtacatatgttaatttcttgtgggaaaataatttttcctttgatttttctatactttaatcctacaaaccgaatgatactcaatggaattaatccttagtgatcaaatcctcagtttttcctcaaaaaacgaacgagctcttgtagtgtttcgtagcggatgtagtagcatgtgtgctactccagtccggtatgctgtgtttgttttggtcatggcgagaatcaaagagctttgcaactccttttcctcagctgcattattgtatattggtagttctatctcgatctccatgcgcatgcatgattcgctgcacgcatgtgagaagactgtgagagggcactgcactgccccgaatgatgatgaacggctacggaacggatcatcatgagcttctcctcctgcacccctacctcccatcattgctcaacgtgctacactaatcaaggcccatgaaatcctaggcccaagattctagaaaacccacctctccggcccatcaaaatacccagctcttcggcccaagataagaactatctaagcccatgtcgccgccgcggcggcggcccagctcgtcggaggcggtccaagagctcgagagagaggcagcccagctcgccgcgcggcggaggcggaagcgagcgtcacgttgcccacgcgatcgattcgatcgacgagaggagagagcacgagaaggagcaaaggagcaaccgtttattgcaccttcactgcgtggagtactggagcgtatgaatccgcccccaaatggtgccaaatcgcagccggtggatcgaccg

SEQ ID NO: 12181 - DNA, 12583 bp, Oryza sativa
ccgatttcctgcatcctaccagaggctggggatggctaatgatgcgaacacctgaatgaacagtagtccaaattgttcgtagcataggaatttaaggcgactttctaggaacagaatagtcagccaagttcaaatggaaattttcatatatgttccatttgttatggacaaggccaagtgtaaatgtgttccttcaggcatactactgtcaaatacttaatgcacatcaatatgttatctgattatggattttggcatggtcggataaaaatggtaccgtgtagggtcatgtaggcattctagtggtggttctgtatggttttcatgccataatttggatcctctacattgctgtctcctagatattgttttttaagtggttctgttgcctataatctcatctgatcaccaatgtgttgatgtacaaagttagagaatcctcttcagatcctggctgcagcttgcaaaatttgtgataatctaaattattttcctagcaatttagtctttatacttctttactgttttatttctgcattttcttccaactgacaattctttttcttgcttttcagcgcttaacccagacaagtggctagagttcaagctccaggagaaggcaacagttagccacaattcacaattatttaggtaatattggtaaaattatacatttttggacaacaaattgctgaaatattttttcctgctacgtacactgcaatttgtctttgttgcatgaaaccatagactattctctgctagcatatgtagtatattgctatgtaatgcttctgtattttgactaattgcacccattatcaatttcccgtagttcacgttagtgtctttgttttcctcctcatgttttgtttattgttctcaactttcaaaacagatatatcaatgttcaagatattaaattattcggtgcatcgtattttcccttttggcaagtttgaaattttcaaatcattttattgtcttgagtattaattcgaatcattctatcttgttttgcatgcttctgtcttaattgaaggcttatgcatgtgatttgatcttgcagattttcgtttgacccatctactaagttgggtcttgatgttgcttcatgtctcataacaaggtatccctttactttctggcatatgttagaatacctctactgtgagaatcatttatataaattaaacggaatatttgtttttttttaaagaatgtgtatagatgcagatgctgtgttaataaccttagttgaaacagtgttctagctaattattattgttgtcgctactagcctgtaacaaatattgtgcaaagcaaaataccactttatgttaaatgaataaatagttcatgtttttcccccatgttaaatgttactgtttagcagttagccgtttcagaaaagagagggttttatataccattctgtacatttcagcagcaccttgtttaatattttggccttctatctactcactcttttataggcgtgaatcattttgcatctacttttctgatagtatgagctagtattttttatatttatttcttaccttggagactctaaaaccattaattcatctcagggctccaataggagaggaagtggagggaggaagaaaatttgtcattcgcccgtaagcagagacaaaaacagttatccattattgcatacataacatatgttagtacgactgttcgattagatttttattggaatctaacatgttttctgcaggtacacacctatctctgatccagattctaaaggatattttgacctgctaatcaaggtaacacaaagtttaatgtctgaagttcagaacatgctagttgcttttagatcagcagttcttgtagtccagtgtaaggtagtactgaaaggagagttatttttgtgctatatgtatgttgcaggtttatcctgatgggaaaatgagtcagtatttcgcaagtctgaaaccaggagatgttgttgaggtcaaagggtaatgtgaaatgaaaatccgttgagttttctatgcatgttattggctatctgtaattgatgtctttctcttttttttttccaggcccattgaaaagctcagatatagcccaaatatgaagaaacaaattggcatggtaagacatgacttcaaccttagccaagtgtctatgtttgccaattcaatttagcaagcccaaagctagaaaaattctgaagttatcaagctggtctttttttttaaaaaattttaacaaaatgtatgtatatgctttcagatcgctggtgggactggcataacaccaatgctgcaggttgtcagggctatcctaaaaaaccctgatgacaacactcaggtctgttgccatcacaatttttttgaacttatttgcaccgacttgcacccttgtgacatccctttgagaaactatcattttatgtgaacgatattgctataccacgtaactttgttatgcatgctgacatgacagaacagatcaatgtatccactttcatactgctaccagaaataacattattagctatataatgtttgactaatgttttgttctaatctgatttatggttcttggtatttctaggtttccttaatttatgccaatgtgtcaccagatgatatcttgctgaaaagggaattagatagacttgccagtagctatcctaatttcaaggttggtattactacagggtttaattcattttgatctgattacatgggatttttttgttagtgtaacacgccctggtaatttttctctaggtattctacacggtggacaaaccatcaaatgattggaggggtggtgttggctacatatccaaggacattgccttgaaaggtttgccacggccaggggaggattctctgatccttgtgagtagtctttgtcatttctgcttatagttctgctgatattctttaagcttttgacaagagtttgtacaattttaaagctcgcttataatctccatcaacattatcttcattcatgtgtagcataaacatgattattaatgttggaatgtaagaaagcatcagtcattcaatggtttttgcttggtcaggtttgtggtcctccaggtatgatgaatcatatatccggtgacaaggcaaaggatagatcgcagggcgaggtaatgtgaagtcactatctaccttttgtgattgtagttagtgccatatttcttatccttcttaattggatgaaaacagtagaatgatatctggatgaacatactaagataattcctagctaaaagcgacaattttcgcttgccaagttccagctaacagacctgtcaaagctagccagggagcattccagtgatctaaatatcccagttgtatcctagttcctagatttgcattaaccactacaacatgacattcgttttatcactttattgccctcttttgcttggccatgttaatgttttactgatcatcaatttggttactctgcagctcaccggcattctgaaagagttaggatacactgcagagatggtatacaagttctgagtgcgtcttcaagacgttagaatgctgacatgcttgctgcaatggcgccatggcaatgatcaaataaaccacagctgaacacttcttttattatgccacagcagttgggttccagacttgagaaagttttgacatttctcaataatgttcattgagaatcacatctttttgcgtggtttgcttctgcgatatgttcttgcggcccatgcacctggatatgcattgcttcagccgtttatgagatggtctggaattgccgtggatgatcttatagagatagatccattcacagatttgagactaccttgtgcactgcatttcgagtttttacctgacgaaacagcaaattcatacaaggagagctggagaggtgaaaattaaacatgtgtttggaattttagttgccgcagaaccacagtagcacgacgattagaaaggtttagttttgaaaaccaagttttagagggtttgtttttaaaatttaaaccaaacaaacggctaaaagaactctaaaagcaaaacagttatccagcttcatcatctttttacttatacttatcagctaaattatttattttcaaccaaatttgattttaggttttttttcagcgaaatttatttttcaccatttactttaagattgttaaaaacacgtactatatcaaaattttatttgcaaattatttttcagcctcgtttcgtcgccgcttcctctcccacacggccacggccacgccgcgacacccatctcttcttcctcgccgcggcggagcggggagacggacggagagggaggggcgcgtctccggctggaccgtcatgcgcggccgcttcccgccaaggtacgcgtgcgatgcgaaccccatgcccgccacacggatccgcgcgcacccatggtgctctgccgccgcaaaatggcccggccactggttgctcctgcggctgcgtggtcgtggtgccgagggggaactcgggatcgtcgtcgtcggtggcgtagtggatgtcgccgtcggcggggtggtgggatttggaactggaaccatgtggtagcatctaggagaggctttggcttcctcttccctcttctgggatgggattcgtgtggaaagcgaggagagaagaaggccgctcgttttggcttgttgcgtgctagggtttggggaataggggggcagctggaaccctcgccttaatcgccctgataatcctgtctagattgctccatcctggtgcttggcacttctctcctgtagtgaagtgatccggtgattcagtcacaatgtgattgtgatgtctagaaccgtcattaaaaatgcgcatgattgtagtgtatggatagctacatccaggtgacaatatcataaaaaaaatattcaaaccatgctgtgttagcacaaggaattctaattaagaatttactactgatttttttttctggttggcagtagtttgcttgattatttgcttgtcttacatgcacaagagccaaagacgtagttatattagcaccactagtctaagaggataaatgattctgttgcgttgtcgatttatcaatcaattgctcagatgctaattcagtgtgcgggcaaaccttcctcatccttgcccttatctgcctgtcaccatcacctgacccatatcccttcaacttgcaatatttccaatttgtggatatatatgctatttagccttggtcataccattctcttgctcccttagtcctcattgcataccatagaacattcctagatagagaaccaccgtgaggaacatggccgcgctacaaagatcttcgcagacatttagaaggtccggttcatctggcttggtctgggatgagaggcttatgttagatggtcatagcgagagagatcaagaagatggagccttagagctgagacactcccgtagtgttgggttgattgggctgcagcgtaggcatggcgatggtgcagggcacaccaggtgcaacaacagccaggcgttccatactcgccgtgtgcccccagcacaggatcctccttcacccaaggttcccggatgcatcttctgtggaatttttaggaagccggtactttcagagccatctaaaccaagaaggttctagccttttgtgctcttctcaactatctgtgcagagctatcagtttcttttttctttgtggctttgtagtcaggtccatcatgtatagatgtaagtagtaagtcatatagttgcagttgctgtcagctttcttctttttatgctactgttctgtttttttttttactggtttccctcttgttagctcaacactagttagcagctgtattctagaatgcccgcctctgccatcatgtacttgatagagtatgtgcatatcgttgtatcatatgtataagccctttgtacatataaatacataatatgatgtatggcgttttctatcctttttcatgtacgtgtcttgttccacagccactccttatgagtacatccattcctcatgaaccagcgagaacttacttcttttaagaactatcggatacttcaaaatattttaaaaacacatctttggcagttatgctacagtttatgttcctattaaggaaaaaaattcgtgagcttatcaattattaggtcatatttaatcttatccataagaatcaatgaacattccaaatatttgcaaattttatactgattgtagcttccgtctttctccttgtggcttaagagttccatacaattatgagttctagaagttaaatatgtaggtaagcacattcgtgaagcagatgaagcattgtgtgtgctgctagctaggagttttttttccctttactgatgtcctacattgattttagagatcttgatgtaaataacaatcttaatgtcctacaataatattgtctaataaaccttaactcttgttttttttggcttaccatttcaaattcttgcaaaaagcatatgcactttgtaagttagtattgcttgcagtgctgccattattaatttcatttcattttaatgaattctttagctactacaaatcttttgagctgatgcaaatcacacaagaaactggaatgctagtgtttgttagaaatgttaattttgaatttgtagtgaagttctgttttctatttcagactattttccggtatattgctttttcttttagctgaaaaaataggaaactctcaaaggccatgtgggtgtatcgagtttgatgcagacattacttaagttaatagaagagtacgtgcccatagttgaagaacaggaccgggactagcaaagtttctccactagtggtttccaggtggactagatgacctagtgcatttacacttggttggagggattgattttggcccgtgtataggcatgctatggacttcttttctgacgatgaaaggtgtagatatgtgttgggcttaccttttaaacttccagaaactcatttcatcctttggagcaaatagatatattagttggcttccactgccaacatataagaaacagaatgcggcagtaaagtttgtgtattcctatctcatggatgtccagatactgtcagacaaaggtttaaatattgaatgactttgaagtgaccatagacagataactgattatttccattcaaaatgagaacttttttttcctgctaaaaaggagacaaataacagctttaactcattataccaagcaaatagtgggacataattaaatcaccggggtacctgcgggcagaaatttgtgaaaacatgtgagagagagcactaagcaatatatgtagcagtactgagggattgcccctaattctggaatcaggacagcctgttgaagttgaggttatttcaaagagtacagaaattttagatcaagttcctcctcactccgaaatctaagatacagatcaaacaaaagcgacattgttgcatgtcgaatcaaacatgaggatattattcaagaaacatacaagtatgttactttttgtaggtccttgtcgtgtcctatttgggatcacgcaaccagctattgaccttcctgccaccccttaagtcttctggtacttaatacgatcattctcagcttaattgcttgaaaagccaaccagttatctccacacatacaactttttctttgccgtacgatattatgttcttaacctttttgttccttttgtttaaaaagattgccttatatttctgctagcaacagttttcagtgtgcatgtttacatcatcgagtctgttcttttagttttgaacagagctgggtttcagatctttgcttgtgaaattttgagtgccaatctgcattggctatgttagcattactttatgattgatggtgatgattggcttcagtgcagacatgcaaatatgtgatcttgtttgattaaaagaagcaggttttgtggagaaagatgtgaatgcacaaaatgaaaggaaatacaatcatgctataaagttactgtctgtacagattgctcttattataattttcgacttttgctgtgaagaacatctctgttttcttttggacaagtcagaaatgaaccttttcttttaatcgctgagttgctgctttgttggagtcaatcaatcaattgcgaccatgaatatcttattagggtctattgctatgtaattattggtcatttattcaatattttagtgttggtacgtgctgaagttaattgcagatcagattgtgttctccttctaacctgtaatctcatattactgttgtgtctatctggtgagctgctgcctgtggtctagtactttgtactaaatcattaaaggacatatctggtggcacttgtaacttaagtgctgaagaatttcgtgtttattttggcctttaatatatgacatgacattctgggccatataaatatttgtttagtttcattggagttctttgcttgacttgctaagcataggtaggattatcagattagttggggaagtactactacttgattagcagtgatgttgaagcactatctaaattgtcaaagcaatatgtgcagctgcacgctccatgattaattttgcagcctttcaaaagggaaaggcagtagtagggtccggattacaggaataagttgctgtctcatcattaacacgaggggatccttctggaaaacataagtctgttttccattagttatctgtggacacattctaattgttgcttgggtctaccaagagcatgtcttaacacctaaatcttcttaattaaacacaattatctctaattcttgtggttgtgacttgtgaggggttgtggtattgtgacatgagacgtgtgactggaaaatgggttggattaccagatggccttccaagaaggaaagaggggagagagacggttaaccgatagtaccactgcaacacatactccttccgtcccccccccccccccccccccgaaaaaaaaaggctaaccttggcatggatgggacactttctagtaaaacaaatttggacataagaaagtgtcctatccatattaaaggttggcttttttttttggatgggggaatagctggtagtgacagtcaatgcaagggtgtcaatatattttgtcatcattttggcactattatggctcaagctcaagcccctctcatggacatccatgaaaaaaaaaacatgatgtggtgtgggaagcataagctatcgacggactgacaacaggtctctccgctattagatctacgataaaaatggtcacggaaattcttgaccgacctagtgattttcgtataaatggcactattacctgactgtttttattttgaaaatatatgaattttttttttaaatttcttttaacgtcgtattgttagtgataccgaatagttaaatcaataaatatgataaatttttgaccgacagagaatcattttgaaaaaaaatgctaccgatcacaattccaaccgttttcgttcctagttagatgaaggacaggtgttagtttagttatagcacaagttcatgtcagctataactaatgctagcttgtacaataatcatctgctactaagcccttgtttagttccaaaccttttttttaaacttccaactttttcgtcacatcaaaacttttctacacacataaactttcaacttttccatcacgtcgttccaatatcaactaaacttccaattctgtcatgaactaagcacaccctgaggatccgattggggagcgtaacattctgattaatggttggttggtagtcagtttctgagaagctggaaaagacttatttatagtacaaactaggtgataccctacgctttgctacgggatttatggatgggtatatgtaaaatattattgaaatgataaaagttaaaaaataatgtgagaaagatggtttgacacatatttgttgatctatataatataatattatagacgacgtgtcatgcttacataggatttaaaataggctagaatagtcattactagtgagtaaagatgtggcatacttgcatgggattttaaatgggctagaatagtactccatccattccaaaatataagacacaaccacccttaacccaaagaccaagaaataattattatcatcttgtagtttggatcatcataataaatataatgcatgcatctaatatgattagataacatgagagtggagaatttttttaaaaaataatttaatggagaagatgtcatagttaattgcatgcttgcatgcatgccttatattatggaatatctaagaaaagtggttgtgccttatattatgaaatagagggagtaattactagtgggtgatgatgtggcatgcttgcatgttgagctttaacttctaataattgttagtggataccaaatactcctctgcatgtagaattccttatagtttgttaagtcatctacattgaacttgttctctttacctacatgcctgactataattgaagaatgtacttgtgagccatttttactgtatctatatgaaccaaaacacgtaattacaatatttttttgaatttagtaattacaacaattcagggtatgatctttatatttctacttttacctgtccgaaaaatcatggctagaaaaatagaaggcgatgataaaccactaaattaattttaaagttagtttgtaaaattcaaagtttgtaatataaaacttcagttaaaggttaaccatttcgaattgacaaacttgcatgttttaattttaagaggtagagtatagtgttttttttttccaaaaaaggtacatacataggcacttatatacacgcgtgcatgttcacctctatacacacacatcctactattgtaagtatgtccgaagactcagtttaatatatgatgaagattgataaagttagcattagtcgtcacattatcagtggatatggctcccatcaataaagtggagcatagtattctcctgttttaaaatataaatgattttggtttaatagtatgcattctagtaatcgtattactattacttggatatgtcatattgaatataaaaatttcctgtattctgggatggagagagagagagtaatatacatcatttcatggtctggcacaattgacacgtgaaagaacggggagcatagtacgggtggatggcactcgtagatattaggcatgtcctcttgttgagtggtacacggtaaaggagaaaaaaaagagagagcccggtcgccttattttattttaaaaagcccatgatttctttgtcccattcgatctcgaagaacatttttgtctctacacgggtaggagtaacaatccattttttttcgaaaaaaaagtatatatattactcgaatcctctctacccgcagcgtgctcacatggctcacagcttccgttccgtccgagaaaggcaagtggttttacgcttttacgaaatcggatggatggggatgccgctacgcttccggggaggtcaccgtcagatgcggtggatgcgtgtatggtgccttcgcacgccacgctccccgaacccccaccgtcggatggctccggagtggacggcccggatgacggccacgtcgccctccaaaaccccccaaccccaccgacctctcctacccatttccccccatctctctctctctcctcccatcccgcagcagagcacacagactcgttttctctctcctccgctctctcgatttctctctctctcctctcatccgatctgcatctgcttctcctttccacacttgtgcttcgtgttcgtcgtggtctcttgtttcttcttcttcttctagatttgattttctttttttttcttccctttttcgcggcggcgaggggcgaggggggagggtgagtgtggtgtggtgtggtggttggtgggggagatcttgatctggtcgttggagatggcggcgcaggagcaggagcaggagaagcagcaggtgaagacgagcacgacgagctcgctgccgtcgagcagcgagcgctcctccagctcagcccccaacaacctcaaggaaggaggaggtaacgtcacgttctccgtcggccgtccgtacgccggatttcctttgcttgttttgttgtttgctgctgaattgagcgagcgattcggtggcggcaggggtggagagcgacgaggagatacggcgggtgccggagatgggagggggcggcgggtcggcgtcgtcgggggcgggggcggacgagcggcaggggaaggaggacgggaagcagcagggtggtggcggcggcgggcggcggcggcggggggcgggcaggagcaggcgccgccggcgaggaagcgagggcggagcgccggcgacaaggagcagaaccggctgaagcggctgctgcggaaccgcgtgtcggcgcagcaggcgcgggagcggaagaaggcgtacatgacggagctcgaggccaaggccaaggacctcgagctccgcaatgccgagctcgagcagcgcgtctccaccctccagaacgagaacaacacgctccgccaggtaaagccccctcgagctttgcttcaccattctcaa

SEQ ID NO: 12182 - DNA, 1271 bp, Oryza sativa
acacaaaacattggtttgtaaatttaattcatttttagttttccatacatattataacatgtcaccctttgagcatttgctcgggggccatttctatctaatattcttttctgagtgttgatttcatgaaaattctattcgacattgtcgaagactccatgtctctattgttctacaccaagatcgactaaggcgagtatgacaaatgttgacaaggtttcgtcgcagactttgcgccttctcgaccatttgagaacggctggtggatctcaacaaggaatacggaatgaaaagatggtgtacccgccgagataaaatttcttgacttcaatccaaattctcgattacagcaagacaggaaacttagtcgtatgctctgtaccttcttagttgacgtcggagattgactcagacaaaccctatacggtgcctgcacaaggcttataagggaagtctagcgttatctctgaactcaccgagaacggtcacgtgacctcgacaacagttattacgaggtcttcggattgagaatatgtactcgttcatttgcattaaagccgggggctactgtcagggttatggataccacatacctaaatagaggtgactaaaatttcgggacgacccaacacataccaagttttatacgaaaacaaccttcgggtatagaaggagttccagataaggaaagataaatagagttctatatggaaacgacaaggattactcagattgtatccatattggtttccctagttctacttggaaaaggaaacacctatgggtataaatacaagaccctctaagaggagaggggggatggaacaatagatcaagacacaagatcaacatacaagccaacatacgccaagacaagacgccggatatcgacttcagagataagcatggctagtcccttacggtgtctagggatactgataggagagacatagcgctgtctttgatcttgctggatgcggattcgagaaggaaggctaccctgttgtcgactacgagtcagcacttcagaccgccaagtcgacaacagttagataggctaccccaaatattgtactggtgtgattatggtgaataagagcaacgaccggcttcggccaacaggagtagggttattaattacctggcaattcagggaaccgaacctgtataaaaatcatcgtccccatctcttttacctcaatctcacatatatcctagtaccaacgatccccatattatacaaataccgtagacgtgacatcaaacgtcga

SEQ ID NO: 12183 - DNA, 3222 bp, Oryza sativa
  unsure (1)..(3222): unsure at all n locations
agagtgccacgtggcgatgggttttgcgattagggagaaagagagaggcatggacgggagtgggctcatcggtatcgcactttggtagcgcgacactagcgtcggtagcgtgtttttagagcgcgagagcgttggaaaggagctcgccgccgagggactggatcaccagtggagtcgtcggagacgaaagagtttttgcgatggagcacgtatgaaagacttagccggaaaaaggggatttcaaagtagtggcctctacagtcaaaacagaaacccctagattgatgcgggttcgagaagagcaaaatccgccgcattatataatatacaacggaattggggggctgctgacgagaaatccgcgctcagccgatggtgccggaactgtgttggcacgaactaagttgatgaacacaatggcctgagagatctgcttagctctagtgcaggtccaaaacatgatggcatgcgggcatgctagtcagtttgatcctacaactgacaagatatataaatagtagatcaaatagccgatcagctgacaagccgctggagtagttccggtcgatgccgatactagccgatagcgataaggttttgagctattggctatacgtccaatgtgggatctgatacttgagtaaataatgatacatagacaatcggctgataataatgtaacaatacaacaatataatccaatagaaaccaatcggctaacaatatgatagaataagtattgatccgaaggttaaagcatacatcggctggaggtctgatgtcattaaatccacaagattagataaacaacgaaacctttgttgcgatcggctaaatctaacttgtatgtaatccttataagccgatgcaacgtccagataactcatcagctgaaaccccgatgaaacccttattataatcaaaggcaggttagcttttccgattcaagcacgactagggatgatatatcgcaaagtatgcaaagaagcataaagtctaaacaattaagtctttgactaatcttcagggcagtggatatcttagctaatctaatatgataaagcaatttagccgataccagcataaacccctaaaacaaatcttagccgatacaagtaaattgaactaccaaaatagattaactaagatatatgatagataggtgcttacattgacaagattagagtgtcgaagccctagccccaccggtgcaaacagccatgagaagtataaactcgtcgaaaaagtagaaaagcaaaaagagtagtgatgctccgagagtagttgtattgatcgttcagatagattacaatgacctcgggtgtacatatttataccnagggtagatgctagtccttgttggaaaagaaagaaactttcctgaggataaaaggaaacttacatactcttccgaattaatagataatctgcttgtcgcatccttctttaactcggtctctcctggataaacttcatttgattgattaatttccttaaccgaatatagcaagaatccgactattaccgacgtgataatttcatcggccgattccaggactctgaagctgaaactcactctaggccgatgatgacttcggggcttaccaaattccactgttaaaacatgccccccaattttggagtatgagaactcatgcttcaaaattatcttctttttgatcttgatgactccaaaattgatcctcttctgtatctcgcaatccgctttcaacaaaaaaagggggaaaaaattgaccacaccaacaaaaggggaaaaaaattgactaccaacaacggagtagttgagaagactacaaaagctaagcttagttccttctgttgaatcgggaaatttgggccgttgattgaatcgttcaataattaattgttcttacaagcttccaatcttcatcgtcaagatcggtgtgggaaggataatgatgatccgacaagtgtcccaaaacctccacctgtgtttccttattcagcctaatcgcgtcctccctgttggcgaaatagtcatagtccacctccacgaatcctttgcgagcgtactcgccacaaacccaggcctgcaacttggcgaacttggcctcgtcctcatagaagtcgtgggtccacttgtagaggagcatggtgtactcacccttctcctccggcaacggcaccagggaccactagaacggataccctcatctcaatcaggcagtaagccccatctcaatcgggcacggcgtccgtcataggctagaagttactgatgtgaaaagtaatctcaatcgggcaaatggccgtcacagatgaacctatctcaatcgggccctaattaaagcccgtcaccgatagctttgacccagtctaccaagcgtactatagcccgtcacagatgacctatctcaatcgggccacaaatagagcccgtcacagatgactactaacctcaatcgggcctaaactagagcacgtcacatgtgacactcatctcaattgggcctaaactagagcccgtcacagatgactgctgacctcaatcgggcctaaactagagcccatcatagatgaacatcatctcaatcgggcatttagttatggcccgtcaaagatgagtataatccacaaaaaaaaataaattttgtttttttggctagcctcaggcctttgctagccatgcccgctgcaaaaatgacagaaacaaatacagatatctaatatccccagctccccagcatcacccattcatacatatgcattcacatacacagacatcaatatatttcacacaaccacacattgacagccatctcatatttcatatccattcacatatttcacatccatttaaatatttatcgtatttcacctgcaaaaccgagttaattggatcaaatatttatttagcaagtcttaacataaacatatgaaatatatacataaatataagcatcacagttacatcatcacagttgcataataagtgttcatcattctctagacataaaagttcaacattgctcatcattttagtttaagcctaaacattcctttggggttaattatttcacggaggatgaagctggctatctcctcacgaatctcctcaaagctggtaggcagagacttggttattgtgccctacattgtcataattccagattacttgatcgatcatatataagtactaaaatgtagttagtctatcacaattgagaccaccgacctcaa

SEQ ID NO: 12184 - DNA, 559 bp, Oryza sativa
ccgtcgccgttcgcagtcgtcttcctccgcgccggccaccctcggtgaggtttcctctcccatctattcccctccctctccttcctagccgccgcttagcgcagccgccttcgcgtcgcctttgcgccgtcgcctccgccgccggttgccgtcgccggcaacgcgttcgcgtgtgcgcgcgccgtcgccgtcgccgtggccgcttggccggtcttgagccgagccgggtcgccaccgcccgtccgatcagccccgagggcgatctgggccgtcggtcccgtggaccggcggtggaccacccgcgtggtcccggtccacggtgaaccgccccccctgagccgctgaccggtgggccccgcatgtcggcgccgcgcctccttcccccgtgctgacgtcagccctgggatttattgcgcaatgaatgatttaaggtttttcttttatagtaataaacacagtgaatcttctaaaattcataactaattcatccgagctccgtttaagcccattcaagtctcagtaaatcaagaaaaatgtgtagaatccattaaaaatggtt

SEQ ID NO: 12185 - DNA, 3816 bp, Oryza sativa
tttttcttacttttaattcccttcctttcaccaccatgcaacaaaatttgctctagtaaatgctaagagtcgattttgagccgttgtcatgcataacaaccatactcctttctctttcctctatgtcaccaaatttacttgcatggcaatagagagagaacactaataaacaccgttgtacatgcccttatacatgacaacggcttaacaacgactcttacactataatatagaaatatggttgcatgaggataaaaatatggaaagaatattaacaaaaggaatattttttgagttaatgattagagtctttgtcgtctcaactattataaagacatggtctctaaatatcttgtattgtttaagagaccatacctgtctctaccattgaacatgcccttagagctaagctagatttgccctcgtatgagtcgatctttatttgttttctttctatctgctttcagccattcggtcaagttccagctttccaagatggcgatcttatccttttcggtaagatatctctaggggaaaacttgtacatactctagaactgaatagaacactacttaatataaagaatctaaacatgctgttttgtcatgattcgttgtaatatatggtgttctatctaatcctactgttagagatatttgtgtgcatgcatatcttattctgtttttgccgtttatctctcacaatctattccgattttgtttctataagtcggttgagatattgtggagaggtagaggctatatgtacacatgttgcgcgatgaatctttttatcgtgttgagctatccctgctttcacctacattgatatattataggacggagagagtaaatgttataactttgatgaaataatcaaaagttcaaaacataagcatacttgtagggtattttggtaagttttagtctagactttggtactttccaatacctaagtcaatgagaaatatcaaaatttgtattaaaaaatatgataaccttttaagagatagggagaatacgaaaaatgagatacttagggtatctacttatataatccactcgtatatttttacgcctcgtaacaatacaaatgaatgtgaatacgtaaatttaactaagctgttgtcttctctgccatcgttaccaagttgtcactttcttttgtcgattgacagagtctcgtgcaattgcaaaatatatactccacttcgcaaaagcgcatcagacttgctgaaggaaagcaacctctcgcagtctgcaataatggtcgatgtgtggctcgaagttgagtcccaaactttcgacactgccatgtcagcaatcactttccaatgcttaacaatacccactttcatgggcggaattgctgacgacaaaatcgtggaggagaatttggggaaactgaagaaagcccttgaggtttacgaggcacgctcgtgcaggttcaggtacttggccggtgatttcatcagcctggcagatctcagccattttcctatgacgcactacttgttagctactcctcatgcatcagtgctcgatgcatacccacatgtgaagtcttggatcaatgatttgatgaagaggccggctgtgaagagggtgagagagcttatggaggcatgatgagaaaaaggagatatccatcaattaatcatcagtctgtaggtatgaaatgtttgtcatttctggtggggctgttagttaattataatggcttaatccagagaaaggaaggaacgacattcattatcttaattaaaacaaaaaaatgtcacgcctccatgtgtccacgtagcttattatgcagctttgagttgagagacttaattccaagttgtttcatgatttgatcagattatttaaaaaaaaaaatctctgctgttgagatatgcatctccggatctccccatgagttgaccactacagtgctctgatcaactcgctataaaagcgaccaaccccttcgccttcgcctcaagtcacacgacgccatcaatcaccatctacacctctagagagctaattaagctaaggaaagagaaaaatggcgccggcgaaggtgtacgggccggcgatgtcgacgaacgtgatgcgcatcctggtgtgcctggaggaggtcggcgccgagtacgaggtcgtgcccgtcgacatgtccaccggcgagcacaagcgcccgcctcatatctcccgtaacgtaagtacaaacgtcgcgcgcgtgcgtcttctcttgctcttgtgtaatcgatcgcttattaccggagttgcaattgcacacgatggtagcttagtactaggtactagctaagatagtattcaaagagagtaggaatagctaggcagctagtgacgtttcttagccaagtttgtatgatagcgtaaaaaaaatcattaacattaaattaggtttattaaattaactattatatatactttttactatatgagcatcttatattaaaaatgttgctatatttttttttataaaactggtcaataaatttgacttaaataaaaccagaacatataacagacgctcgcattgaagttttggcatgctcatcattagttacgaagagtagctatatttttagcatcatattaaaaaaatattcaaaacgtttttatatgataaataattacctactcttacattgtaattacgatgtaaattttcaatcttaaactgcaattatattatacgatttaatatttacatttggatttttcctaatacacaacatataagataattaggattaaaactaatttattatctacttacaaaataagaggacataggacagatagaagcatatgcttacatatagaagagagcgggaaaaaataaatcaaatcaagttaaaaaaacgtggcaccatatttttaataaaaccgttaattattactagtttcgacgccatcggtgttatctttaggttctgttaatgttaatcacgtcttttgtatctctctctatgtgttgcagccctttgggcaggttccagcgttcgaggatggcgacctgactctgttcggtgagatagcatcgtatactgcccacttgctttgtgatgtgacattggatcgatcaacacaaactattattgtgtgtgtataataaactataaataattttaacttttttctagtcaaacttatcgaagattgaccaaatttattaaaaaagattaataatattttcagcacaaaataaatatattttatattatatttaatgaaataccgtacctgttatcaaatttttctataaactaaaacaaacgtaaaataaaattaactagaaaaatgttaaatcgacttataaaataaaacggagggtactattttacttgcatctttgctattttcttggaagatattttagataactgttccagtgttccattatagactttagtaatttaaaaacgagaatacaatagcaagaaagtcaaacactctgattcctttcggagtagtaatatattgttctcgctaagcacatgttccgaattcactaggtgatgcttgaccttcaaccactgcaatactcttgcttcctactactatcaccaagagtagaataaattaaagtatatttttgacactaatttttattattacattcgtttttaaacaactgacagtgaacactgtttattttaaacttgaccattcatttgtttttgaaatatttataaacactaaacggaatgccatgtaattaaagtctacagtgtcgtaaggataaaaacgaatttttggttcatttaatctgaccatttaaagttccaatagtatatttgataca

SEQ ID NO: 12186 - DNA, 1999 bp, Oryza sativa
tagtgtcatcaaattaatattgaatatattttgataatgggttgaaaatgttactacttttttctataaattttcaaacttaaaacagtttgactttgaccaaaatcaaaacgtcttataacttgaaacggagggagtaggtaaaatacttctcatactatttagagtttgatttgttccttttttccgtcaatatatagatcaactttaaaatatgcagtcccatcgtttcatctaaaactggttaaaatccgtaacgtttgttaatgataaaaaaaacaatttatatggaaaaaatttatatactccacccatccctaaatatttgacgccgttgacttttttaaacatgtttgaccgttcgtcttattaaaaacttttgtgaaatatgtaaaactatatgtatacatataagtatatttaacaattaataaaataataggaaaagaattaataattacttattttttttaataagatgaacggtcaaacatttttaagaaagtgaacagcgttaaatatttagggacggagggagtgtgttttcagcaacttaaaaactatgtaaaaaaataaaataagatgaaagttataaaaatcaactttgagattatgatttaaattttaaattttggatgtgactgataagctaatagggaaatctgagctaaatatccctgtaatttcagggtaaacgaggaggaatgtcctagaggtgtacatatctagctcaactaaacttttttttaaaagaaaatcaagttaagaaaggcacttgaagttgcccgaaaattaccgttttccttttgtactgaagaatgtagaactcaatgaacattggtcaacaacgaatgtacggtctgcctagtggcggaagctagtatccttgaagtgtcccagactttccaggaaataactcggtagaaataaattcagactactaaggccgtatttagatttagattttttcttcaaactttcaacttttccatcacatcaaatatttggacacatgcatgaagcattaaatatggatgaaaaaaaccaattacacagtttgcatgtaaatcgcgagacgaatcttttgagcctaattacaccatgatttgacaatatggtgctacagtaaacatttgttaatgacagattaattaggtttaatatattcgtctcgcagtttacaggcggaatctgtaatttgttttgttattagtctacaggcctgttcactttgatgaaaaaaatcttacccaattttagcaataccaaaattttggcatagttgccaaaattttagcaacttaccaaattttggtaggatttcttatatagttaacaaaatttgacagcaaactaaatgtaaccatttttttggcaactttaccaaaatttggtaaggttgaaaatggcatcaaagttaacaggtcatatatttaatacttcaaatatgtgtccgtatacttaaaaaaaaattggcaaaaaattggcaagagagtcttgtattcttgtcgcctgcttctgattgttgattttcaggcagctcacctggtcgacttccacaccgcatcatattctctagctccatgccttcatcttgttcaggttcctactgataataattaacaaggatataccgatcatatcgatggcgcctgtgaaggtgtttgggccggcgaagtcgaccgccgtggctcgggtgctggtgtgcctggaggaggtcggcgctgagtacgagctggtcggcatacacatccccgccggcgagcagaagagcccggcgcatctcgcccgcaacgtacgtaacgcgatcttccctcttcactctcgtgcaaattcaaaacttctatgtagctgagaaagagtcagaaccaatctcagaagtagtactacttcatgtagcaagattaggatatgtaaaatggttgttaacagtggtctcttagcgttgctaattaggaatacttgttgacatggaggaaagagaaagaggagagacaaa

SEQ ID NO: 12187 - DNA, 730 bp, Oryza sativa
tactcactgacaccaaaagagaaaaaagctttctgtacatgcttgcgtagtttgaaagtctcgactggtttctcatcgaacattataaaacttgtatctatgaaagatttgaccatctctgggtacaatgctcacgactgtcacaagatgttaactgtcttcctacctattgctataagagcggtcaagccagttcacactaagttggtgataacaaagttgtgctattttttcaatcgagtatcacataaggtttttgatcctgaagagttaggcccccttcataaattcgcaatcgagacagcttgccagcttgagatgtttttccctccatcttacttcaatatgatagagcatctgattgtccacatcgtccctcagattatcgaaattggtcccctatatctacatcatatgtgggcgtatgagaggtacatgtcagttctgaaatggtatgtctgtaaccaagctcatctggggggatcaatgatagacgggtacataactgaggaggtggttgaatgctgtatagattatatgaaggacgccacactcattggtatgccccctcctgtacacgagggccggttagctgggaaggggaccgtaagcaagaaatggttctatgatgaggcctataaagttgtagcggaagcacatagcagcatgctgcaacagcgcgccatcctcgagccgtacattgaggaacacatgaacgagatcagagctt

SEQ ID NO: 12188 - DNA, 658 bp, Oryza sativa
tatagggcgaattcgagctcggtacccatgcatgtggttgatggagattccatatgtcatacgatggaggtattgtgtgcgtatgggatgcggagtcgaatttggaaggagtccaaatttggtaccattggttatgtaaagtttctttcttgtattagagggtttcctaaggtgtttaggactcttagtatgagtttggtttgtggctttaggatgcctacctcgggtataaatagagggggagcgtgaggcttctcggtatcgcttttcacagcaattgagttgagttttgagttagggtttcgagtttagtcgaaatttttgtaaggattgctgttggtgcactttgttaacacagagagaatcaataaagtcgtcatccactttaagagttcttcgatttgtgtttcaccgggtttcggcggtgtaatcggcggcacaccagcggtcaaaccggcggcattcgggcgggcagaccggtgggtgacctaccgtctgaaccggagcgacattaagcgcgacagggatttcagggctgtccaacccgtagaaacggttatctactttggtagaccgatctcatacaatttgaggtaacttttatttgcgctaaacgtatttggcctttgggtatactaaccatttacccccctttgat

SEQ ID NO: 12189 - DNA, 532 bp, Oryza sativa
cttcaccgtcggcctgcctccgtcgccgccgagtggtgcctccgcctacacggctggcctattatgccgccgctgttgggcgtctacgacttcaccgccggcctgcctccgtcgccgccgagtggtgcctccgcctacacggctggcctattatgccgccgctgttgggcgtctacgacttcaccgccggcctgcctccgtcgccgccgattggtgcctccgcctacacggctggcctattatgccgccgctgttgggcgtctacgacttcaccgccggcgtgcctccgtcgccgccgagtggtgcctccgcctacacggctggcctattatgccgccgctgttgggcgtctacgacttcaccgccggcctgcctccgtcgccgccgagtggtgcctccgcctacacggctgacctattatgccgccgctgttgggcgtctacgacttcaccgccggcctgcctacgtcgccgccgagcggtgccttcgcctacacggctggcctattatgccgccgctgttgggcgtctac

SEQ ID NO: 12190 - DNA, 643 bp, Oryza sativa
agttggcgttataacaggccagccgtgcaagcggtgacaccagtcagcggcggatgcggcggccggtcggtgaagacgtagacgcctaacaacggcagcataataggccagccgtgcaggcggaaacaccagtcggcggcggtcgaggcggccggtcggtgaagacgtagacgcccaacaacggcggcataaaggccagccgtgcaggcggaaacaccagtcggcggcggcgaaggcaagccggtcggtgaagacgtagacgcccaacaacggcggcataataagtcagccgtgcaggcggaaacaccagtcggcggcggcgaaagcaagccggtcggtgaagacgtagacgcccaacaacggcggcataataagccagccgtgcaggcggaagcaccagtcggcggcggcgaaggcaagccggtcggtgaagacgtagacgcccaacaacggcggcattaaaggccagccgtgcaggcggaaacaccagtcggcggcggcgaaggcaagccggtcggtgaagtcgtagacgcccaacaacggcggcataataagtcagccgtgcaggcggaagcaccagtcggcggcggcgaaggcagccggtcggtgaagtcgttaacgcccaacaacggcggcataataa

SEQ ID NO: 12191 - DNA, 612 bp, Oryza sativa
ggcgtgcccaaaagaccatttccccctaccgcggatcgactagctcgtggatcgacaactagctgcgaactcatgagctttttggatgcgtactccggctaccaccagatccacatgaatccagccgacatctctaagacagccttcatcacaccattcgacaccttttgctacctcaggatgcctttcggcctgaggaacgccgaggcaaccttcgctaggctagtgtacaaggtcatttacaagcagctggggtgaaatgtggaggcttatgttgatgacatcgttgcgaaaagccacaaggctttcgaccatgcgtccgacttacaggggaccttcgacaacttacgcgcggcgggtatgaaaccaaaccctgagaagtgtgtttttggtgttcgcatgggcaatttgttgggttttctcgtttctgaaagggatatcgaggcgaaccccgagaaaattgatgccattcagcaaatgaagcccccgtcgagcgtacgcgaaatacaaaagctcgcgggccgaattgcggcactcagtcgattcctctcaaaagcggccgaaagaggcttgcgtttcttcaagactctccggggcgcggaaaagtttacc

SEQ ID NO: 12192 - DNA, 675 bp, Oryza sativa
  unsure (1)..(675): unsure at all n locations
cttgtatctatttttcagttgagtgataccaaagctgacagagacttcacttttgtccgcttactcgttgcagtaagatgtgataacaaacgccctttaatatgtagttctctactatgccaaaatgattaaatacttcaatgtagatttcttgtcaggtagtatgaaatatctactccagtaatggacgaatttttgggaagggaatgtgaaattaccggctattgatgacatcaatttcatgtaaggtgacacaatgcacgacctccttgcgcttctggagctcgccctcggggcacttgacgaacttggtgtgaggaccaacagcatcgtaatcccgcgacctcccgattgagcggccaagcttggtcaccttcccggaggccttgtcgagcgcaaccacatccccgctctgcaccttctccttccccagggcctcaatcatcttgccgccgagctcgtacacggtctccatgtccgtggtcttgagcgtgaggcgcccggtcttgccagccgcggcgacaccggaaggcgcggagctgccggcggcggctgcggcggagacggggcggtcgatcgagatctcaacgacctcgccctcgatgatctccgcctcctccttgatgcggacgccgatggagcggcggaaggcctgngtgagcgcctcggtcttgg

SEQ ID NO: 12193 - DNA, 524 bp, Oryza sativa
cttccttagggcaccccgaagctcgtccgcccgccgacgtcgtcctcccgtggcttgccgtcgctgttcgccatcgtcttcctccgcgccggccaccctcggtgaggcacccccctcccctcttttcccctccctctccctcctagccgccgctttagcgccgccgccggttagtcgtcgctttagcatcaccgcccttcggcgccgcctttgcgtcgccgtctccgccgccggatgccgtcgccggcaacgcgacgcgcgcgtgccaccgccgtcagccccgggtcggccggtcggctttgatgccgagccgagcccggcggctgcctccaccgccgcccgtccgatcggcccgagggcgatctgggccgtcggtcccgtggaccggcggtggaccacccgcgtggtcctggtccacggtgaaccgctcctcctgagccgctgaccggtggggcccgcttgccggcgccgcacccccctctgtgctgacgtcagccctgggatttattgcgcaataaatgatt

SEQ ID NO: 12194 - DNA, 515 bp, Oryza sativa
acttgtcttctgtgccgatgacctcggggtcggaggatgaaaggggcggccttccctcagtggcctcggggccgtcctgggggtcgggggctcctggcatcgtcggacaagcgggcaaagggccaactccggtcgtcaggggcctctggcctccgttcgactcgggggcctcttctccctgctctttctcgggtcgagtcagcacagggttagcctcggggtcagagggcgttaagtgcggccttcccgcagtggccttggggccctcctgagggtcgggggcacctagcaccgtctgacaagcgggcagagggccgactccggtcgtcaggggccgtaggccaccgtccgactcgggggcttctcctccccgctcgctcccgggccaagttagcacaggatgggggtgcacgaaatgaggattgttttcatcgcgctccacaaccaacgctgcactaactacttggggggtcgccgctaagtaaagtagcaggggctcatttggctccggggcg

SEQ ID NO: 12195 - DNA, 514 bp, Oryza sativa
gaagtggtggtggtggtgcttctctcttttatccactgctgctttttcagtttttcttgtgacggtgtctcatcatagattaatcttgtgtttctcaagggtgcccttggcatgttggcaataccttctgccctggtaatcctagctggaatgatgataaaggacgtccatatgcccaactttccatatgagctggtaaacaattttgctttttcatgtcagatataagtactattttgttttcctggattgacattttcctgtctactgttaaaaaattaggcccatatgaagtttgtagaagcaagtagaacaatgatggcaaccttaaaatgtcctgaagtatggcgaccatgtgtttacatgtacatgtctcttgctttgagcgtggacattcaagaaggaatgttctattggtacacagatagaaatgcagggctatctttttcagaggtatattataatttacaaatcttatgctatgctctgtggttttcgtggcctacatgggaat

SEQ ID NO: 12196 - DNA, 4485 bp, Oryza sativa
tgcagcgcatctaaaggtaaaatgggtttcataacgtcaaaagatatcgggtatggaaatatttcacccaaacattctgatgaaatgaggatctacctttgtcatccatattggcacaaagaaaaatgttactgtatcaagcattttacagaagtaagcaatggccaagaagtagatgcctcacctctagctgccctctacctgcaacagcatacagcacggtggatccacggaagtcgagatactccgacacgtcggagcgacgctcgatgagctccctcagcatctccacgctgccgccccccgcggcggcgtggactgccctactcatcatttccagccagaacaccgaggagcagccaccaccgctcctgcgccttccccgttgggacaattcgtcgagcacctcggcgacatggcgtggtccagcagcagcttgaacacctcggcgttcccgcccctcgcggcggcgtagaacatgtccatcacgccatgctcgccctcgccaaacaccagcaagggatccctgtccataagctcctgcacgaacgccatgtcccccgccgacgccgccgagtagagcagccacccaccgtagcccgcccggagcagcgtgttctcggcggcggcgctgttcttgcactcacactccagcagagccgcgcaagggttaaactcgtcgggagcagtgcagatcgagggggatcgggggcggcgccgccgatgatggggaccggcgatgcgggctgaccgggggcggcaccgccgatgatggggaccggcgatacgggctgaccgggggcggcgcgaatgcagaccggcgacgcggaagcgagggatccgggtggagggggcggtgatttgccagggggaggggaagcgatccggtctggatcggatcggatcgggaggtgctcgagagaggcgcgcggtcgcgcgaatgcggaggaggcgcggtgattgcggcagagaggggggtgtgggacgcgcgctgatctgggacgttggatccaaaatcttcagatgggtttcgaccgttggatatgtgatatgatgaatgagtaaaactatttgttcaactatagggtagatacataccgagcatctcacaagctactattattgatatgaacacgaaattgtaatcacatgcgaaatacgttggtttttttaagttacagaaaattgctaatcgttattttagtattttgaagttaaattaaaaaaaaataaattgagagtagtttttatagatctccaggatttgccggcccatccttcgaagatgctcataggggtagggtttgcgtgcacgcattcataggggtgagtgtgcatgcgttgtgagtgtctgtgttgtaccgtgtaattcttaaaaaaaaaatcgtgttaagaacttaagagcaaaaagttttgcaatcatataaagatgacatcattctagacaataaggttaaactattgaattgtatcatatgtgaaatacgttggtttttttaagttatagaaagttgctaatcgttattttagtattctgaagttaaattaaaaataaaattgagagtaggtcttataacctgtagctaaattttatcgtgttaagaacttaacaacaaaagtttcccaatcgtaataagatagcatcattttagacaataaggttaaattattgaattgtgtgaactatagttataactaatataatttgaagacgtctagcaatatttgagaagaaaaagacgaataagtaaaatgcaggcttacattaatatactcgctcaatctttacaaatacttttaatcactatatctactacatataaaattattacattctccatttattgaatcaaataatactattagcaaatcaaaccagctcaggctttggtcgttggtaaaaaacgtttttttactagtctggcttcggcttcctgaccagcggtagcgctagcttggtgagtatctgtcccttcaattgaggacaaatttaactattaggtggcaaccctctaaacgcccgattagtgcctctctctccctcttcatctcaccatactacccccttcatgctggtcgtctcaatcttatagccacctcgctagccgttgtagattggtagccaccctaccaattgccggaagcctccctgttaccatgcctgctcattgttggaggagctctagcacaaggtaagcgttgaggccaaataactcgccaggcgataagaggaagtttggtgcaggaggagtccccacttagaagtggaggtatttttttaataacaatgggtctccaaggacaacagttgtgaagagagacctagcggcagaggaactagagggcgtagggttccccaggttaggatgtgacgtcaagctcgtcgccacccaagttccaagatgcacaccttgtctttgtcgagctcaagcggtcacctcatcgtcagggttgacgccctccttcatgttagagctagtttgacaactagcgggtacaacgatagggactttgctatgattaaggtggctgttaggctttaacagctagcgaagaaatgaaatataaagaaattgctaaccttgctatgctagcgggccatgtagataaaagtataacaaaccacctttattggatgataattttgtgaagacaaaattaaaaggaggcatttagctccctctatcaaaatcctcttgcttaagatcggagagacgtggtcgctgacacgtgggcccgatggcaatgggctccacgtgtcagtgagacaaatgactactctcccaaccccgtccccgtccctcccctactctctcgccttctgttcctccccctctcccttccaacttcccaagcgcgcgcggggagacgatcggcgacggcgacggcgaggcggaatggacagcgggaacgtggtggtgtgcgacaacggcaccggggtaagcccgccctccccccctcctcccgcagcctgatccctgatccagcgtggcgacctccctccctccctctctacctccacgctcctgcccctagatctgcaccccctccgtcccggttcttcttcttggacggtttcttggatttcttctgaaatttcctgaatatatacgataggattgtttctctctctttggttggggagtaattagcatctgtgctctagattcatttgtgccgaataagttttgctgcttactactgagctgtaattaatctaggatgaaatgatacgtgtgcacattgcaagaaattgaagggggaaattgctctagtatggtggaattattgttctccacataggcaggaaaaattgctgtaatacgatgagattattgttctctgttgaatctttagataatgtccttccaaatgcggaactggaatagataatgttcattcatataaaccacattagtttgatattttgcggtccaaaagaaattatgctgttgtctttggcttagtttctgttaagtattttccacatcattcctgtggcttgatgttcgatatgcttaaagccttaaacaacagcagaacatatcatattcataggtgatcttgttaatttctaattcggtacctaatggctaatgttgcagtatgtaaagtgtggctttgcgggagagaacttccctacatctgtgttcccttgtgttgttgggcgaccattgctccgttatgaggagtcactccaggagcaggaattgacggtctgaaatcaatgtctatctttgtgtttctggcattccctcattctgtctctctctcagtacaccttataattgtgattgtgttccacgcaggatattgtggttggagcggcttgtgctgacttgaggcatcaacttgacgtatcatatcctgttacaaatgggattgttcaaagttgggatgatatgggccatatatgggatcatgcattttacagtgagctgaaagtatgacttttcatatgatttatattactttaacatcagacccttttaaatttatatgctcataattcatcaacattctccgttatgtgtcttgaaatctcttagctctaggtaaatcaatgtatttctattttgtttctttaggttgatccttctgagtgtaaaattctactgacagatccaccactcaatcctgtgaaaaatcgtgaaaaaatggtaggttgttttctcccatctggctgttctgtactatgaaatttgttttttaagatatcactaactagcaaattgaatcctacgataaatagattgagacaatgtttgagaaatacaactttgctggggtattcatccaggtccaagctgttctttcgctatatgctcaaggtactctctctctctctctccccttccccccctctcagtatacagacacatgtatgagcttgcacacctacaaacacaaaatgtactggttcttttcttaacatgtattatgtttgtatcctttccaggtttgctgactggacttgtcatagac

SEQ ID NO: 12197 - DNA, 2914 bp, Oryza sativa
atatacagaagggtaacaagaggcctctgtctcctggaacccaggcactgatgtgtgatgagcaagatgcagttttccaggattcaaaagctccagatgcaaccccctcaaccacagaagagaatctggtagacattttcaaagagcaagagaagcgtgtattgacaaatttccgtgactacctttgtaagcttgcgacctgcggaaaattgcaaggtgagtctttgtatgcactcatttggtaacgtaaatgcaaaactagttttaaatgagatactgaaaccatctaacataactttgcaactttccgactcttcattcctatcagtgtttatgcacacataaacaccaagataactgtgcttccttgtcacagaactgaagctctctttggcatcaacaaattgcagcgaacaagcctttgccgaccacggtaacaattcctccataacaagggttgcgaaggtaaccaggatcagacaaacaatccctcagttctccagcaaggcggcaagcactaccgctctggacgtctgatccttgctcggaccaaaatcggcaatgctggcatttggaaacttatggggcagaagagccctttgcacaatggcgtcgacaagtgctgagtgcatgggcaaacctgacgatacctccagtggcgctatcacaacttgattggcaactctggtataaattgatttgggccctttcttgggtactacattttcccactgccttgccatgtaaactctcggtgacgacatgagcggttctgttcatcttccaacgtaatcagtcgaattgccctttttccctactatcagagttcatgaatccatggaacggctgaattgacaggattgaacagaacgtgctagtggtgatggcatttgacaaggaagtagtattgcatatctttttctgagcaagatttttattagctagttacccatctgcttctcatgatctttagcacccaaagggcactcatgattacaatttcagttgacaaagaacatggcgtgccaacgtatttgattagcatattattacaatttcataccaggtataaagtaactacactttcctgcatatgccatgttctttgtcaaatacctggtgcttgcctgttatacgttttagcactatgtatactagtaatatgcccgtgctaaacgctacggtgcaattccattgtctttaataacttttaaaatttcatgttgggaaaaaaatttatatgatatgttcaccgtatcggctcacctttctacatttttcccctccctgttaatatttacctctgtatctgtccggcttcaattttttccccggtacaatcaggctgtggagctgtgttctctagaaagaaatccctccttccacatgtaaaatggaacgatgaattaacacaattagctaaaaaaactttaaaaatggataagatcatattactatatgccccgtctaatagtttaggaagcgtgcacgcaggacctttcaacgacaaagagacaacgtgagtgcaatttggagagacggcggcagtgacgctttaagcagccgcacgttgctggagatcggcatgagggatggtggcggcaactacagattgtcttctgaccatcaaattaaatatgaataactcgtcatctctttgaaacaaagggcgcttccggttctgtgcgtgcttcaaaccactttgtattctccatattaccatatctatagagtctaattttcaatgaggaactactgagttcaaatgcgaagacggtataataatacgctatgacaacagtgctgcggttatcattgataaaaagggaatccaaatggaacttgcgtttttggcgcaatggccgaggaattgagagaattgaattttactaaaatagtttcataagctcatgaagtattaacaataacaaaagggaaatttgagccttctttgttgtacttgctaattcaatgcaaacacatataagctgtaacagatggtttcatatttgagccttttttgctgtacaagctcattgcctgtaacaaatgctcattgttggaaaataagagagcagatcaatctagaagtcagctcctcctctagttgccaagctgcaaacgcatgtgaatggaaaaaaacaacacagtgggtaagttaggagaaggtgactttttctctttttctgaaggttggagctctgccattatattaagaagttggtttcagactacaattcaaggatattacatggaacaaaaagcaactgagctttcaccataaactccattgcatagcgaatatagttggccagtttattttttgttaaatttcctgcagatagaaccttgtggtgtacaaaaaccgatccaaagaacatctgcctgggttcatctggtgcccaacatagttctttcgaaattgttacaggtcattgaatgatgacatgagcactgattgcagctatcgatgcctcaaaaaatcctaagctattattagaggggcatcaagcatacagagttatcttgaaaggagaggctaagtggctatggagaagagaaattccactgaccgcttcttcatcgtcaatttccagccgccgctggccttcgtgagccattttgccgcttcgcccacagttgtccagcaagaactcaactgctgggcgctaccagtcgtcgcacaaccatctcagtcggaagcgctgggttgcttctaactaaaattactaaagaaaatccggtcatgaatttcacaacttgaagtccatgtgaaagaggccaaatcagtatggtctttatatttattctttgccttcataatacactggagagttgagcatgacgatattaactaaatgagccttgatcatctgggcatggtatgcttattatataagataaaaaaaatgtt

SEQ ID NO: 12198 - DNA, 2665 bp, Oryza sativa
ttacaatttggaagttcaaaatacctgagagcatgctacgttttttcaccaagaaactgaaatgaaactggcaccctcaagttttgagacttagttggtgtcctaaactctcacagttaacgatgcagatattattttccagggactgaaattcatacattgttatgtcattagacaaagtttcatgtctacaagtcagttagatgttgtttccttggattctatttttgaatattctttgaggttcagagcaacagcgacacaaaatgcattgtaatggtcatctagaacttacaggtcttttccattgctagaaattaatttattgtcatgatattattaccactttattttgtttttcttggtacttttcctatgattcaatcagattggctaagtttgagtgcagtcatattttagcagttaaccagtcattgggtgcaaaaagcccatgtcaagatttaaggcaaagtttctcatatgaagaaccaatgagatgttcagctgcgtacttgtataacatatgcttccatgatgtgtatgaaactcattctatctttcaattccagagcaaagcagcagagggtgatattgtgggtaaacatacaaaggggtgtaaatgcaagagaacagagtgtctgaagaaatactgtgaatgcttcaaagctagtgttttctgttcagagaactgcagatgtacgggttgcaagaattacaagagtaatgcagatagaatttcccagaagaacactgttcatgcgcatcatgtgcagaatcctgcttcaagtgggatggttggacaatctgtgataattttccatgcagcagaaaatgactccagtctttcattggctgcatctgtgagcgatcattccattaacaacaacacttcacatgtaattcttttgcagcatacttttcaaatttgtcacgggccctgcttcctgataggctgatacttaatgtacaacacaatttaaggctatctactgcagcaatctggataagtgatgatagttgattagagaataatgcttttgtgtataaaacaaaataatccttctgagcaatcaaatggctttttactaaacctcaatccattcaattagcaagggtgcataaacagaatctgaaactctgtttgttgacatgcctccttgttagctccatttcaggctctttcgtgttcactcacttcttctgttactagagaagatgctaaaagtctcgtaaaatatgtaccacatgaagttacttacaggtgaaaattttctcatggtcataatggttttctctgttgtacttctttcattctactgtataacatatatttcattttttaaggccaagtttagcagacatcatccagatagaagatgtaaatgagctctgtaatcttttaattctagtgtcaagacaagctggcgcaacacttttaggtatttttctctctaaaaaacaatactagcgatgagttattcatattacagttgctacaatatactcttctatgacaatggaattcaacctctggctatattttacatgcatttttatttaccactgaatgttgggaacaaaacaatatgttggatcttctcagatgggaattgctttgttgctcctttagagaatttaataagagtgtcaactggagtgtaggggtgaagaaattgccaagccatcaattgacaactggccatctctcttgtgtaggcattaaaagagcacaaatcaagtatgatagagcaaatattattgaataaaatactgggactggtccatctggttatattacaatatagccatcagagattgagattatctagccatgtttgtatatctggtataacagaatttttccctatgcataaccatggaaaattcatgtttgaaccttcaaaagatgaaaattatatcattacaggtcatcgaaatcccccagaaagaaatgataatgactttcatgtagaaggcaatatagcctttatttgtaaccacatataatatgtttaatcatttagtgttttttattttttggggtaaaatcatctagtgttcttgtcattatgatctactagataacctgttgagcatattggtgaaatgcctccagctatccccttactatccacaaggcttgggtggataatgtactcttctctaaccgagcaaaggagccagaatagtcttgctctaagttgggagtttacaccagatggatttcttttcttgtgggaaataaatatcaaactataagttattttttcttgtgtggaatacctaagcatttctcaattggatattgaaactgtgcttatattctctcttttttctcaagaaaaaaaatatgtttatatctgaaaatatcaaaattacaatttcttcactggaactccttatctttttatggtcttggatgttgacttggtgataaattgcacgtccacaaccctcatgtccacatatttgacatatatcaatgcatatatcatgttaagtatgacacatgtgcttgttctttttccttgtttctctaccaaatggcatcatgtagccatacgatttgacgtggttgtggtatccagctaatgtagtaattaacaattacatcagcatcagttgtcatgcttagttgaatatatatgtggggaataatgcttcc

SEQ ID NO: 12199 - DNA, 5530 bp, Oryza sativa
acctagctatgaacaataatactccatatgtagggttgtttagctgacaatttaactttagcacaatagttttcacaagatgtaacaagccattatcacccttaagacaagttgtagcaagaaaatgtaccaatcatgaatggtcttgatttcttaaaagtggtactataccatagctacacctatccctgtgtgtaagatgatcgaccacttatggccatgaaatttaggccctaaaatcgtatatttcaatctacaccgatgcattttaatatgcttagttctcttcatttcaccttttttttcaaagtcctttcttggcactggtaagtgttcgatgacaaccatggctacttcgaatggttgtatctcgtgacaacaatgtgagtgtgtgttccaaacaataagaattccattgttccacttaataagaaaaattaagtgcctcttcagaaaaactaaattggtaatattgtcaaatttttgtaggataaactaaatatgttgtaaccaaaattatttatacgttatcaatgttaaacgcatccacatgtttatcgacctttaaaaaaggtatagtttaaaatggcaccaatctaaataggctctaaattggtgtagccattcttcttcattagatcaccactacttaaataggtggatatgcttatttagtatagctttttgttgttagcattaaatataaggcctagggtcccaaatttctacaaatagcgtgatcaagttatggcaggaaccaaacactaggcttatcctatattatacatatatagttcatcgatcaccactaagtatagttaatgctatttctatcttctctcattaagtcgtatcacccagattatttctagcctttagataatagatctatagttcaaactgtgtcttctttcttctctcataataccatgcaatctcaattatttttaggcttaaaattcataagtatcaatttgttttagttttaataatcatattgcatcttatttgtgcatattatgcaacttaatttcctgcagcaacgaggctgaatattcatctagttaggttaaaagtagatgccacaccttcatgcctggtgcaagatcaaacgtgatgagtgcgacaatgcttataaggggatgtagatccttgcatcagcctgaatcgcctaagttgcgtttgagaagaaggaaggatcacgagcgattggcattggaactgcatgcgacctcgtgggggcacacggcatgatttgcggaggtgcgtgcatttgttggggggaggggtgcaggagattatgcggccgctgaccgccgtgcgtccgagcacgattaagagtcggagaagtgttcgggcaacgatcagtgttacgcattcgataagattttttttaggggggtggaatgtgagtgggattaggcctcatttgcgcgaagaatcatgcatcgtgatcttgagcgcagaatgcaatgtaccgtaggtaaaagaaaacgatccacgaagaggaaagagatcaatcgaactttctagaaaactgtgatcgatgatgcaagcggcagatagagatagtgttgtttcgatgttggtcatccacatgtccacatgtgacatgaattgtctgttttggatctaaaaatcttttaacggtcgttatcttttctttgtttatctccgttagtactttgttcaaagactaatttatcctctcaaaagaaaagaaaaggtaaattttcctttgaccaccttttattacggatattctgcttcggattacccattaaccaatatttttaattgaaccgggtattttacctttgcaccactttaaaccattctcaacttttttttattcatttacatacaacttgttgaatgaaaaaaatgtctcatacataactgtgagaattttattgttaaataggagccgaggtatctgacattgttcattgcttaagaaaaaagttgggtggtccaatccaaagcgaaaacacgagttgaatggtgatccaaataaaacatgggcaataaaatgtaggacacaactacaccgagagtgctagctggatagtgctaaagagagacacccttctttcaaaaaaaaaaagctactagtacactcaatatctatgtatttttttcttagagaattttctcttaaattactcatccgatttataatccgattacaccgttgtattcataacaattaaatctttacaacaagatctcacatgattatattttgatgaaaaatcataaattacttttatgatatatctaaattacttctaaatttcactaagttacttcttagacatataaaaagtaaattcagtaaagcttaaaagtaatttacatatattatagaaatatattatagaagtaacttataacaaaagaaaagtaactttaatttacaactatatctagattcattaacatctatatgaatatgggtaatgctaaaatgacttacattatgaaaaggggggagtaactctctgtagtagaaataattatattgtgagtgagctgaaataagaaactatgtagagtaaattcgcaagtaaagtgtagagaagatttataaagtccacagaatatagaattaactaaaaacaataataaaaataatcaacttagagcattatgaattatgaatgtataggagtaatttagtcaaatctaaaagtaacttatatatatatatgataaaagtaacttacgtatataataaaagtaatttataaatataaatattttttcatcgtaatataatcatgtaagatcttgttgtaaagatttaattgcaacaaacgtaacggtgtaatcagattgtagatcggataagtaatttgagagaaaattctataaaaagaaaaaaaaatagaatgcattgtgtgtacttgtaacaacgggaccttttctcacgtaactgtactagtagcacaggaccttctctcatgtactagtagcactagaccttctctcacgaatgagtgcgttgctctttaacactaaatctagagcgctatcggtttagattttgcgtaaaatgtagcaaaaaaaaagaatatttgtgtttaaaaaaagaaaaaaaggaaatagtcgtgcggcggtgtttccccttcttcctctcggcggcgacgccgactcctcgtgagttcgtccgccgccgccgccgccaccacctgcaccgatccccatccatcccgcgagcgagtaggggcgcgcgtcggttgtccggctgcttccgcggtatcctggtgagaatccatccatggctacgcacgtccactttctcagctctctctctccgcgtacccttttttcttctcgaatttgcgttaaccctagctgctgttctacaaatttgccttaagtttgttctcaaaatgttcgggggagttcaactgaacctccattttcccatgttagatccgccactgtttcgtagtgatcaaaatgacggtgaaaccgatgtgcatcctggcttcttcttttgttttatttacatgtgagttttgattgattttgctcagcctggaggtccaaatatttagtactgatcaatcccaaattcccaattgattttatctgtaatgtgctagatgatctcggagaagaggattgattttgtctgatcaggtgtttaatttggcaccagagtgggatctaggaagtggtgggaaatggagaagccgttacagctttgtccagggtcagtgaagatagattttgcctctgcctcgtatgctggcaaggcagatatcgctgctaccgcggcagcgctcttgcatgcgcttgggccgccccgaacacctccctgctatcagctcccactggcaaaagtaaattcatcactgccactatggcctccagtgatatgcccttcaacatttgcccagaagcgtcctatgtcattgcctagcccacctccggccaagaagctgcaagtgcagcagtcttcatccatgctgccacaagattttccaaagttagaggtattgccagttgaaaagcccacaaagttgcaggtgcggcggtcaccgcaacatgtatccccagcgctgaagcaagattcaccgaagatggagaggccattgttgccaaggcctgcaacctttattgacgtgtgagttctccatttcttggaatagtgagatggaatgctttgttgaagaaattgaaattgataacttcatatttgtgatagtatgatgcatacctttaaagttttataattcactgtttgccattgtttgcactaatgcatatatgagtttcttggattaattgagaaaattaggagaacagataatgaatatgtttcacatggtacgtaactgagttttccatttgctagtttaccttttcttagagcaagaattggatggagcactttactaaaggaggtaaattgtcttcttttctgtctcttcaggatgctgagttctcaaaagccatctagcgaaatgtggtctgaaacaaaagatgtgacactgacaaggaaaacaaactgcagctgcaagtattcgaaatgcctgaagctgtaggttccataataaatttcctccaattgctgcgtaagaattgtttttccatataatttttttcctatttgataaatataaaacaagttgttactatttttttagaactttggcgctgcttttattgctttgtagaatttttgttagaaatattatgtcagtagacactcttcaaccacaaagtttagaatacatgttcttgtgtgaaattaataaccgttagttggatttcatgttggttgaaagttgttttttgcaagctatctcttcttttcccttcctacctgtttctctgaacgcttgttgcaacctatttctctgaaggtttgttgcaattatgagatgctgcatttaacttttgcatgcttccatcattgatcaatttccttcctacctgcaaagcctttttttttttgttgcgaggaatttacacttgcaaggttaatggccctaggcttttttagtaataacagagccaatgacctggtttcgtttgtaaccataatcacacattcacacatactagtcttttggtttgcctgaatttgtaggtattgtgagtgctttgaaaaaggcagatactgcattggttgcaattgcacaaactgttgcaacaatgttaatcatgagaatgcaagacaggatgctatcaatgttgcattggaacggaatcctgcagcttttatgccaaaagttttgaatagcacagcccacaactgtgaggtagggcatgatgtatcttattgcaagatggcatgttttctctgttcagattctaattctctagtagctagcctataagccttagttatccatatcatttttgggttaattgtttgcctgttcagtttgttcatgagcaaaaggtataataaaggacgatttcacactaggttgtgaacagtataaacaccggcttttaaccaaacctggtgggtaccaccataccaaaataaatgtataatgtgtatata

SEQ ID NO: 12200 - DNA, 30014 bp, Oryza sativa
aacgtgtgtagtaagtagtaagcacaaaaagttaagcaattgaatactgactattgtcaatttgcaatggaaagaaagttttatctagatttacttttgcccgtcatgtttattatgatccaggtgccggtagttgatggattctcttacccacatattacaaaaagaatgaatgtagctggaaggcacataacatcttatcttgttgatctactctcaagaagagggtaatactctttatcatttttatatgtttgtagataaaagatgctctgaaaacacaggcttatgcaattgtttgcttcagtgtttttcttatcaacttaatttcgtgctttaaaggtatgctatgaacaaatctgccgactttgaaacagtccgggaaataaaagagaaactatgttatttaaggtcagttgctttattgttcttaattgttttcgctatagcttgctgtcacatttcatagaattgaaaagggaaaatatgtacagctatgattacaagcgtgaataccagctaggacttgaaaccactatccttgtcaaaagctacactgtaagtatgttaacctgctttgtttctatttggtccctttttgtattattggctgaacttttgtcatcagcttccagatggaagggtaatcaaagtgggcactgaacggtttcaagctcctgaggctctttttactcctgtaagcttgtactcatactattctttcatagcttgctgatatacattaaggcatgcatttctctgttaggatcagtaccaacataacattgataaaacatttgttgagcaggaactcatagatgttgagggtgatggaatggcagatatggcgttccgttgcattcaagaaatggacatcgacaaccggatgacagtatacagcttacccatacaatatgctatattttgttgctccaatcttttcacttgcttttgtttatcttcaagtatttatttgtaacattgttgatgaattgatgagttagatatagaacctctgtagtcttcaattgaaatttcgaaggcacactttgaattcaactacacatggcttgtctagtgaatttgtgcataagataatctttgataatttaggattactttgttttgttatttggtagcaacttgataagaccatggttttgcataaaaaatccacttacatatatacatgatttttatgttgttgtcttaaattagaacttgcacaggtaaacaccataagttgaattactgtcaaatgctgaacacacttccaaatgttgataatttttcatatttagtacatgtgtatgtgttaatgtaaattaagtcaagaagggacaaataaatgccagttatgttagtctctatacttgattaattgtattttaagttgttatgaagtacttctagataagcattggatcatgtgttcttctctcattggatgtctggataacatcttgcagctttatcaacatattgtcctgagtgggggaagtaccatgtatcctggtctgccaagtcggtaagatttgacaaacatatcccgctctgtcttcttttgtttactacagtacatattaacgattagtttcaaacaacactatttttacactgaagctcacatcatttttggtggtctatgccactctgattttttgcctgttctatttcttaccaatgtatgtgtttagctgtttttataagcttcaatattgggtatgacttaacacattacaacatttttgaagactagagaaggaaatgcttgatcgctatcttgatgtggttctgaagggaaacaaagatggactgaaggtaatatttttttgtggttattttgtagctgacaacagttgaaaatttcataagcttattgaaatcaaacacaaggaaattcccaagttttttttccagtgcaacacattttcttattcaataatggatgttgtcttttcagtaaggaatgtgaccattttcacttctgtctatgtgcagaaattgcgtttgcggatagaggatccgccacggagaaaacacatggtttacctgggtggtgcagtactcgctggaatcatgaaggtaatatacttttcccacagcgttatatatctatcggttattataagcaaagccttgggacaaagtagagaggtgaacagaaaaggagcccaaaagatgaaatcatgcattactgtgtgtgcattgtcgcatgggaatctgctcattttgctttattactttgctgacggctgttcacctagcaggattcacctgaattctggattacaaggcaggaataccaggaagaaggccttgcgtgcctaaggaagtgtggacaagcatagccgtcgagtatgttcctatgatcctacctagattctcatcaacagcagatgtgaaaggctctctcattctgtttgcaggagacaaaaaggaaacctatgtttagatgatggatgcacattacttgtagaaagatgagcacatagtgttgtttgttgtccctattgttcaggatacttgttggtgcatgttgtagcctagaagccactatgaacacaaactcaccatataaccatgatgagcaaacattagatatatttcattttctattggtaatatacctatgaacacaacacatatttctacttactatattatgtactggtgagctgatgctcttcatttggtccctgtactgctagggcaaatcaatttactgatagggaaagtcaatttacaacgaagcccttaacattagaattgctttgagatttgtgcggatggcatatatttcaatggatcgcaatattgtattcttctttttagtatatcgtgaatcttaacaaaacatctaattgttcagcatagcacttatattgtaaaaatcatcttctctactgttgtatgaaactttttgctgcctatatttatcttcatccaagaaatctgtgagtttcttaatcagctgcaaacttttagcaagttctgtgctttaactcagcccatttaggaaaggtcatgttccattttccaaaattgtactctttgctcaaatatattttctgaaattgtttcttttccgtgtttggtagaatttgaattattttccgcattttaacacaagatgtttggcagaatttgaattgttcaccgcatttaacacgaagatattgtgctaaatcaatagttaaatgccttgcatacgatgttgctcttggtgaacaacaatccattgtccaatgatgtgcaagcggggaattctgaatttatgagacgcaaccaagccagggtagtggctccaatgattcaaaaatgtaaggattgcggaaaccagaattgaataaccaaaggaatcccaaaattacagagttctagtccaatctgaaacgaacggtaccatcaaattcctctgaatatgcgtgccaggatacctcttttgcctttcttctttttttcttttcgatcttttgccttcctttttttttttgataggaaaagcttttattaacttaacggcctggctaaattgccatccaccatactctccatgcccgtaggcgtgccgtcccaggaaaggccagcattcagagagcacttacaacccaactccgcaagggcatgcgccacacgattacaagatctagggcaatacaaagaagcaaaggaagcagcaatcactcttttaatctcaacgatgacgccttccttccttgatgatagggtggtgatggcagattattagagtcttttaaaatggtatagcttattgaggacacatataaatgaattaaatattacaaagttgataagtttacttattaagacaagttcttaaaaaatactaatgaagtttctgcaaaaaccacacccaagcatattcgtggtattttggtggacataatcaaaacttgctccctccatgttttttttaaataatagtcggtcttgacttcaaaaattttgattcggttttgatttatagttgctctttgaacaactatgtttttaaataatctaattatttagcaacaaagttgtatatattcgaataaaaagcattttactaatatcttacatttgtacctgttcattttgatgttgcttaaacctatttgtaataaaaaaaacttgatctcgtaggaagaaaccaacactactttctgtgaaatcacatactcgcttcaaaaattttaattcggtttttatttatagttgctctgctttgaacagcaatatttttaaataatctaattatttaccaacaaagttgtataattagattcgaatcaaaagcattttactaatatcttacatttaaacatattcattttgatgttgcttaaacctatttgtaataaaaaaaaaacttggatcttgtaggaacaaacctacactagtttctgtgaaataaagtactgacagtcaagagatatcgctgttctacaaagacagactcaaacctgaaccctatcagatgccctgtgctgggacaatataacaagagatatcgctgttctacgaagacagactcaaacttaaccctatcagatgccctgtgctgggacaatataaacaaagtcttgagcatcatcatgcaaatgaagccaacaaccatatccatctccagaagctcgattggttcgcgagaaatttcagccgtgcagtttctccaagtagccaatgcaagcctttgaacctgggacatagccatacctcgactggtaaaaaaggagagtaaaagagatgcagaaattattcacaactggcttcatagaatctttttcactcatgtgaacttcaaagtgaatatctgaactgcagtaggaagaagtagcttaccttcaacttcaagtttctccaaacacaccaaagaattacaatttactcatgttaaattgatgtacctagtattatggcccacatctttaagcgatcgtgcctttacaaaatctggcaacaatgcgacttagttcttcaaccttttctcgcgtgtccttctggtaagacgcactcttttcaattgctcaattaccaggatggatattccattcgagctctactcaagggaaagtcaaatggaatatcttgccaatggtggcggatcaacataatttggaggctatggtacaacttgaaccaatcaaaagaatgaacatatcatatcttgccaatggtggcggatcacctcttgtaaggcttaatgtgatatggtttgaattcttcaccaaattttgctgcttcttcatcaacccttttcttcagccttctccaggtcctcaacatgtctgcttgtattaaaccacgatatagtgtctcaaaggtgatcttctggggaagaaaacctctctctatcatttccatgaaaaactggcatgcttccctccatttcttattgtcacataaaccatgaaccaacaaggtatacgaattgagatcaggaccaacagtgctctcacacatatcattccaaacttgcataacggtgtcatgttggttcaacttgataaacattccaagcagtatgttgtaagtgtgaatatcaggtgtggctggtgaaccaggggccttcatcttattgtacagctgtagggcaccattcacatcttttctccctcgatactctttgaagaaacaattgtatgtggccggcgaggggcatactccctcacttgccatctcatcaagcaagctctcagcatcatccaatctcccacaggaagcaaggcacttgatcacagaagtgtaggttgccaccgtgggacaaatgcctctctctttcattgagcggaacatacagagacatagttcaggtttatgcgcacgactgtaaacatgcaggatgacagagtagcttgtaacattgggttcgattcccctttgatgcatttctttcaagagatcctcagctgcacgaactgttctatcaaaccggtaatcagggtgcaagcttgcatgcctacagataccattgaggagaatgttgtatgtaactatgttgggttctatcccatgataaatcatatcttttaggaacttctgagccatgtcatttcggtttaccttgcaccaaccataaattagaacagtgtacatcttttcgtttggttcatacttgtattttcttttgttgaatacttccgctgcaacctgcagtggtgacagatgagtaaatgacaatgattagcagaagaaaccatggagctgtcccctttaacaaggaatgttcacaaagcagccaaaaaatgagttacaggcagacagttgatcaatgtaattcaaacactagcacgcataaagtatgtgtgactgtctagctaacattgattggctatcaactcagcagcagcaaattctagaatagtgaaaagcatcagaagttcaaaacgcatgaagtagcaaagacgaacaattctgttgtaaaaaaaggtctaacatgtgcaagaaatggttattaggaaaactgaaactttcaacagacaatgaaggttcaaaatcataactccatattcatcctaatattcagagataagcaattgcagcacacttcaatgaaattttgataaacatacgacctaatattgtaccggcatgagtctggtactctggtacctgtcattctagtgttgctctctataggtttctcaacagataacacaattagtggtcaaatccaatcctacactaataacatattactcaaatcagagttgctcggttaatgttgcttggcagcacaataaaaagtttacaaaaatgtacagaaaaaaaatattcacaagaagctaaatgcctaaacatgaagctcatgtactaacgtcatccattaattaagaaaactcctaagaaggaactattcaatataagatgtgaatctacccataaatccttgtgcacaatgaagtgtaacaaaaggcaaacagttctaggatgaatcaacctaacaggcaatatcagacacaaaatattcatcagcgatactagtgcacatcccatgaaactgcaactacaaatgttttcttcactctacaaaccacgtacatgacaaggccttaagctatacaaacagattcatactacgcgaacagtagaaaacacagctcatactcgttacacaaagtacattggtaatttggtatgcttatctgaagctcgatcgatactcaacgaattaatcaaaaccacactttcacaaacggctactcaatgggctaaaattttacagcgtgcagagaacaaaagaatcgaaatgtgtgaagctaaggcatttacactgaactcaatccagccaaaaataatctcagggctgaacagtgaaaacctacgaattcattcagaacatcctctgaaactaactagtgaccaatctttatcaagccaagaaagttagctatgagcaaataacctttggatacttgtacttgcagagggtgtcgagcagcgtggtgaactcggcggcgtcgggctccctcccgacgaacgcctccatgtcgtcgaacgcgcgcaccgcctgccgcgtcatcccggcggcgacgtacctcctcgcgagcaccgcgaacgtgcggggcgtggcggcgccgtccgccgcggcctcgacgacgagcctccacgcggcgtcgaactggcgcgcgcggccgagcgcgtccacgacggcgtcgtaggcgtcggcggcgcgggaagaggcggcggggggagggtggaggcgcgcggcgtggaggagcgacagcgcgagcttggaggcgccgcggaggcggaggaggagctggacgaggaggtcccccgtgagggagacccccccgccggagaggagctggagcggcgactcggccgggtggaaggggttgtggtgcgcaaggaggaggcgggcgagctcgtcggcggccggggacggctcgacgggcggcagggcgaggaggtgggtcgtggtacagaggaggcggcggctggcggcggcggcggggagatggcgcggcatggcaggcggcggcggcgtggccggagttggtggatggaggagcgtggtgaagcggtttggggtttgggctacgaaaatctgtaccgttggttttggttggttggacggctgagattggaggaagccgcgcagttagttctgctgccactgcagaatcgcagatctccaaaagaaaaggaaatgtaaattaagtaaagctgtaaatacttttgccaaactatctcaaaattacgtatttaaatcgctgtgtcacgaaaccatatataaccaaatttatcacagagctacaatgtttaagatggaattgtggagtatcaaaactacattttcttaatattctttaagtaacattttagtaaaacaaaattatagaactaatgatattgcaccaatttgatcagacaactataacgtttatagcttccacagaacaatttggattagggatttaaactctaaacttgcagttttgtaacagcttcaataataaatccttagttttatgataatttatcttaaatatgtagtttaatttgtgataaatttgatactctatagtgacatgatatcttatatttttagttatgtgactatttgctcgaagtatatgtagttttctgaaattcgctaaaaggaaattcagctacaggagcataaatcaaggttgttttttttgtggggataaatcaaggttgttgttaggtgttgttcggttaatccctttcgtaacgtgttccacatctattaaggtgagtaactagttggtaaaattttgaaccagctgatttcctattccatgattatctttataagcttgcgaaatgtggaagattacaaagtgaatacatgactatctttgtgagcttgtgaaatgtagaagattacaaaggtgagtcatagtatacgcttgttacataacagaagccatcttttggtgtctaacaaattgcattgagcaaactgtcgacaataaccgtaacaattttgaccgtggtcgcagtctcgtagagaatgacatttatacaaagtgaggttagcttaattatatgttgatatctccggtctgttgcaattattatatgaggtttggccaaataatttttagagaaatattataaagacccccctaatagtaagggttgaatatgaacctttagtatcaccttactatttgtagagtgacaccttactattattaatggactctctccgttaccatgcaagtaaatttggtaacgtgaaagagaaaagggggaggaaaggagaacattgttgctacacataacaacgactctaaattttgttacatgatggtgaggtaaagaaaaaagggtaataataaattattttttgcagtaatcgttaagaggttttgttgtctcaattattataggaggatagcctttaagtcatatgtattaactaacaacccgtatcaaactctacctttgtacatgccttgaaagggtgagttctccgacacatgcatagatggcgcgcgcgcacgacgtgcatgtgaatgtccgctaaaattggatccttatgcttgcacagacgcatcttagtatttgtggtgtttgaaaactcatcgtattcttgggtacacatgacttaactagtttagttagatcacacgttctgatatctctataaaatactaagtcaccatcttcatgcaacacatatgaaaataatctaggatttgcctcattctctgtactgcactgtcattcatggtctactctgtcccaccaatccgtgtgcatgtgtgatcatgagagcaggtcctcggatccatcatcttcgatgtcctgcatcgcgagaggattttgggaagcgttcaacacgtgtctgcttgttgttcatccacaatggcacatcttcttttacgcttgggcactgcgcatcgttgtcaccattcatagcatgcatcatacgtgcaatacgtgttgcttccttccacaacataatcagaaccgtcgggtatgtatcaattatattttgtatgtttgtatctgtcgtatacatgcctatattgtgtggtttacatatttaatatcgtgatttatttaatccatgtctctatatttccaacaatatcatgacttgatcgaacaactctagtttatattgatctggccctttgttgggttgcatacctgctgtattttctctcccattttttgttcattcatgagttgcgtagcccactgcaaatcctcaattcctcaccaaaacatgaaatctttctgttctacctctcatgtcatcaagttcatgattcatgattcatggatatccatgggatgggttgtcttgacaggaattgacaaggaaaggattgctttatctttctatgggctttgtataattccatgtaggtgagaacgtagtttcccaaaactttgtggatcacctgtcgaaccttttgctttcttcataaagtatcaaaaggttggagcatctctctggggagatgaaactggtgcagataggctagtgattgcttatcgtttgatttttttaagttaaatttctttatgattgactagatttatagaaaaaactagcaacatctataacactaaattactctcactaaatttaacattaaatatatttgataatactttttccaaaaatttgggcaaatataaaaaaaatgatttagaaagcagccaaacgacttagaatatgtaacggagagagtatgttttagcactttgtataccatgctttactgcttttttttttgtttccgtgtatgtaaaaggtttccaaacattctgctgtaacaggaatgtttacatgtgcgaactgtcaactgtttgacgtgcgatgggagaagtgtgtgtgttgccttttcatgacatgaacagtatgcatctccgtgcaaatgaatcaagcaatttaccttcgaaaagccgcatctgcaaaactgttttgcgatcatcttttaaagaaataataattggatcaatctggaatacaaaccgaccttagctcagttggtagagcggaggactgtagtcgttgcagatcaatccttaggtcgctggttcgaatccggcaggtcggaatatgattttaatttttccttttttaaatctcctcatctttgtgcagcaccgggggaattgatgaagccaaatagccaatgtattgctcaagatcttttttttaacaaaaaatcatgacataccgtaaatgcaagtaatgctggttcgaatccggcaggtcggaatctaattttaatttttccttttttaaatctcctcatctatgtgcagcaccgggggaattgatgaagccaaatatccaatgtattgctcaagatcttttcttttttttaacaaaaaatcatgacataccgtaaatgcaagtaatgtttgtatcatgctttgccaggaatcacatggagtaaacgaagttcagcagaagtctagaactccagatccacatagaaattcttttagtctgagaatcccttttttttctttgaaacagatcaagtcaatctcattgctcatcactaaccatgaactcaaaatgcatgtacaatgaatccaggcaagcattccatcaaacccaaccaatttccatccttttttttgttcttgctggtaaagactggagtttctagccattcccagcatttcttttgctctacttcttctacatctacctctctactcttagtttcactatggagaacacaaccacaattacaaccatggtggggatggttagattcactcaatggccggcttccattcctaatgctttagctctccttgcctccaagagcttgtctttaagatggagggaagaaccggttgaggttgaagggcagggtgtagaactcctcattccggctgtcgcctctgaacgtcctgaacctcgcccaccatggcatcccccggtccctcgccgcatccctcacctccagggtgttgtcgaggatcaccgcgacgatcagaccgacggtcgggggcgaggagaagacggtgttgatgtagtcattgaactgccacacaccacacagagaaaagagaaaaaaaaaagatcatgaggtttataagtttcagaacacaacttcagaaaaaaaattcagtttcagtggacatacccatcctgccctggtgtgtgcagggccgtgcagagcgctcatggtgtagcggaagaagtactccgggatggaaatgccgaggaacagcgagacgccgatgatgaagaggctgcgcatcgagttcatgttggtgaactgcatgaaggagagccccactgcacctgagaaaagatccagcaagacatgtgttgtagagggttgaaatcttggtgataaaatgaatagatataagaaagaaagatatgtgagaagaacatcggtaattttgatacctaagacacttaccaacatatccaaacatgacgcagtatatggcggcaaacattgtgaatggaatcgaagcaaacagagccccaaatctccctgaaatcatgagacgtgttgagaaccaggaaaggtgattcaggatcataatctttttgtgcagaaaatgtgctacctagaatggagaagaagatcatgaaaccagcggagatctgtatcactcttctgctgccaatcctggttgatccaagaagaccaatgttctctctgcgttggcgaaatcgtatgcattatgttaggaatacatgatagtgctagaggatatcggagagtaaatagttttcgataaagaaggaaaacacttacacagagaccgtggagccagttccagtaccaaatagcccatcaaacagcagcccaattccctgattgttcacataaagggcaaaagcattatactcctgatcaacagcagaatacagatttttgtagagctactcagatcctaatgctactcagatgattaaattcattctaagaaaggtcttgcattcatgtggccaagattctactaatctgatcacaactaggattttaagaatggccttgcattgtgtaatctttgaatatttgcagaaatgaagaaacaaacctgccatccaatgcctctgctgaggacatatggtggtgggggtgttgcactcgccaaccgcgcagcagccttgaatgctccagctgactgaatcactcaaaaaattgtcaccaaatcagatcagtataatgacatatgctaacaagatacttatcttaaacagcttggtatagatttcacagtaatgaaatgttacctctatcaaggacaccacaacagcagccatcataccaaatgcatgatctgcgctgaatgttggcggaccccattgcagtgggtatgggatgtcaatcctgaaaaaaaaatatattttttttaaaaaaggatgaacattagaaatctactagtaccaaagatcacatgaaaattgaagaaaaatccacaaagtacaaaccagtctgcagaagtgatgagattggcacggtctgttcggcagtttatctgggtgagcagagaggtatgtttgtatgtcccacttgctgtgaggatgtgagcataaacccagacaagcgcgatcgaaatgagcactgagaacctctccaatatcggaaaatggcgcacttgtacatgcttcagatattgggaaagagcaacaaacaggacaagcattggaagcccaatctccacgcacctcccaatctaaaaacacaatgtccatatgttagcttaacaaccaagtaagcagacatagagcatacttattctagtttgtacaatttgataatcctcctaagtgtaaatatgtgtttgatgctactcaaaatatcctgatttattgtaaatgccactgtgtataattcaatcatagaaatgaaacacttcaactttcagttccaactatatgaaatgatcccaaatggtcctgttgaaagctcccaactaggaagcatatgttcgcatagtgccaataaccagttaagataaagatagagagtaagcgggtttagcaaagaaacagcactagagactttaccactgggaatcctctctcgaaaaggccaagccccaccagcgcaaccaccggaaccatcccaagtggactgaagaacctgcaacatgacaccgggaaattttaagattcttatcgtcaatccgaagggtcgcagccatgtcctattacttttggataattggcatttggcactctttgattttagtatattagcatgatgcactttgtctctaaagtgatgcccacttctcacactgagagaaaacaaagtggatgtcttaagggcccagggcaaccagggctattataaagaataaccagggcataatctactgattgatcatgtgctcctaatgtcaacacgcatgatgccaaaagttacacaaacacacaaaaaaggctttggtagaagacaacccttacttgcaatataagtaaaccaaaacactgctcagtctcatgttcacttgtccatacaagttaagaagaggaaaaatacgtctagtatggacaaagcaagaatttggatatttggactatacgatcaaattggacacgaggaagttgtatgtacctggagcatatcccccacaactggctgtagccaagaattatttggatgcaggaggatattattaaagccccctgtatggctctcatagtcatgataaacctctgcaataggataaaggacatttaatcattattatctaagaaaaggaaacttttaataaataaatgaaacttgtgatgctgaaatgaccactaatgatattgactatctagaagggggaaaaaaccatggcatgcttacagtatggtcatcagttatttgtgccagtgatgggtcttttattatcgatataaccgggatcacgaacgcatacgagcctccgatgatggtcggaagccgagttccaaacaaagtttggagcattgtgtttatcccagtcacaaacagcatggtttgcaccacctttgccttgtcatgctggaaacaaaacagacaaacatgtacctatcagcatgcactccatcacaaaagcagtgactaaaaacatcattatctggaaagagagttgctggacacatgcaagtgaagtgaccaactaattcgagggtactatactatcattcatagagccctctccctacgagcatcttatggaacaggaggtaggtaccaaaattcatttatctgatctgcagagtacaacttttgtttcatactattaaattccacaagcttaattacaacggtacataaatccaatgcatttaaccagaagattcatcttgaaagtagtagcatttattattacaggatacacactacaatgatttcaataactagatatgagtatatagctgaatggataaaatggcatggtaaaacagtgaaaagattcttacagcatttccacccatgagtggaaccagtaaggtggggatcatcacagccgtccccaggcaaaggatgtaatgctggaaccccagggcaattgcctcccctgtaccatgaaaattaaatcacacaaaattaaataccagacaaggaacagacagatgaaccctacaatcctagtcacttcagtgaaatcattatctgtacataaaaaaaaaggagcttgagtgaaatgacaaacttaccccaggatgggttggagtctatgcagtactccagcccctgcagctgatccattggtggatggctgatctcctcttgcttcatgtcagccatctctacagaagcaggaacttctcccccttgttcttctgcttgttcagggtgatctaacaattgccacaatgagcaatcaataagagaaatcaggcttaataaatgtgattgagtgggtagttaaataagataggataggaaaggaaagcagtaaagaaggaagctttaagcaactttattggcctataggctatgagaatcagatgccacaggaagaattccccagagaaacaaagcaaaccccttttaagccctgaacaaaaaagaaaaaaaatgtgcctttcaggcctgcaacaatctggcagctggcttgcaaagattgacgcccttaatctcccaaaacatggagcaaacatcgcaaagacaagattttgtttttcatcactgatcaagaaccattccaggacacacccactctacttgcaaaaccctcaaacaaacatcaagaaagccaagaaaaccaacaaaagaaaaagatcaccatgagcaaatgctctcacctgtcaagaatgctcaccctcacaaaaatttcccaaccaacgctagcaaaacacagcgcaaaagaaactaagcacgagtaggaagagcaacccagcaaggcgccgatttatagccccagaatcgaaacggctagctgcaggaatgaatgaatgaatgcctaaaatgaacaagatcagtttcttgcgaatattcagattttcttttccagctgagcaagcggagggaagcaagcaagcaagcagtaacagcagcagcaagagcagtgtctgtagcgcgaggaagaaagagagaatgagagagagagaaagagaagtgctccgggaaacgtcaaaaaggctgtggtggccaaaagaagccacagggatcgatcacacacacaacacaggcagcagcagcctatcagaagttgcaagtaaagatgagagagaaagagtagtagtagaaatggatgaactgaagctgctgtacatgactactcgagtgagtacacgccattactacccccctagcaataagctttctctctcctacacgccattacagcccctttctctctctagacttattttttttttctaggtgagaaataaatccggcagatactttccttgtcataggagtagagagagaccgatagtccattgtttagtttatatttatgcttaggcctgtttagttccaatttttttttctaaaaacgtcacctcgaatctttggacaagcattaaatatagataaaaacaaaaactaattgcacagtttgcatgaaaatagcgagattaatcttttgagactaattagtctatgattagctataagtgctatagtaactcatatgtgctaatgacggcttaattaggctcaaaagattcgtctcgcggtttccaggtgagttatgaaattagtttttttcattcgtatacgaaaaccccttccaacatctggtcaaacatctgatgtgacattcaaaaattttcttttcacgaactaaacataccctcgtactgctagttggtaataaaaaataattcatgggtatttttttacaatgtcctaagcggttcaaaagaaaatactgtgaaataaattatgactgaaccatatataaaatcaacttcacaattaagtttaaaatttttttttttcttacaagcataaaagtaaatgaaaagatgggttctgagatgagaaaggatgcaaaatgtacccctgaaaggtggggtccacgttggtttaaccaatgcactgttggcattcacattttcacagagcaaagaagctgaatttttctctctctgggagagtttttgtctggcacagtgccaccgcaggcagtggagttatcctcctgcgagcatctgaattggcccgttgggatttccctctgaccaaattgccctccccctgcctgacaggtggggacccattgatcgggtgctttgagattcgtgcggtggaattctgcttctggctggctagtggctggaacaggtgtagatgtttggttggttatgcttaaattagtgttttaattaagcaccttgaatgtgctagtactggtttgagtgattccttctttggaagtgctttggtcatattcaattgatttcatgaatgggtgcagggtatgtaccaggaaaaggacaaaaaaaaggttggtgaaacggctgagataatgttgctgaaatgtttttagttttatatagaataataataaatattttttactgattagtcttaagaaaatttacagctgtctgatttttttttcatgaaatagactcttgtgaaatctaagccatccgatctagatccaattgagtaaggttttgtaaaaagaaacttggtagtgaaacatgacactatttatgtaaaatacaattacgctttagaaagaagaaacaaatggaaacaacaactcactatggctcttggcacagacaccgtcctaggcataggggagatcaaaataagaagtcgtacctagatgacgacgcccgtcctgggctacgggaagtagatagataggtcgttcaactcttgtccccgaagataggtaatatgttctcatataatgttgctccaactttttttctcgagggcctaactggtgagattttatttaattgtcatgaactctagtggattcactgtgtaaaccaatgaaatatgtctataaagtgaaactttcatgtagtaatactatttctttattgcaaaagttaaacagatcatatagatgatgatttcaatactactctactagatctccatgtactttttgagaaagaaatgaacatcttgtacgccctcatatccaaatctaccatgataaaagttatgtgtgcagcacaaaacaaaaaaaaaacaatacaactattcaaaagtttggatctttagatctaaactttttgagtcctcatgaataacctaagagatcaaactcaagttttttaatatcatgaacttccatttaaaactaatgaagattgaaaatatgggttgattacacataggtctttgacttattcttcagactggaaatactacgtatctcaaactcagatctagatctgtcaacatgaactgtgcaaaaagaacaactgcaagcttaaaaaacaatcaaatatcatcacaagtatcaaatagtttacccgttgacggttcatggttacgcgcaaaaatgatagcatctttaccataactctcaataggcatgagatggcagctacctgcagtaatagcggtgagagtagggcttgagcaccattccttccaatatagctaatcttcctcatcatgttgtagatctgggatatccgaccacaatttttggccgaacgacacgacgtgctccatgagacctgccattaggaattctaagagagactagtagcaacgaaggagttggtgatgatgaatagctagagtatggtggagatgtgtgctttcctttctgctgaggtacctttaaatagaggggaaaagttgccctgcatactgctggcaacgtaacgcttgaaatgtctgtagtgcgacacaccattttcttttaaaaataatatcgcttgaacttatatcttaaaattattgaataatgctggagataaaatgcctaaagtgtttatggtgcgtacacagtttcctcttcatttttctttgaaaaatttacaattgagccatatgtcctgaattttaccttgtttctttattattattacttcccttttactatgccttccaatatatctcatcttcctcatcatattgtggatctgggatatctaaccacaattcttggctgaacaacacgacgtgcccaatgagacctaccattaggaacactaaaagagactattagcagtggagggtttggtgtctatgaatactgtggagatgtgcgctttcctttccgctaaagtacttctatatattgggggaaagttgcccagtttactgccggcgatgtaacgcttgacgaagaataacgtgcagatgtgcactttcctttccgttgaagtacctctatatattgggggaagtaacctagtatattgtcggcgatgtaacgcttgagcctatatcttaaaattattgaataatactagtgatgcaatgcctaaagtgttcgtggtgtggtacaccgtttcctctttattttttttaaataatttgcaattgagccatatgtcatgacctttgccttgtttctttagtattattacttcccttttactacctgcagcaacagcggtgggagtagggcttgtgcaccataccttccaatatagctcatcttcctcatcatgttgcggacgacgtgctcaatgagatctgccattaggaacactaagagagactattagtagtggagggtttggtgacgatgaataccgtggagacgtgcactttcctttccactgaggtcgtacctctatagattgggggaaagttgcctcgtatactgccggcgatgtaatgcttgaagtgtctgtggcgcaacatgtcatttgcttttaaaaacaatatcactcaagccctatatcttaaaattattgaataatgttggcgatgtaatgcctaaagtgtatgtagtggcacataatttcctcttagttctttttgaaatagtttgcagtcgagctctctatcttgaaattttcaaatgcacccttctttgttctttagtattatgcttccaccctttttttttttactattctgaagtagtagtgagcgcagggttagtcgattatatttgcattgaggcaaaaaagggacaaagattgtgatccacattatatgaaatggtatagtacatgtgcaattaggggcattaatttagtgtgtgttgtataattttgttctacacccatcaaacaaaaggaggaaaaatttgcttccagtttcattatattagaaagtaatgtttaacatgttagtataacaaaaataccttacggagacatctttttattactatagaggcattttcaaaaatatctcattggggccttacggtgaattgcctatacaaatgatgacacattttataaaatgcctttgtatcttgcaatatttttatagtcacattttttatgtctataagagagtagagacatttttctagagggtttggattttgtgacaaacataccaaataattgtgaaaaaaactgtggtagagacattttctagaggcattggattgtgtgacaaacaaaccaaacaattgtgaaaaatatgtggtagagacattttctagagacattaaagtgtgcatcaaacataccaaacaattatgaaaaatatgtggtagagacattttctagaggcattgaactgtatgaaaaacataccaaacaattgcgaaaaatatgtgacagagacattttctagagacattggattgtgctacaaacatttactattgtaaaaaatatatgatacctatatttttcataaacaattgtgaaaactatctgccgctgatgcaatgagcttgccgccccttcgccgttcactcctcacgtgtcgcagctaggagtggtaatgtgccacggcccatgggccctttcacaatccatcttagccttcaaatatttttagctcaaaaatctattaagtctcagcccaactctatttgggtccagccctcacattttataggctaatatgttgggcccattatcacccctagtcacagcaatggctcgctccttggagaggtaggccatccacggcatgtagctacaccatccatcggagccgcgccctcggtttgcgactctggctttagctctttcaggtagctagctgtatgctctcattgcggctcatcctatccccacccccaccattgccaccccacaccaatccccttccgcttctccggggagtgatgactatccatttcctctcctcaaggccaatactgctagtctagatgccattagcaccattaattaattggctctgtaaatctcttttaaatcttcccatcatcgtactaatcctcactcatcatcattccattggtgcctggattatttcaggttttcctctaatgttgcttttctatcctttgcattagccaaactacacttgtatagagtaccacaggtcagtaactgttcttaccatcttgaaagattttaagtttctcattgggttatttctgctgattttccttatacacctttggtttcattgatccatataggaacaaattggttaaaaaaggcagctgctatcttgcggtcccttatttgctagtttgtgcaatttacggctactctctacttggtatccatgtatacaacaaggtctattatatagtaattttggacaagatcagaagacaaagatgtttcgaatatagtaatcctgaaattaagaaggcactaaaatggtatgtatcatgttctaagccaagtatattggattatatatgtttaccataatatcccatatattcattcatgtccatgtacatattaatatatatcagtggagaaaatggtatatccaatggatgttggggaaagttcttcatgttttgcactgggatgaggccgaaggcgttggccatttcatcttcttgtccctcatccagaccatgcttctggggctgaagcgtgccatatggactgattttggatgcccagtttttaagttcattaatactaatttacccttttttttggtacaatatggaaattaactatgcaaatgtaactgcttaccagatcatactcctactcaacttggtcctatactttctctccagaaataaccacatctgctcaaaatccatcattgggcagagattcttccaattcatttcgtagtatgatttcataaacataataaaaagaatcacatattaatataccaagatctccacaacaaagtataccattaccactcagctatataaatatcacaaacacctttttgtttctccttccaacactacattctcttttgcaatcctgatctcaatgcagagcacctcacctccacatgcatggaacatggcaaacgaagcaaaatgttttttcattcttatgatcaattatcaagtgctaatacctacttgcaatattcatgacatacacacttcttctcttttcaggttaccacaaaaatatctgaagattatgctcttcaccctcctgtccataccactcgagataagtacaaattcggcatgcgtgtaattgaagaaatgaggtcatctgcaaacaagaaaacttctatcgctattacaggcaattccacaaaataagtcctcaaaattctggagaagtctcatactccagttatcacattggtgcattccttagcgtaaggaaatattaataattatttttttttgttaatgtagatatattttttgcaaatattttaaatacttttagttcatattggctacacattatgtttaaattgtataattatctttaaattttatttcataatgatatgatctactaaagttctataaatatcttataacataaactagttcccaaagttatgttttggttactgtgtaaatttgaaaatttcttgtttctatgagcagtggatgtactattttcccatatatttttattatttcctagtacattaatagtgtgaaacatctagttggcctcaataggagtggaaaaaaagttagcaatgcataaatatggttgtggcagaagagagaaatgccatttcagtcccagagaaaaaaaaagtcatttcagtgatagctactagggcggaatttggttatgacgtaaaatggaacttttgtatcaaggaagggtgaacagagcatagacatgaatgttgctggtgaggttgattagtttagatgtatgtttttaattaccttctttggtaacaactacaaataaagtaaagtaaaggtagaacaccaaaatatctgttgtgcgtcacgtacttgagtccatttttaaaatagttttcacaaagctaaggtaattcgcatatcgtatatttaatagtgaaaaaaacaattgaatgcttgtattacactgcttctcttgtaagttgtaacatgtagacaggggcgggcccaaagggtagtccaggtaggtccaggactaccctagaattcggcccagtgaagaccaggtattcatttttcctggcccaacaaaaaaaaacctaactctattttctgttctctcccgtgcgctctccccacccggcctcccacccccgagtcccgatcgactgacagcgacggcgctcccgcgagccgtgaggctagcgcgactcaggcgctcttgccgtcccgcgaggccgctactcgcgctgccgctcctcccgccgcttccgtcagtcagtctggtagcctcccggctggccggctcccgccaggcgcgcgtgcccatccggcagccgtggcggcagcgccgctaccttcgcgcgccgtgctggcaccagcacggcctcgccctctccgcgactccacccctggccggctggccgcgccctctccgtcccacgtccggccgtcgcccggcggcctcccggattcccggctcccgcggtcccagcgttctgatttgatggatcattgggaagcccttacacgggcatatggtcagtcggctgcaggtaactcgagcactataaggggaaaactcacacgcgaccaagcatacggcggtgacggtgggagcgttggcggccgcggtggcattgaaggacattgaaggacttgcaagcttttatcctaaggacattgaaggctctgatttgatgaaacttgagctccaacttgatacatatattgatgatatgagagaggatgatagattcaaaggccaaaacaacattggtgagctctctattaagcttgttgaaacaaagaagcaaaagctcttgagtcttgactagtattgtaatatcctatttatctaaagaccttatgttatgtttgaacaatttacattttcatttaggtaagatttaaacttatttgttattttctactacttgtattgaaccatttagagttatataccgtatcgtttaccactttttatatcgaatcatattgtattgcattcggattttttttggctaggcctgggttcaaatcttgggtctgccactgcctgtagatttgggatgtaaatgcttgaattaaaggcaaaattattggagaataaaacaaaataacagtagaagggtttggaaggatgcaaaaatgtagtagcttttggataatcggatgcttacataatgtaagttgcatttgttgggatacgcgtaggctacgatagcataaatcaaaatttttctaccgcgtaaaccaggaaccatacaagtattagatcatagatcattaccactcgacgcgctgtgtagcggaagtaagcgctaagtagccgaaggaatgtcgggaacgtagcgcgcgtcggtgtagagaaagtagtcgatcgcagcagctcgatgttatcctcctcgtgcgttctcttcgccgtgctctcacaccgatcagcaccgcaaaccagcggcacctctaccggtatccacacatacagggacggaacgccacacgcagacgtgctagtgtctgcgcacggctagggttttgctcggggaggggagtggcagctagggtttctcacgtgatgtgatctatccgctggtcacgtccctcacgaatatgtaagatccatgactcgggcttccaaggcccataggacttctattcggatccctatccgaattaagctcatattggatctctatccaatcctcttattccggcttattaagcgtgcaaccctgtaggttcacgtaaactcagctgtaacccgaaaactccttttcggtccacatgtcaacagcagcccctagcagaatgtattgacccaccggacatacataaagatcatatcggttgaacctctagtgtatacttgtatgaacccctttgcctcacgatatcgattaaactcaaggctagatatgtgccatcctctgatagctcaatcattcactcgaacttgtgattgactcctaaatcaccattggcatggccatgcacttccataatctataacatcgagggggccatatatatcgctccataggaggggcaaatcccatcttgattatttatatcccaccacatgtttcatagcatgcccgaaaactatttttataactatccaattacggagtagcgtttagcagtcctaagtaagctactacacatgttgggaaccatgataatctcaggtctaaggatttaataccaacattaaatgaaatcaccgatgacacaacacatatggctcttgcagtgtctcatgttgggtctatctaacaacatgttcccaacatgtgtccacattattaatttggtatctctataccatgatccatgagacataatcatcaattaatacatatgctgatcatttaaacatatttattccacatatgatattttatcaggtatcctttagaaatagcaacatacaacataaagagttttatgaaagaatcacatattcattaaccaataatgagttatctatttcaaggaacaacgtcggataaatatataaacagagtatgtgatacaatcatctctatgattgcctctagggcatatcaccaacaacattcctttctttgtaatttataaattgatgtaagtacttgaaataaagacgaagttgttggagaaatagaataaattgacagtaggagaatttggaaggatgtgaaaatggagataagattggagtaatttgcttatcgtgttacatgaaaggcttcatggtcctaattttattgaaagcatgaaattgtattaatacatgtatactaccttggaataacaatattataggcatataacgcgccatttagcaaatcaccaaaactggataaccatgacagtgaaaaaggcataaatttttgcaccggactccaaaagacaaaaaattcgataataaaaagccacaaaacaaactagacttcaggtcacaataacttggaattcaacgtcaccaccatcatacgctgcatgaagagatagagtgttgtaggcttcttgatgtctggcatcgttaagaaaggggatcttgatttgtacgcaacaaataaagtgtgtgtattgcaacacatggctcactttttttttgagaaatcctttgtataaataatacacaaatgttggaaggtggtttttttcccaatttaacttgctagtttgtcaaaaatattgatatgtgggattgttttacctgtttaacctgcaagctttagcaatgcccatatggccatatctcttgtgatatatgtggatagtcctggaatttagttgaatttcttggcccattattttgtccttgctaaattaatgtctcgatccacattgagacccacttacagaaaattgatccatcaacaacatttttttctatagtggcaggaaatctccaactcttcgatatgcgctaactagttaatctatttacttaatttgatatgggttctcttgctacccaaaaaaaagtattgatctagcttacctggaaagaatggatcgctacccttggagagctaatgataatggactaatagcgcattgattgaaccgaccctgacgtaccactagggaacttataatctgacccaatatgatgtataaaaaatggcttaaatgggcttatctcagctaccaaactaacagatcagcccaacaatcaccctaggcctgaacctgacctaagctagcaatttttcctgaggaataagttcactttgtgtccctctatttgtcgtccagtccgattttcgtcccttggccgtaaaaccgggtatgacgggtcccccaacttacgaaaccatttaaatgaggtcccttggcagtattgtgttcgatttttgctgagatggcgcttacgtggctccttttgactaggtctttgtctaacgtgtcattgacatggcgcttacgtggcaattagataaaaaaataataatatccgtagaaccacatgtcagtcgcacacacaaataataaaaaatggtgggcccatgtggacccacacgtcattctcactaccctcttctctctatccccctctctccctcttctatcgctctccagccggcggagcgggatgggcgggggccggagcggacggcgacggggcagagtggctccgctcgcatctcatctcctctgctagggagggtcttgtagcgcaggtggcgtacatctggcaggggagggtcttgtagcgcggttggtggatgacccttgtacccggttttgagaccaaaggaccaatatcggactagacgacaaatagagggacccaaagtgaacttattccttttccttgaaggcccaaccttcggtacaatggcctacaacaaagcattccactggtttcaaatatttattttacccattacaatttttgtttcctaaccaagatcactgaactaacggctctatcaattatgtcggccacgctggttgaatatatagcacgctgtcatgctgagattatctacgtgtacatggatggattattgatacaatgtataatacatgcgatatacaatactgcagcatcttcgtagaaatttggtcaaacttttctttaaaaaaaagaaatttggtcaaatttaaaaaattttgactagaaaaaaaatcaaaacgacttataatatgaaacggatggagtagtttataggtgattgtaattctctcttaattaaatgaacgaaagcttcctctaaaaaagactacatgggatgaaaaattaacaattaatttgtagatttatgggcctagtcattttggaggaaaagcaaaggatttggattgctaaggattaattcctatgagtgtcattcattcataggaatgtaggtataggaaaaccaaatgaaattttctattcatagaagtcgcagagagaaaatgtaagaatttttccatccactcaaacttcttggaaaattcatatatatgaattaaagtatctacacatttcaattcctctacattttctattcttatgtgttaaaattcttccaaaaccaataggcccgtacatacatagttgtactctcttagttcctagattttatttttcaaaattaaaatctcaacaatctggataaaaattcctaaacgttatgagtaattgcaagtatactaccaactattcctttttgaggtaaaaaaaataaaaacacatatttatatattacacttaagtatggatgtatggaaacaacacttgtttatcgttattaaattgttgtaataccaagggaccgaagtttgcaatccaaattgttagctagcacaccaagcaccaaaccctgcaacgacgacacatatcctcatgtcacgaggagccaacggatatcacctcagagtgtcatcaagcagggatcgttaaaaccaaaagctcatgaaagtcagtgagatgatagggagtgtttggttcgatatattgctaggtgccaagttgtagcaaattgcacgaacggcaaagtgactctagtgttgaggaatgatgacttgccgttgttctttcatggatgctattttccatggtttcttgggatgtgaaaagcactggaaaccttggcctctactcctgttgcttcccatttctaaagttagtttcctcttttcctgataatccagacagttgggaattctgaaggtcatatatatggatttcaagctgcaaaaattcactagggttatttgctaatttgccctatagaaattattggacctctttggagttgggaattattgatgtttgtgtggggataaacttttgggtatgtattgctcatttgttgttaggatagtggaaaagaacttcaggtcgctacacccttatgtagagattctttttatgtgcgtacttaagtagttgtagatgttgaatacatagtacgttgcattaaatgtatacccctcattcgaaatagttttgaaacaattgagtgagccagagtgagacttggaggtgattgtaaatagctttagatgtagttgtagatgtgtaatatacggtactttgcattaaatgaatacctccattcgtaaatatcttttgatcaacttgaaagaaacacaaaaaataattcataaagatcagaattcaaccgtgttttttttatctctttgccttgtaggtgttgtaattctctgttaaatgaatgaaatctcttggcttcttctaagaaaagtacatatgatga

SEQ ID NO: 12201 - DNA, 1150 bp, Oryza sativa
attcctgcagccccagagaaaccatgtgtgcacttgtcatgatgaagaagagccagagaaacatatatggtggaagaggaaaaggattttatttgaccaaactaggagaagttctgacatctttctcaactaactactttggtatccagcagaagatttgaccaaacatgtttccatggtgagagtattcaaatcaagaatcaaataggtcaaatttaaactaaccacgaatgcggagcgtataagttcttcctcataatccacagtggcacctttcacaaagtcatatgagacatcgtccacaaccaatttaacaccttctttctcaaagatcctacatgtgtaacaacaattgttgagataagtaaaactattgatgaagtatgtgacacactcactacataaatcatctataaggtatacactctgttcataagtttccacaataatgcttagaagaaatacagaatttacacttgtctaaaatggacaaaccagtcaggaaaattggcataccgatcatctgagtttttcttgtcatcaagagagaaagaatattggaatccagaacatccaccagcttcaacacttaatcgcagcatcttaccttcagaaggtggttctttagcatgtaattcttttaatctctgtgaagcattaagtttccaaagaacacaaaaatgcgaagctgttaggaaaactaaaattataagaaagtatgtaaaaggaggggggatacattctgaacaccaaaagcatatttgaagtcaacttggcacaaattgaattctcaaatgttcctactgcgttgaacaaaatgtgatagaagtagcatattcaaatgtaacagttgaaaatgaatcaaagacaaaaacaaaaaaaaagcaggaaatatttgttgtttccaaaaaaaaatatatcacctctgatgaaatttcaggaaatccctttagcaatgtccatatttcaaaattttcataatattttaaaggttttgcaaacatatggggtataagtgtaagcatatgaaaccacttttactgtctagtattaacaacagaaaatgcattcatctagagaccctgaacacatgtaacaagaattgaaatcctgtcacagaaaccctgatatagcccaaaaagaatactcc

SEQ ID NO: 12202 - DNA, 10360 bp, Oryza sativa
cacatcagcaagtctgaacaattcctgccacaatgcactagtgaagattctatcacgatcactcactatcaccttaggcattccaaagatgtcataaacattagtgataaacgctttggccaccgtcagagcagtgaatgggtgagaaagaggtataaatttggcaaatttagagaaattttcaattaccactaggattgtgtcaaacttgcctgacttaggaagcccctcaataaaatccatgcacactgtgtgccaagcttggaggggaaccggtagaggttgtaacaaccccggagttcttccatgttctacttttgctctctgacaggtctcgcattgctgcacaaactggtggacatccttccgtaggcttgaccaagtgaacagacttataatttgttggtatgttgcagcctggcctgaatgccccccaataccactatcatgcaaagccaacatcaccgcctatttagctgcagcatgctgtcctaaccaaattttgccattcagtcgaattatcccattcaccaatttatatccaccttgtccttctggatgtaagctaagtgcggctagaagcttcttggtatcagcatcctgttggtactcttcctggattatctccaaccaccttggaacactgatagagactgccaacaactcatctgagttacttctcctggacaaggcatctgcagccccattgtctgaaccctttttgtacttaattttatactgaaaccccatcaacttgacaaaggccttatgctgcatggtccttgtcagcctttgcttacgtaaatgacttaaactcttatggtcagtcagaattaaaaactctgcatgctggaggtatgccctccatttttccacagctaatagtattgccatacactccttttcatatgttgacatcatctgagaccttttactgagtgccttgctgataaatgcaattggatgcccagcctgcgttagtacaaccccaatccctatgtcactggcatctgtttgaaccacaaattgttgagaaaaatctggcagagctaacactggagcctccaacaatttcgatttcactaactcgaaggcttgttgctcttttgttccccacttttaactcacatccttcttaagtaaggtggtcaaatctctggtaatcaccccatatccttggataaatttcctatagtatccagttaatcccagaaatcctcttaactgtttgacagttttaggaataggccagtcttggactgcttttatttttgatggatcagttgccactctagaagctccaatcacatgcccaagatattccagatgttgtttggcaaaagaacacttactctttttgacaaacagttgatgccttgctagaatctctaacacaatcctcagctgactaacatgttcttgtagggttcgactataaatcaagatgtcatccataaacaccaacaccccttttctgatcaaatgggcaaaaattgtgttcatcaatccttggaaggtggctggtgcatttgtcaatccgaaaggcatcagtctgaactcatagtgccctgatggtgtatggatgacatctagtgggcccaatattaccctcctctcttctgtcaaaaaaaaaatattaccctctcccctcacgtgcgtgtgtatgcgtcctcctccctttttttcctccatggtagttaaagatctaaatcatttatttgataccgtgagggagcattctttattcttaaaatgataccgttgttatatattcgactgttctgctctacaataaacaatgcaaacatagataactggttcaattgttatttcttcacaagataaatttaggcttggaagacattgggaaaacaggctacacatgctgattcccaccagcttatacacacgatcaagcacagcttatgtcgaggatatggcatagttacccttattaccacatgatagaccgccatagcgcagatgtgtgcatgcgctgtaatttcatgccatagctattgatatccatgcctttgtgggggagatgtctgttggtgatatgccctagaggcaattatagaaatgattgtatcacatactatgtttacatattttatatccaacattgttccttgaaatagataactcattattggttaatgaatacgttgctatttctaaaggatccctaatcaactatcataagtgatacaaatatgttcaaatgatcaacacatgtattaattgatggtcatgtctcatgaatcatggtatagagatatcaaattaataatgtggacacatgttgggaaacatgttgttggatagacccaacataagacactgcaagagccatatgtgctgtgtcatcagtgatctcatttagtgttggtattgaatccttagacctaagattattatggttcccaacgtatgtagtagcttacttagggactgctaaacgctactccgtaattgggtagttgtaaaagtagttttctggtatgctatgaaacatgtagtgggatatgaataatcaagatgggattctcccctatggagagatatatctgggcccctcgatattatagattatggaagtgcatggccatgccaaaggtgattgaggaatcaatcagaagttacataatctatcacaagttcgagtgaatgatttagctattaaatgatggcacatatctagccttgagtttaatcgatatcgtgaggcaaatggggttcatacaagtatgcactagaggttcaaccgatatgatctttgtgtatgctcggtgggtcaatacattttgctaggggccactgttgacacgttgaccgaaaaggagtgtacatgaacctacagggtcgcacgcttaatgggccggaataagggaattggatggagatacaatatgagcataattcgaatagggatctgaataggagtcctatgggccttggaggttcgagtcatggatcctatatatttatgaggggggtgaccggcggtgtgattgcgtcacgtgagaaaccctagccgccactaccctcctcgagcaaaaccctagccgcgcgcggacgctagcacgtctgcgcgtggcattccatccctattcgtgtggataccggtagaggtgtcgttggtttgcggtgctgatcggtgtgagaccatggcgaagagaacgcacgaggaggagaatgtcgagctgctacgatcgactacttcctctacaccaacacgcgctatgtcctcgatgttcccccggctacttagcatttacttccactgcatagcacatcgagtggtaacgatctatgatctaatacttgcatggtttctggtttacgcggtagaaaaattttgatttatgctatcatagcctacaatgtcaacggtcctggcagacaagttaagaaaattcttgccgatatgctgagaagagcttcgactgctgcagcttccaggtagatccactataaaagctgggtctgcctggtttctagcttctcttatactagattataccccgcacgttgctgctggattttttagatgtatcttgttcacttgaatttgttttgattaaaagaaaatcatgcatacttctgattaaggcagatgcatatggttttataagtccaggggcagcctgctgattataggcctgttagaaccgtagaaccaagcaaagcagcatgcatcccaacaaacataagcatcaagatgaccttgacgtccaaattaattagtgttggtgaccgatgatgaggtacatgagtgttgatcccaattgtacaaccaagcaatgttcggcgaagagtaattgttccacaatatgtgtggtacagaaaccttgtaaaataaagcaatatgtatatcacagtaaaaactgaatgtaaaatgttcttagaatgcattttgtggaatcaaaattctccagtttgatgggaaattaatagttgaaaagactaatttggtgtacaacaatttaagaaggatcattagagcgagtgagaatatttgggaggaggatggggcagaaagacggcgtctattcatgtaattgattggttcaaaacataactggaaatttgataccgaattcaatcaagattgagtatatgagatgatgaagtcctgtcgccgccggtcgaaccgcccacctgccgctggtcagatcgccgaagcctcgccggtcagaccgctcgaacacctgcggtcaggccgccgctatcccaccggtcaaaccacgcgcacacctgcggttaaaccatcgggacctagaaacattggtagatgcaaactcaaagatgcagattgaaacttttcgactttattgcatcaactagtgtttacaaagtgcaccaagagcactcctcaccataatctcgaactaaactcgaaaccctaactttctctcaactctagtctctctaaaatcgataccgggaggcctcaccctcgcctctatttatacatgaggtaggttgtgcaaagcccatgaatctaacacaacttaggactcctaacccacatagaaaaccctctcttgcacatatccaactaatatctttccttatctcaatcaaactttccgaattcggactcccttccaaattcgactcctctttccatacgtacaccatccctcttgtataccatatggatttcttcatcaccacatgcattgtcctctagcctttagtatcccgcttgatctcttgatccctggacatcaacttctcccaagttgactctgatctatcaccagcaacactctcccgagtcctcaagcaactcctgcacatgcaacaaccaagaaaccatattccgagctcaagtttgtcccaacttgactcacattagtataacaacattatccatactcatagaaaccgtctagaagccaaatccctgaaggaaatatccaaatccaacaaaacaacccgaaaccaacatcgatcaggatcctgccgatcaaaccgttgggccgtccggtctgaccgctgcaacacctgcggtctgaccggcggcactcagccggactgaccgccagggtcaaccgaaactgcacactccacaaaatcaaccatcttataaaatctccaaattaacattagcaaaccaccaatattttcatcacaaaatctaaatcaactccttgattctacccaactcgcatccagcacagccgccactgtctgccgccgacgtcgagcctcccccgccgcctagtgtccccatcagagcctccgccaccgccatcgccgacaagtttattcaccccatttacagcagctgccgccatcccattatgtctccttcccaatcgcagttggtgcggaccattcaaaaatggcatcacaatgcctgctaaccccaaagtgccccaactcaaaaatgacctggtttgacgggaatatttttttgctcaagcggtcaagccgttgctgggacaactaaattcagcaacaaagtgcaaacaagagtgatgtgaaacaaactacaaacctggatgatttatgtttctgtcttattgtttcattcatggcacaagtagattcacgtaacatttgaaaagcagcaggtattaacctctagcatatgagtctggccaatgcattctacaccaagcataacagcgcagaactgcaacgaaaatggcacaataccaatagctcgctgctgcacatacatcataaccaacagcagaattccggagacatcaagcatcagaaattttcgtcaccaattgcacaagtcagccccagcaatgccaggatttctagcaaagcgcctacacagtggcggacacagaattaaaaccaagatgaggcgaatatgttcgctcttcataaagaccactaaacgcaataaataccatatttatactgtaatcacatcaaaatatacttaagaaaaatatacttaaggcaaacaaatcattttataacaaagcaataatatttgccccatacataattcattatacaccaaaagattcacaaagcatggttgatacataattttgtttagtactttttaattttagtaatttattatacattaaaatcactttacttttaacaatgttcatgatagggtttttttttatataggcctccatcatttatgttgagcgatattttttttaacttcatactcccatccctaaaatcatgcgtcggccactgctgactgatgccattccgaggcctgataagcttcatcaagtggacgtacgtagagcggaaatgctgttgggcgatccatcgccctggggatggggtagcgatcagattcactccccacctcccccctccctccctccacctagtttctttttttttaccgcattactttcctattttagtaaatttatacacctaaagtttatacacctaaagtttacacatctaaagtttagagaccaaaagtttataagttaaaagtttatatatccgattcaaatttgaatttgaattcaaatatttttttatatatagtatttttatacatctaaagtttatatacctaaaatttatagacctaaagtttataagtcaaaagtttatatacccgtttcaaatttgaatttgaattatatctgattcaaatttaaatttgaattcaaatattttctatatatagtatttctatacatctaaagttcatgcacctaaagtttatagattcaaagtttataagtcaaaagtttacatacccgattcaaatttgaatttgaattatatccgattcaaatttgaatttgaattcaaatattttttatatatagtatttctatgcatctaaagtttatacacctaaagtttatagacccaaagtttgtaagtcaaaagtttacatacccgatttaaatttgaatttgaattcaaattttttatatatagtatttctatacataaatttttctaacttttgtttttaaagaaaattgtgtggtgtactgtagtagaaagagaagaagggaggaggaagggggagaagagggaggagtatagggggggactgatcgctggatcgatcgcccattagaagggccccagtagagtcgcggatctggcagctggtctttgtgccttttatatggaagcaaccaagtaaagattctaaaagatgaggctacttgtacttaaaaacgtgaatattagggaaataactaacctctattattataaaaattgaagatatttttgcccggtgctttggtacatcatccgtgtttgaatcaattttaatctctatatatctctatctaaacttaaaaataagaaatttccaaagtaggaaaaaaagaaaaaaaaagattctgtcgttggtaaaaaaagagaaaaaatagtcctactccaaagaaaaaaaaagtctcgccactaaaaaaaaccaaaaatgtccgtttggtttttttttcaccggcgactttttttcacgtgaaagagttttttttttctgcgcacgcgctattgttttttcttctccggttttttaaatcaccgcacgcctcacgagcgcttttggtttttttgtcaattttttttgtcaccggttttttatcatgcgtgcttttggtttttctcatctggttttttaatcccatctattcgtggcatgtctaccgagttgaactctggcgccacgccggcaccatatcaatcgtgcgttttctctccaatttgagtgcaaaaaaaaaatcgattcccactccctcatcattttctccatgattttgctggctttatttcgtcggatttaatttaccggttgccgatgatgatgacgatcttccccgattgtttttatcccgaattttacactttgattttgggtaaaaaggaaagaggcgagtggataaaaacccttaaccaattttgggtgatcgacaaagattcggccggatttgatgggtcgaagaaaacaggccaaacagagagaggtagtggactggcctagggctgaaaacggcttcactcgtggctgggtcgaagcgagcatgccaaatggagggaggtagcggattggcctagggctgaaaagtaaggaaagctttcgacccaaaacccaataaatattttcattaaatttttttaattataatatatagcgatcccaatattaagattttcattaacaaaagttaattataatgtatagcgatcccaatattttaatttattgttcagctcttaatatatcattgaaaaaacgtttttacccgttgcaagttgcaacgcacgggtattttttctagtatttataaaaaaaaagaagaagggtggggtttcaaacccaggccagctagccctccaacttgtggagcaagtcggaaaaccctgggcgtttctcaagcttcctgtactccatcaagtcgctcttctgtggttacatccaattttccagtagtttgtatgctctccagttaactgacgaggcaaaatgttagtgcagagcagtctggtgtatgagacacattagatctcctgcttgcatgcttgcgtatgagagcaaaatgaccagtgctccttttgagttttgatctgcttcgctgagttttacttgtgaaaagccatgcaacagagtatatgttggttgattgactcatgggattgaagatatatatctcgtagtttaaggatcttcatttttctgtctttcagtatattggaggaaagaccacggtaaataaaatatattacaggaaaaagtgcagtggaaactgaaattcgaagttcatagagatgaaaaaaagatgatctacgatgcacaatatcaaatgaatgacaaaatttaattcggtccaagcatgcaccacttggttgatcttctatacaaaacctaatgggggagtttcaacctgctggaaaatcctaaaattcccctcctcgcatatctgagcaatctgtttgtacacactccaagtgaccgatatctccaccaatcaaatacaaaagtccatagtaattgggtgtatctacgaccggccagatgtaggcgttgttcacagtcactcagcagtgtgtgattcatcgccaatgtagttgtatatgttcaagatgtttaaatgcacttaacacgcaatcgtcactttctaccaccctcagggaaaggtcaatagtactagtagaactcactgtttgctccaaaattaatttctccatgtcaccaaaagctaactcatagccaactcatacggcatgcgctacaagttgtcattggttaaaacattgaaatattatggcagatggccaaggccaacttgtataccaacctaatgtaagatggcatctagctcttcaattaaccttgcactgacaacgattgtcccatgtccacatataaccttgcatattttgtatccatgtcactaggaaacgggtgaagatttgggttgggatgtatggaggaaggacatgagacgatttatgaattagaaaatctagacaacgatatcccattggaacggaatacccttttatgaaatagtacatgatacctgataccctgttgtggtaccagctgcatggtacccgatacctgttactcggtacctgtgatacttaggacctataataccagtgatactcgtgcaagagaatactccatccgtcccacgaaggaggacgttctgctcccaaccaaaagtcccataattcttaacgttgtactctctcaacagcacacactagcaaactcctagaaaagcacccatctaaaaactcctagaaaagaagtggggccatctaaaacagtagcgaactctttctcctccaagctgtaggctgagtttagttacaaacttttttttcaaactttcaactttttcatcacatcataacttttctacacacaagaacttccaacttttccgtcacatcgttctaatttcaacaaaacttctaattttggcgtgaactaaacacagccgtagtgttgatgctagcacccagcattaattggatgcttcaaatattcttttttagcagatgtggcagtgtagtagtactagtcgtactcctacttaagcattcaaatgattagccccaatcccataaattgagggcaaaatggccattttcagacaacactaatttgacccaactatcctaggacgtccagcattctgggacggaggaagtagttaatatgtctataccgttgcaacggaattccattttgtagcagtcctctttcttttctgtatacctagtacctaatctggccggggtagaacctgaacaaaccacacatttatatgctcatggttaggtttgaagtacggatcttattatactcctcattaaaaaatttatcccaattattttccaagtatagctgtgtgcaaag

SEQ ID NO: 12203 - DNA, 680 bp, Oryza sativa
ggtattcattttttctcacatagatattttttattctcttgcacaatgagcaataacaaagctatttgaggaataacaattgaataaatcatatatataaagcatttataaatcaaaccatatgctagtatcaatattgtatatttttttaattaaagtatagaaataaaatgtcatgcatcatctcccttaaaagcaatatctaagcctcataaaaagactagaatacatacaagctataccagagacaaattaaccttcatagtattgatagcatgcacaagaatataccatatatataaaataaagctccttttttttaatttatcttattatcaaattttgcttgataaaaccatgaggtacaaaaactccccctcaaaccatgccaaaaggatgaataattcccaattctccacgaagaaaagcaaagcgattagaatctaatggtttagtgaaaatatcagcaagttacaactttgtatccaaaaacgtcaattcaacatcacccttctcaacatgatccctcaaaaagtgaaagcgaatatcaatatgctttgtacaggattcttagcaatgtttatagcagtagtattatcacaaaagagaggcactttctcaaaagtaagaccataatctttcaaagttaatataagccaaagaatctgtgaacaacaatt

SEQ ID NO: 12204 - DNA, 1250 bp, Oryza sativa
aaatttatcccaattattttccaagttagctggtgcaagtcatacgacaatagtactctctctgtttttaaaaaggaaaaagtacgaattactcccacgaactatcgcagatgtctgaattacccccctgaaccacaaaaccggatattcttcacccccaactatggaaaccggacgaattacccccctcgacctaatccgtggtggttttggtctacgtggcgtacacgtggcatcccagtcagcctttttttaataaaaaaatagtgggacccacctgtcatactctcccacctctctctctctcccctgctttcctctcaatgtctctccctcttcccctcttcctctcaatctctgtctctgtctgcactctgcaggcgtgcacgggagtggacggcggacagcggcgtcgcggctatgcccgagcggaggcgactgcggcggcggctgtgggcgtggcgcacgggggcgggcggcggaaggcggcgtcagcgcacgggggcgggcggcggatggcggcgtcgcggcgacggccgagtggaggcgactgcggtggcagctacgggtgcggtgcacgggggcggacggcggacagcggcgtcgtggcgactcttgggagcaagggcacacggcagcatggggacggacggtgggcggcggcgcgcgaagggtgcgctggcgggcggaggcgtagtcgaggcgggggcttggccgagaggaggaagcacgatttttccctgtaaatttcctggtggcttgtcgcatctcgttcatcgtcgtctgcctaagacttgacggacgaggaggaagaagggagcgattggtttcacggtaacaaagggagggacacgcgggcggccggagccggtggccaacggccattttttcatgcgtggctccctggaggttcacgtgattggcagagacgccaggtcgccgtgcgccctgagactgatgattctgtgcttctacctgttaatctatctgatggttttgttctatcatttgagttttggtcgagtccacggaccggacgctcgacgaacaacggcgacgaggtggtcgagcagggcagcagcagccacgccggcgtgcccagcccgctgaaccgctcctggcagagcagcaagcagtagacggcacagccggagcacagcgtccggtccacgcccgcagccgccgccgcagtcgctgtcgtggtgaactcgagcgccgccatcttccattgcgcgacccacgtctcgccg

SEQ ID NO: 12205 - DNA, 2028 bp, Oryza sativa
gccgccgagctcgtctccccgcgctcgctgcctccgctgccgcctagcctcgcctccctgcgctcgctgcctccgccgtcgccgggaggagagagagagagtgtgtgagagagagatagaagagagattatgacatgtgggtcccactttttttttaatacatagaatgctgactggactgccacgtgtacgccacgtagtccaaaccaccgcggattgggtcgaggagggtaattcgtccggtttgcatagttaagggtgaagaatattcggttttgtggttcagggtggaaattcggacgaccgcgatagttcgggggtaattcatactttttccttttaaatatatgacatgatgttttattgttaatcttatttataaaattaatataaatataaaattataattcatgtttacagtatatgtaattatagaaatgtcacaataaaatactgcattcataggaatataagacgtaagaatctaacttggagaaggcaatgtctccttaccccgtatcctgacagggttctccgagttctacttgaataaggaaacgtctagccgcataaatataacactagaaggggagcgcatcgaatcacaagccttagctatagacccacattgagagacagccaggtggaagagaagccctattcaccaacatcagctcgttgagacgtacttggtgaattctagctggtggattagaatagctaacttgctccccctttgtaatcagtgtggtacttttcagagatattcagataaactggtgtaagattattacttatattgagaacttgaaccagtataaaaatccttgcctcctatctccttactataatctcgtgtatatataccttaataccgacaaccccaatacactataaatattgttgtcaggtatagtccatcgacgaaaagctatatatattaccgggaatgtgaatatgcaagagaatatgttgacaatgaatagtggaatagcttatttatagaagagaacttatgctggtatatataagttggagatcagtaatggtatgcactgtccaccagttccaacgccatttctaccgttgtaaaggtagaggcaacactatactactaaatgatggtcttggaaggcatcaagaaagaaactcaaacaagttctgttacttaagtgttctatgttggtgctttagctagcagatttcatcaactatgtgcttattgttccggtacgactgatatgacgtactttcttgtgaaaatgaatcttcactgaagaatcttcagtgaatcttatttggccacttgtaaatttcagcttactataaggccctgtttagttcccagaacaaaaattttcatcatgtcacattgaatgtttacacacatgtatgcagtattaaatgtaggaaaaaaaccaattacacagattgcgtgtaaactacaagacgatattttaagcctaattatgccatgatttgacaatgtgatactacagtaaacatttgctaatgatggataaattaggcttaataaattcgtctcgcagttttcaggtggaatctgtaatttgttttgttattagacaatgtttaatactttacatgtgagtccgtatatccgatgtgacacgtcgaaacaaaaaattttgccaactagcctaagttgtcttgacaaatccatgtttaggttgtaaacatcaactccttaacagattaccggacccttgcaagaaagtagttaattaagggtcactggtgactttctttttttcttaaatgcaaactgtaattttctgccacttgcgcactataatcaccatctaccagcgcagtatattgattagtacaatggaccctgttgcgtcatttatgtgcttcaattattcaactagcacccataaaaaaaatcaatacaaaccgcatacgctgcatagtacatattgtgacgaacaagaagtggtgtatcactgctgtgtatcactgctggttcataagtacaaccggcaatcattgttgcatgcatcg

SEQ ID NO: 12206 - DNA, 2009 bp, Oryza sativa
aaataggagagaactagtgatgcttgcaatgcataagtatattagaataataatattctactagtattaggtatactaaccttttgcagggaatgacaataaagtggagaatcgacatcaacatagacgataaatcaatcggacgatgtcgagagatagacttatgtatgaatgggccaagagctcagaattgacacgatgaattgggccaaaattcacaagtctacaaagtgaagcaatagaggaagtcgccagccgaagatgggctggtttgggccagcccatggttcagcaaccccatgtccactgttgaggctagggtttggcatggacgtccaagattgcaccccaatgacagttggagggtacttcggacaattccccttccacaaccatcataaccacctctatataaaggcttcactctctatacttcaacacacacctcaagcaagggctctctcattcctctcaagtttagtttagtagtatctagctggtggaatagaattagaataggaatcgggagtccggaagtcttcggaagagttcgggtatggctctagtagctttcctttcctcttttgtaagctttgatgtagtactagcattcttttctagccacatctgtagtgttgccctctatcatagtacattagtatcgactttacattatgttcttgttatactgaatatactgctagcttatctaggagatgttttggtgcgggtatagtgtttgcttatgcaattactctatgtcatgacgatgatattagagtagtatctggtggtttagacgtggtgtctaaattacgggatatcattatttagggttatatattgcggatgagaggtgggccgctgatggtgatagctcagtacgggtattcctccgcgcctatatataatcctaagttaatttcctggggagggtattcctccgtatttagccccggttggatggtcatgacgggctgtcgtaaggaactcggcagtcaggggtggcttctcgaagtaccaggagggcatcggatagagggtattagctagtatatcagttaactagaatgtatatatactatgtatattagaagtacaggaatagattctctttctcttttctttccacctagcttagattatttattatgaggatgagtagaaatgcttgtgtgtcactctacccttggattatcttaacccctgcttagaatatgattatcacaagtaatatataaattattagttgagttctctctacatgatcttcccacgggaaaaaataaatacgatacccttggaatactctcgggtgaaatgctacaatggtatatccgtgcgcttgcggatgaactctgtaaccataatataccagaagtgtttctgcgccattgctgggatttatatttctagtaatgtcgttaagaaacaccaacagctacttcacatgctcctattttttctatgatgacggatgcaccaggatagctattacacatggatactgttgatctagctagaatgcaatccgttggaggaaagtggtacgtgttggttattgttgacgatttttctcaatatccttgggttttctttatggcaactaaggatgaggcttttcaacactttcgtggtttgtatcttcgatcggatcttgaatttcctagttctttgaaaagaattcgaagtgataatggtggtgagtttaataatgcttcatttaaacaattttgcaatgaaaaaggtctcgaacatgaattttcttctcctcgtgttccacaacaaaacggttttgttcaaagaaagaatcatgttttggttgagatggctagaacaatgttggatgaatatcacactcccagaaatttttgggctgaggcagttcacactgtatgctatatttcaaatcgggttttcttgaggtcaaaatttggaaaaacttcttatgagcttcgatttggatgtcaaaccaaagtttcacatttgcgtgtttttggttgcaaatg

SEQ ID NO: 12207 - DNA, 8670 bp, Oryza sativa
tcacgaccaacccatatattttttttgcacactttgtcatcactcgtgcgcacacccatatattttttgcatacttttttgcatactttgtcctcactcgtgcgcacccgggaataattttctggtcagtcacccatcccaaattgctccaggccaaacacgcttaaccctggagttctttgtaaatcggcttccgaaaaagaagttacaacttattgatataagtattccattaatcctattaagccctaggctgggatgtcacggtatatatctcctagaacctactcaagttataaagaatctctctaaaaggccaggtgtacaggaaagtgaaaatcatcctgagttcatgaaagcagagagctcatgatgtttgtgagggctatagaaaaaaaaatatggttacatatctcctagaacctagttaagctttcatatatacttctcattctctatgtatacccctcacaaacatcaagagctccctgcttcaaagaaaaccagtggtactaaattttctattgggacaaaaagcagataccatggcaattacttgttgcggctaaaattgatatccatatgaaattgagaattttcatctgtttggaacaggaaagtgggaattaactttaggcatgggaagcaacaggaatacgggtcaggatttccaatactcttaaggcctgaagaaaacacggaaaatagcacctaaaaagcactgcgctagcaatgtgaacttcctagcctgagatggtgtcaccagcattgcatgcagttgcttggctggccatgcaattcaggacaatctggctcctggcaattgcatcccaacaacactcttggaagaggacagtcaacttgatcagagcagctgctacatgcttgatgcttgccaaacattctccattgctcacatcttctagggccttgttgacacttcaggatggaaaggtgtactaactatagtgagcagactgcgagccgcgaattaactcttcctgtctcacaaacatatttcattggttactggccttatcaatcctgcttgttgacaatcatcggtgatcttcggtggcttcgtgtgacatgaggatgcatatggctgggtgcatgtttgccaatctgtagtcatttcagggcgtgtgctgtgcctggtgtgctaacagttttggattacaaatttttgtttaatatatgtgtggtttataaaaaaacaaatggtattaagtttttttccatacttaagggcaataaatacttatatgtggtttgtttctattttttgccttgaaaaaggagtacagctatacaagtgcgcaattgctcgaaattccccgcgcgcccatataacatttttagaggaagccgattgagagctaagctttcattcatttgagagagaattacgatcactggctataaaatcaaagtgtgttttgattattactctgtgatgaacaattggcatctgagattattggttttgatatttggagattattggcgaagtggttttggagatgattgatttggagattattggttttgaagccgatttttcaggtgatgtacagggttactgtttttgtcgggtccagtcagacagggcaggtgctgtcggtcagaccggtactatgtgagcggtctgaccggctagtccgcggtctgaccggccaacgctgtgtcggtttcggtttcgggttgtttgttttgatatccgtgattgtttcatgtttatggcttctagatggatactatacgtacgtaatactattgtttgctacaaataagtcaagttagagatagcttggtctcggaatatggtttctttgtttgattcatgtgtaggtgacttgatgccatgacttgggtataaggtgatgtccgtgacggtcagatatcatgcgggatacttaggctagagttcaatgcacgtggttggtgaagatttcatatggcatacgatcgaggtattgtgtgcgaatgggatgcggagtcgaatttagaaggagtccaaatttggtatgattggagtttgtaaagtttgtttcttacatgggaaggtttcctaggtggattaggacttctagtatgagtttggttcatggtttcaggctgcgtacctcatgtataaatagagagggagcgtgaggcctcccgctatcgctatcaagagcattgagttgatagtttagttagggtttcgagtttagtcgagattttcgtgaggagtgctgttgttacactttgtaaacacagagagaagtaataaagttttcatctactttgagagttcttcgatttgtgttttctcgggtgccgcggtctaactggctacacaccggcggtcagaccgacaaccacgcggcggttagaccggcggcgactgcaggcgaccaaagctgatctcgacggttcgaccggtgttactacctcggtcagaccgatgatatccaggcggtcagaccgattcatctactccggtcagaccgtgattcgtcgaatttgacggtaacttttaattccgcaaaaagtttgggtttttcggtataccaaccattaaccccccactagctggtttagttcttgtgattcgatcctacaagtggtatcaaagccttgttttttttttggattttaactgatctagagtttttgccatggctaataagtttacaactaagccccatgttttcgatagatcggattttccttattggtgtagtaagatgctgtcagggttatagataccacatacctaatagtagttgactaaatctcggcaggaccactacataccatgtcctatacggaagcaaccttcggatataggaggaattccggataaggaaagataaccagagttctacatggaaacgacaaggactactcggattgtatccatattggtttccctagttctacttggacaaggggacacctatgggtataaatacaagccccctaggaggagagggaggaggatcaacacccaacacaatctacatagaagccacaacatagaaacctacatacgccaagacacgccgccggatatcgacttcagggataagcacggctagtaccctacggtgtctccggatactgtcaggagagacgaaagcgccatctctgatctccccgggcacggattcgaggagaaaggctaccctgttgtcgactacgagtcagatcgtcagaccgtcatgtcgacaatagttagatagcctaccccaaatattgtactggtgtgattatcatgaataagagcaataccggcttcggcgaacaggatatagggttattacctgacaattcaggggcctgaacttgtataaaaatccctgtttccatctcttttacctcagtttcgcgtataccctagtatcgacgatccccataccatgcaaataccggaatcgtgacatcaaacatcgacagtggcgcgcaaggtagggggattttggtgcttcaggatttcgacgagatgggtttaagagatggactctccgacaacaagctactcgacgacttcggaccaggaagatccaacctggccagagtacgtctctcgacgagattggagttatcgtcatcaactatttgattcggcgagatcgatcaagctccaagatatcatcgccgcgaaggataattgttcaatatcgccagatacgagacttcggttcatgtcgactacaacggaacttgccgatctacgatcataattggtcccgaccgagtccaaatctaactacgtgcgcctgtaaattctcaaaccggctggcggctgcaccttgtgcctggatagtcctactcggacatgatgacaagaggatgcacactatacgtgaagtctatacagggaactgaagcacgtgtccaccatgtgacgggatgccacccgttatcaggtatctgatagattatttttttaaattaatctactaattttgtagatatatccggtatatatctacacaggtacgcaatattttcgtacctatttttacaatctatacagcattgtcagatctatattatgtttacctaaagcaagttttttatacaatatctattgcgcgagtgtccccgatgttaaatcgactacagtttaatgctggggactcgctctattttcttccgtataaatcatgcttgctcacagtttacataatgcctgatatttacatctgctcgttatatcctgaaaatactagaatatccatgcagttttttgagtacatactcgatattacctgctatatatcttgtcttctagaaaatatttttcaggaacaattgagcagtcgagtaggttgtggttaagtacaccgcattatcgagaacgatcttgacaaatgcagagtcgtcacgcccaacctgccaaaaaagaccgacgacctatctcatagcaccggccatggctgcactatacgagaaaaggttgttaacggataattcctcgtgaatgccatcggcttgatcacccgacatgattgcgaacggacatccggatatgctacgagttgagtgtgtgagtcatgctggccacatgagacgcacatgtaataaaccaactctagcacctctattgatgttcgagagataattctacacgttcgctggtcctggcaccggtccataacaatttctggcaccacaccagccgtagctgtcccagatatgattatactcgctcgctgagatgtcgaaacagcgcggaagaatttcttgtactgcaccttccgttggtgctctagagatcattggaatcgatcgctcgttctcgaaccagtaagtagaaatctcactcaccgctacctccattggtgttcggacgatgattttacacgtttgctggtcctcgaaccagggtgtagcaatctctcgcaccacaacctcagatggtcgaggtacgactacagcaataacgcagcggtcctcgcaccacgacttcaaatgatcgagagacacctactcattggttctcaaccagtcaatcgtagcgatctctcgtacatttacttctagtggtcaagtttagactacatctggttctcgaccagcggtgtagcgattctcccactacccttacttctagtggtcgagtttagactacatctggttctcgaccatcggtgtagcgattctcccactacccttacttctagtggtcgagtttagactacatctggttctcgaccagcggtgtagcgattctcccactacccttacttctagtggtcgagtttagactacatctggttctcgaccagcggtgtagcgattctcccactgcccttacttctagtggtcgagttacgactattacctggttctcgaccagcggtgtagcgattctcccactacctttacttctagtggtcgagttacgactactacctggtcctcgacaagaggtgtagtgattctcccattacctttactacaacaaagttgatatcaggtacacaatatcgccaagtgttttacccgagagatcccttaccacgatgacacctagcgttgaaacctatcctactgtccctttacgccgtcttgacaaggcctccgaggaacctaagggaacttcagctggggacgcccagagccgataaggccttgtcggatcctttagagacgaaagaccatgtaagatctggtcgtgtaagagttctcgccgtgcgtattaaccaagctgtgtaatcggaaatggattttccaacttcacggctgggggctaggatcagtgcttattcaactaaggcaggtcaaaggtccaagagccttatcctccgagaacgattctccgacgacaaggctaggggctagggagagtgtataactcaacaaactaactgatcaaagtcggtaaaagagtagacgctcatatacaaaacattggtctgtaagtttaattcattttcggttttccatacatattataacatgttaccctttgagcgttcgctcgggggctatttctatctaatattcttttctgagtattgatttcaggaaaattctattcgacattatcgaagacaccatgtctctatggttctacaccaagatcgactaaggcaagtacgacaaatgttgacaaggctccgtcgcagactctatgcctactcgattactcgagaacggttggtggatctcgacaaggaatacggaatgaagagatggtgtacccgccgatataaaatttcttgacttcaatccaaattctcgattacagcaagacgggagattactcgtaagctctgtactttcttggttgacgtcggagattgactcagacaaactctttaggagtccgcacgaggctgataaaggaagtctaacgttatctctgaactcaccgagaacggttacgtgcgctcgataacagttcctccaaggtctgcggttgagaatatgaactcgttcatttggattgaagtcaggggctattgtcagggttatgggtaccacatacctaatagtagttgactaaatctcggcaggacccactacataccatgtcctatacgaaagcaacctttggatataggaggagttccggataaggaaagacaaccagagttctacatggaaacgataaggactactcggattgtatttatattggtttccctagttctacttggacaaggggacacctatggatataaatacaagtccccctaggaggagagggaggaggatcaacacccaacacaatcgacatagaagccacaacatataagcctacatacgccaagacacgccaccggatatcaacttcagggataagcatggctagtaccctacggtgtctccggatactgtcaggagagacgatagcgctatctctgatctcgccgggcacggattcgaggagaaaggctaccctgttgtcgactacgagtcagatcgtcagaccgccatgtcaacaatagttagataggctaccccaaatattgtactggtgtgattatcatgaataagagaaatactggcttcggccaacaggatgtagggttattacctaacaattcaggggcccgaacatatataaaaatccatgtctccatctcttttacctcagtctcgcgtataccctagtaccgacgatccccataccatgcaaataccggaatcacgacatcaaacgtcgacagatgcaatcttacattatggctgaggatcttgatattttgagaaaagtttctaatccttatgtgattccttatcaaattaatattgctgatttaaaaactgcatttaaaaataattgcaaagcttgcaatattcttttgagtgggatttctcgttcggattttgatcatgtttctcttcttcaaaccgcaaatgagatttggattgctttgagaaattttcatcaatgaactaccaatattaaagaactttgtcgagatgttttcaaaaaggagtacataaaatttgagatgaaacctggagaagctttggatgactatctttctaggtttaacaaaattttgagtgatcttagatatgttgattcttcttatgatataaattacacacaatctgaggtttcacgtcactttttgaatggtcttgacatgtctatttgggagatgaaagttacatcaattcaggagtctgttgatatgtttgctttgactttggattcgctttacacaaaactcaaaacacatgagatgaatattctttctcgtgaagttgattctaagtctagtgctttggtttcttcttcgacttctttggatattggtgcttcttcattgaattctactattcttgctttaattaatgccatgtccgatgagcaactcgaacaattcaaggaggagtacttggttttggttactttcaagtttgctcgagctatgaacaatgtcaagtagaggagaagaggtggtccaaaccgttgttttgaatgtggtgctcttgatcacattcgattgcattgtcctaagcttgggagaggaaaaaggaagacaatggtggagagaagaccaaggagaacaagcccaagagcacatttaaggggaagaagattaaggagaatctcaagaagatgtttgaaaaagtctatgccggttttaagccactaagcgatgtagatggagagagtgaagatgaagataagggaaagaacatctccagtatttgcttcatgccgcgtggtgaatcggattcaaagtgtgaaaaacaatgaagctttggtggcgaggaaggagaacgtgtggatcgtggattccggttgttcgtggcacatgaccggtgataaaaattggttctcttccctcaaacaggcatctaagactgaatcgattatctttgctgatgcttctactagtgtcgttctcgctacaggtttggtcaaggtaaatgataagtttgaattgaaaaacgtagctttggttgaggacttaaagtacaaattgctttcagtttcacaaattgttgatgaaaattttgatgttcactttaagaaaactggaagtaaagtatttgattcttgtggtgattctgtgttgaatatttctcgctatgaaagagtgtttaaagctgattttgaaaatcctgtttcacctgtgataacatgtttggttgctaagtttgataaggatgtaatgttttggcatcctagactaggacatgttggtt

SEQ ID NO: 12208 - DNA, 1137 bp, Oryza sativa
ttcagaaaaatttctccgaggccggtctgaccgaaggggtactgccggtctgaccgggggtcggtcggaccgccgctgcaccgccggtctgaccgctgcccagtagccggtccaactggtcgccggtccgaccgctggacccactgcagtctgaccggtttcctcgagggaaaaccaaatttttgccactttgaatttgcaaaatcaatctctctctccattttctttttatgagccaatctgaaacaaaaaccaacaatatatccatctttcccacaaaacgagcaagcatatttttcacgatgattagaaacattggtagactcagatggcttagcaacacaagcaacaacatgagattttgcatgcacaacattggattttgaagatgatgcactcaaggtagacatgatgccaacagatttaaacacagtgttattagtttcatgtttaaccaaaatgtcaccacttactagcactaatacctaacacagtaggaggatgtttagtatgatcagcataaggattaaaacctaaaccacggttatgtgtgctaaccttagattgatctagaatcatgttgaggttctttttaccatcagaaaatcttagcaaagaatttttcaaataagaaacctatttttccaaattagcacaattttcacaatctaccatgacacctttgcttttacgacacttggggcaagaaagcacttcattgtttttcacaacatcttccttgtactcaacatgacctaaagcgtcctttaacttcaacttattcaaagtacatgttgagcaatccaaaacactatgaggttgttttaactttttagcacaaatcatgttaaacatcaaactagcatgaaaagcaatttgttatttttacaacaactttttagtcaaaaacaactcatccaaagtgcgtgtgtgcaaagcaaatccaagagctagagaagatctatttttcaaaccatgtgcagcattaacatctctaaattttgaaatctcattcattaagacctcacaacttttgcaatcatcatcattgggaataagatattttaatctagcaaattcagaattaagagattcgataataaactcttgttttctatacatcttctcacacatcat

SEQ ID NO: 12209 - DNA, 782 bp, Oryza sativa
ctattcgctattgccgttcgccgtcgtgcgtgccggaggagccggcacgagcgaggacacggaaggggactctgggcgctcgccttcttcctcttccccggcccgaggctggagagatcactcccgtgccgtcggcctctcgtcacagcgccccgcctcatctcggtagtgcattcccccgttctccctcctcgatccatctcttccccttagttttcggtagtagcatgtgtagccttcctgtagctagctggcgccgccccgaccgttgccgccgctagctgtgtgctcgccgccgtcgccgcccgtgctccatagcgcccgctcgtcgctggcctcgctcggcgtagctccgcccaatccgacgctagcaacggattcccatagccgcgtagatgctctcaccgccgggaatcggccccacgtgacctcgtcgccgtttccccttccctcgccgccggttgccgccgccgcaatccgccgccgttgagttccctccggcgaatccgagccgttggctcgtctcccctcgtcccatgcaaccccccggtgtgctcgctttcacctgtatcgccgtggttcgctcagccaatcgccaccgccgtccgccatccgttccggccggcataatcgtctaccttccgccggcccgcgtggctgccacgtaggcaccacgttggcgccacctccggcgcgaccggatcggctgaccccgcagccgttcctttctgttccccccccccgtgcgcatggtccgcggtgagccgtgaagctactcgtgg

SEQ ID NO: 12210 - DNA, 600 bp, Oryza sativa
ttatctatgtaatatgtaacagatcatgacttgggtattacgtttccttgtatattacggaacggcctaaagttctggtttgataatattgtaaagtagatttaggaaaccgataccgtattggttaaggtttctatcttgtaatcctgccccccatcctatataaggtgggcaggaggccctctagggggcatataagacaactagatcgtcagatctatatacactcggcggattcaaatccccaaacaggtgtagggtattacctctcattgagagggcctgaatctgtctaaatcctttgtctcggcatccatccacttttaggtctcgtgcgctaccccttttattattgccgaatttatgtttcaacagttggcgcgccaggtagttgtacgccgagtttcctattgaggagtgcgatggaatcaattttatgagtcgccagcttcgcctttgcctcaggagctttgacttcctcgccatcgacaacttcaacaagcctcgctctttgactttgattcaaatcagtcggggaagatctaatctacctaaggaggataacaaccactctaccccggcgagtttaagattcgatct

SEQ ID NO: 12211 - DNA, 1366 bp, Oryza sativa
  unsure (1)..(1366): unsure at all n locations
tttcccctcataagtgaaggtgaatggagggaacatgctctcgttcgatatcgtcatcggcatgaccatttctgtgcaggcctgcaagagaagttgcttcagaaaacacaactagtatctatctcagtattgtcagtggcattgtatcaatcacctgccatccccaaccactgaggccatgggggtcttctccatcctctaactggaagcatgtttgatctcctgtgtaattgtagtacagactcgccgctgcgaaagctttgtcaacgatgtctgctcctgcagggaagccgtggatgatcttgcacatctgtagaaatttcatgagaaatttactgagaactgaaattccctgggaattatatgttcagtgagacagaagaacaggcatggtttctgctcagctcagtttggtgtttctgacacaatcttggttatgcatttggttgaaatgtagagaggagatttggacattgtttgcagaacataggtagagatggcaacctccttgataggataggcaggcagattcatcaggaaattggccggggttggatagtccaccatggctgtgtacacaaatgctgtccatagccagtttctgaacgagtaaaccgatttcacagtcctaaaatttgagggaggaaaaaggcaatattgtgaactcaggttagtgtaaatccaatcaatgtcattcttcatctattcagaagttgggaagatgacctttaatcaaagaatgatcatggctgtcatatatataactgataaggtctatgtcatttttttacataaacctgttctgtctggtatcttatctatcaatatattaggcaatccttattgccttcttaaaaatggataagttttatgccacctgtaaatttatatagtttcttacacatcacgacaatgaagcataattacttgaatttgtgtgtgtatattatccttttctgaatctgcatgctatttttcttttcttggtattgtttggttgatcacttgcactgcacacatctggaatataataattacaatgatctcaattttctgttttcctttatatctaataagactataagacgtggataaaattttggatattcgtggcacgtttttcaaactactaaatggtgcgtttcgtgcgaaaactttctatatgaaagttgctctaaaatatcatattaatctattttttaagtttgtagtaattaaaactcaattaatcatatgttaataccacctcgttttacgtaaaacacttaatcttatttttcatctttatctttaggagaaaagaacaccacctaggtagtgtattaaaccagcaataaacttacttgcangctctgaagttttgctg

SEQ ID NO: 12212 - DNA, 1738 bp, Oryza sativa
gacagtgatgagtcaacttcagatgttgccttaagactgaaagactcgtgcctttccgaacaaccgatgaaagataaagatattcctactgctgtacaatctccagttttccctgatttttatccactcgagcatgaaaattgggaaaatgatattgtttggggcaattcaccaacaaccgcaattcagccttgcttaacaagctgtgcaatatccaaagaaagcttggatgaccacaatgaagaccaggccgagggttatgtctctgggtgttgggatgtacagaataaatttcatagttcttcagtaatggcagatccttttgggcatacagaaatacctgattcaactagttaccgttcccctgagaacagctattctccattaagaaaggagactgctcaggagaataacagcttagatgaaccaaataacataactcaaccggttaaaatcgacaccacacggcatttaaacaagctctctttactgaacaaggagttgttagaaggatcttggttggataacatagtttgggatcccagtgaggatgtaccaaagcccaagctaatctttgaccttaaagatgatcacatgctttttgaaatattagatgaaaagaatggggatcacctccgctctcatgctcgtgccatgattgttactcggccaatgaaaacttcagcagtggaaaatgttgaccataacaatcaagcaattgcattgagtgggagattcaacatttccaacgacaaattttattctaacaggaaaatgtcgcagcaagctagatctcatgctaaaaagcgtgctacaatgggcttaaagttggtacattctgttcctgctcagaagctccagaccatgaagccaaagttgagcatgtaagtttttcttcctctgcatgactctatgaatcttgcattcattttcagttattttattgaagtgataatattgtaaatctgagctttattcaggtgcctgcatagccaaaatatttttttcacgtattattcttcaataacagaactgggtaatctgtctttgattaaacatacttgcttgagagaacaactgccagtcctgttgtcttgaggaaatgttttcgtagacatggaactggcatctggctatgttcgtgaagataaccttttttgccttggattttcggttattgtaattggcgcagctgtacactgtcatgatcgatcatcagagagcataagatacattttcttgattatagttgaatatatgttccttttaggaccaattgttggatactattggggaaaaaagattgctttagaacttcaaagttcagccaggttatagttctgggaacatgcattttttaccaaagaaaatgcacaagttttccagtggaaagctttgtgttcaatattgattgactttgtctacatttactgcactgcagatttctatgctctggtagcatcagctattcaaagctttttggtcttaatcgtattcaactagttgtatttggggtttttagttgtcgtgtacttcaactactgaactttgttgttttctgttctttgttgactttaagtcgctaaattttgtcttttgatcaacttttgtgcagcaaagaaatcgcaaacttccatagaccaaaagctaagtggtatccacatgaaaataaacttactgctagatttcaaggagatgagtgcagtcatgggccaatgactgctattgtgatgacttt

SEQ ID NO: 12213 - DNA, 3932 bp, Oryza sativa
aggaaaaaaaatgtggcgtagatgatgctagttatatatggactctgttcttttgaatatatttaaggtattacacatgtttttccatcttttattgtaagcaaatatttcacacgtgctagacaatgacatgctacagttatggtcacttttatgttcgacggtttcaaatgatataggttttactattttgcacattaaatagaaaaaataggacaatacatgtaacacgattacacgaatgcagattcgacaataacaccaacaaaagaacaactatatcaaaccataaaacgacaagggaatattccattcactgaaattctgttatatgttcagattaatctaaagatcaagcacataatagacatgtgaccatttttgtctaacctaccatctatcatcccaagtatgaattaagtcaataaatttataggatctcacgtgctatctaagtacaacaaactattcaatttatctacttgaaagtagtaccaccaacaaaagaataactactacagaccctaaaacaacagtagaatattccatccaccgaaattccgttacatgttcggattattattgatgaatctaaaacccaagcacataatatacacgtggccatttttctctaacctaccatctatcagcccaagtatgggtgaagttaataagtttatatgatctcacgtgctatccaatgtacaacgaaccattcaatatatctacttgcaaatagtaacgcctacaaaagaacaagtacaatggaccataaaacgacaacataatattccatccaccgaaattccgctatacatatgtttggattattgttgatgaatctaaagaccaagcacataatagacaaatggccatttttctctaacctactatctaccaacccaagtatgaatgaagtcaataattttacagaatatcaagtactattcaatgtacgacaaaccatttgatttatctacttatctacttggaagtagtaacgccaacaaaacaacaactataacggatcataaaacaacgacataatatccccactgaaattccgttacatgttcagattattattgatgaatgtgaagaccaagcacataatagacatgtgaccacttttctccaacctagtaccatctatcagcccaagtatgagtgtgaagtcaataaatatacaggatctcacgtggtatccaatgtataacaaacaaccattcaacagatctacttgaaagcaacacttcctacttctttagacatctacttccaagagaaaagggacaaataccaagaaagggaagccatgacatgcatgaaaaatggaaagttggtgtgaaggaaggggttttactgatgacggggagatccatctcaaggccgatgagctcgagaagcttgaagccgtccatgtccagcatgtgcacgtcgctaatcaccaggtcgaaatcccccggcctctcccggagcatccgtagcgctgtcgccgcgtccctcgtcatcgtcgctacatcccggccaccgcagaaatcaagcaaacaacaagaaaaaaatatatacaaaaaaaagatctaactaaacaactcggctaacaagccaagaactcacgttggtacttgcaccggcgaagcaacgcctccaggagcatgaggcaaacggggctatcgtcgacggcaagcacgcgcaaaccctctgggaattttctggcggccgtcgcctgcgtcgccgccatgttcgtcccttggatccccttggtaaaaaaaaaaacaaacacgatcagcaacaagaaaaccccaatctggacgaacgactgaccaccaaaatctccctccccctccgcacccccagcaagaacccaccaaaaccaatacaagaacaccaagaaaccctcctagaacccccacctttcagatcttttccgatgggttccctcgaatgctggctcaaaacagcacaagaagctgcaactcgaggtcagagagggatgggtgcaacagcgagggggagggcgtcatttatatcgacgaggagaggagaggatcaggacagtagatgggggtggaattcacgcgctccctcgcagagaaatttggaaggtattttggcctgtgtgcgtgcaaatccctagctttaaattcctgactattgttgcatgcatgtttcttcttccgctgccactaacacttcactggttgatgttctattggactgttcttcccacttttgcgagagccttgatgcgaggagtaaatgtgtgtgcaccgaatattggtaaatgtttaaatgccctttttctatgggctacagttgaaaaccacatctggttttgctggttttcataaatgatgaagctaggtgtataatataaaaatcatttattgtatttgttgaattatatatgttgttcatagcacgatggtaagatcccaacgagtgaggccgctgacgagggctcaatcactactggctcacgcaaaaaaaaaaggtccatcgctatgtgttttccgtggtcgtggcatgtagctaaggtgatagggtgcatctaaccggcttttagggattttttttttatcttaaagcaatgtatttagaacgtctcttcccttgggtttaatttttttatatacattttactagtgtggttttatgtttctctttggtgaattttgggtttaagcaaaattactttctgtcggtcccaataacatgtcactttctttgactttcaatagtttgtcgttattagatatgattgccaaataatggtaaatagttaaatgctcttactccatgtgtgctatagttgaaaaccatctctagtgtggctggctttcaattaattcattggtgacaatgatggtactagtgtatattatttgaaacttttgttgtatttgttacgctataaatacagcaaaatgatgatactagcactatgatactaacaaaatgattatttaaagcttccgttgtatttgttggataataaatgttactcacactagcacggtggcaaggtctatgataagtaattccgcttgaatcagagatttgttaaatacaagtagaagcatgttgttataatttaatgttctcgtgtttgcattgctgtagaataaagagtaaatgtggtcaatacatttttcaatagcatgccattattatttgattattttgaatgttctatttagtgaatctatgattcgagaggaatcaatttccatagaagtaggagcatgtggttgatatttaatgatttttcgatgagcttattgtataataaacaatgctaatgtagttttagatttatctattagattatgagtgttacataagtttttgttcatttatttagcaaatacaggttccaagttgaatgactttagctagtatttagaggttttgtgatatagagattaagggcatgtttggttataacctaaccttgtcataactcatttttttacaagtgtgacttgccacacaaactcacgaagtgtgaccattgttttattagccataagggtgagaatgttttgctatgaattttgtgtgtatgacatttgaagtaacaaaatgtggcttgccataattacaataataaatcaaacactaacccaataaattgtaacacacctaaggcttagggaatgtgtggcatacaaccaaagaagccctcaaagaatgatattcttctactataaaaaaaatatagatatcactgtggcatggcatgaagccgtgaatacgtcaataaataaacgattttcgtgctaaactgaacacgagatgtttatttgtattccaataaaagcacgtagatttcaattggtgagcacacagtttcacatagaagagttcaaataaatgacttgtttttttacttctcaagtcttgcatatattatttaatgcaattaaatc

SEQ ID NO: 12214 - DNA, 1948 bp, Oryza sativa
agggtgctcaagaacatatcatctagtatcattgcccttgtcacggagaaaggtaaacaagattctgaagataacgtgtaaagtcaaaatattttcagacagacttatgctgataccatttgtacaggagctcatcatttggacttcagatcagcaactaaagatgatccagattgggttgtagaacaacgaagacaagaagttaagatcatacagggatggatagatcagtacaacgaggaccttgcacagatatcaaaatgagaagatgcagttactgcgacagacaatcgaaacatgagactgtctacacagtaatcaactgtttttggctacatggaaaaaataaggaaaaggaatttttctttcttgcaggctgttagacagaaaattaaattaaggtaacatacagtggaaactcaataagtcactcagaaaggttgtaagcggctaacccgcgaaacccacttataggccaaaataagccacaaactcgtttattttgacctataagtgggttcgcggcttacccacttacacccagtcagaatcagaaattgtgacacccaaatattccatggttccatttatctcccagtaaataattggttctatatctgcacagtaaatggtcatgcatgtaaaacaagcgttatctctataattctaagaaaggaacagtattgccagatgtattcccgaaaaaaaaaaagtattgccagataaaaactggataaagcgcaccatttcgaataattcatgaaaattattccatttaaccatctaacacatcaatcagaacacgttcaacctgacaaaacttcaatgtgtttttttatgatctcaaaaaccacgacgaagctaaaatcttttgttgagctgactactctagatggaaatggggctttttctgaagatgacctgcttctaactagcctattacaattggcacaattttgcacacacaatgtgcaacagccatggattaaatcagcagctagcctatgcagatacagaacatatctcacatagtcaggactaaggaacaaaatcctggtctccatctacgacagcatcataaccttccatgaaatcctgcagtgagaaaataagttccattcagatgcacttctcagcgaattccaagtgtaaagtgcaagccgaaacgaaatatacttcaaagatgcccaatgtttcaatattataagcatgaaccaacggtatgaatcaagcagtgtagtgaatactggctacaggtatgtgaagaaaatcgaaaccagagagaaaagaagaataaaacgagctgccgatctgcaggaaaaaggagagtatcttacatcattaaacagctcagcaacaatgtcatccaaggtgtctgtcccttctggaccatttgttcctgtgatgaaaccattgttttcatctttttttttagataatggattataaaaaacccggcctctacaccttgtgagggtgtacacagcctaaaagtcacaaacacgagtacataagactctcccgttacatgggtaaagcataaataagttttaaagatggataacaagcaagaggaactaaaagctaagcttcaatccttcttctaaagttccacccaaaagtagagaagagctccatcatacgcttctctaaaagcttgcacttcgcgattacttcaatgccttcgtcttctttaagaagcaaagaccaaagccttgacaactgagttgctttgaaaattacctacaaaaaagatacgtggttgtagccattaaagactaagtcatttctactgagccacaaagcccaacaactcgccgctatgcctacccaagtttgtcttttaagcttaggttcaaaacctcttaaccaatttccaaacaagtgtgaactattacggggttgcttgactccaaaagtaagatagatcgcattccaaatgtatcta

SEQ ID NO: 12215 - DNA, 701 bp, Oryza sativa
tgtgtcactgccattttcattgccgtccatagctgaaagtgactgaatttgtctgtcccaaatttcctgacatttctctttagtttgctgctgaagctgcagaaaagacatcctttgtccccgtgcaaacttactaactggaatttcatccattgtaacacccgatgcagcttgttcacttgaaagcttcctcaccatcgcgatccgatgccaccttgttaacttgtcaatttgctcttctggaacgccaaatttgagtagcaactatttacaacaatatcagtgtcaaatctcagtgaataaagtgtaaaagaacataaaaacagcatggctgaaatgcaagcatggggtatattcttccatgccaacaaaaaaaaaatacaggtatctaaattatgaccgagtgtgtcaatggcatgtgcagactcgcagtaggtcccacttgtaattctcgcggcagttggtattttgacaaaatgtgtttgttttacatggtatgaaggcaattaatattttgttattacagggatccatgtgattcttcatcataccccagttaataaaataaacatctgagataattatatgttcacactaaagcatgttccatgatgatactaaggcatctcagtgccttgaaccccaggaaatgtatttttgtgcatcatactgctaagattgggagggctgatggtacctct

SEQ ID NO: 12216 - DNA, 1402 bp, Oryza sativa
attcacttcagggtactgcactggaaactgatttgttggcgccaaaaactcaccatttgactgcactggaaactggtttgcaggcaccgaaaacccaccatttgactgcacttgatactgatttgcaggcgccgaaaacccacaatttgactgcactggaaactgatttgcaagagctgaaaacccaaactttgactgtacttgaaactgatttgcaggcgccgaaaccccattatttgacttgtttgcagacgagttgccagaatggcaagatggagagccattgcttgtctcccacatactcttacagaacatgccagcatatgagctaccagaatcgtctgtatccaacaccaagccatttgatatgtttgcaaatgagctcccagatgggccagatgggaagcactttcttgcatttgatgagttctgcagtggctgaaacacaggattgttgcccgggcttccaccatggccaactgtccccatggccatgtttctctggctgttcttgagctgaactgagtgagtgggcagaaagccatttgttgccaatgcagatgcagaattcatccttgcaaatggattgctcgagcttgaggaggcaatggctggggttagacggtatctcccattttcacagtaatttttcagagcatccagttcattcatatacttccatttttcaggaaattgatcaggatccatgcctgtttgagtgctgatccttttcaggtataaccgatacttctgaaaccaagaaaggcaaacacatggttgagatgtgtccatactcattggaaaacaataaaaaaatcacaaaaaaattgattactagttgtgtgcacacattaaaagaagatatgaaaggtttatgtatggaacactttcgatcagaaaagagtaatccaaatatctttaattatagaaacatagaaattaaacataagtgtagatataaacctgaagatgacttgcaatattctctctggtcatgtagtccactttcatcatccgcaatatcttccttggaacagcacctacattcacataatcaaaatatttattgcttaagacaaattgaaaaaaagaaaaagattgtttgataactgagacatgatgcatgagctcttacgatcaactccaagctcatggacggcaatgacaaagtcccggtgcagctcaggtgtccagacaaccctttgtctcttcagagttgaatccatgttctctttgttctcaccataattatctccatcatttctcatcttccttgtgtacttcctcttggtccgcgtcgcgccaaccagctcaccgccgtcgttgtaaccgccattgtggttccttatgtcaagctttctcttcctccacacatgttgccatatgttctggatgtctttga

SEQ ID NO: 12217 - DNA, 645 bp, Oryza sativa
aaatgaaaatttcccttctagcgaagagaaggagaagcacgcacgcagcacgtgaacttccagctctaaacccttccccctctcttggtccaagcccctcctccccttacccccccgacgacgccgccgtcggcgtcttatcacccgaaaccctagccccattcgccgcggtcgccgcctcacccgaaaccctagccccattcgccgccggggtcgcggcctcaggagcggaggccatggaggacgtctgcgaggggaaggacttctccttccccgcggaggaggagcgcgtgctcaagctgtggtcggagctcgacgccttccacgagcagctccgccgcacgaagggcggcgaggagttcatcttctacgacgggcccccgttcgccaccggcctcccgcactatgggcacatcctcgcgggcacaatcaaggacgtggtcacccgccaccagtcgatgcgcggccgccacgtctcccgccgcttcgggtgggactgccatggcctccccgtcgagttcgagatcgacaagcagctcggcatcaccaaccggcagcaggtgttcgacctcggtatcggcaagtacaacgagacctgccgcggcatcgtcaccaaatatgtcgccgaatgggaggccgtcgtac

SEQ ID NO: 12218 - DNA, 681 bp, Oryza sativa
  unsure (1)..(681): unsure at all n locations
attcctgcagcctccttccaagaggagaatctgctggatgtctaaccaaaccatcttgtgtgcgctcttcatcatgccatcttgttagagctgctgttctagagcatgcaaacaacctctgaaaccttctctttattggaaaatagcgaagaactttattaggaaccttgtgtatgcgtttgccatttagactcttgttttctgacttccatcttgaggtttcacattttggacaagagttggcattagcatcatccttccaataaaggatgcaatcatttttacatgcatgaatactaacatatccaagccgtaagcatttcactgttttcttagcttcattgtagttctttggtagtgctgaccctttagggaaagcttcaataagtagatttagtaatagatcaaaactcttatcagaccatcccccaagcaatttgatgtgtagtagtttaactatgaaatgcagctttgagaatttatcacaccctgngtacagttcttgcccataatcatctgacagcattttaagagcattcagatcttcatttgttacatctgaattaccctcatcctcaaattcccccctatcatctaagccacatgccaagtctcgaagcaaatcagagatgtcatcatgttcacttgactccacatccccaacctcatcatactcagcag

SEQ ID NO: 12219 - DNA, 686 bp, Oryza sativa
tcttattggctctttgggtgttgaggagaatgcgagggcaaaggacaacttgggcaaaaaggtcgagagaggttctagtgccaatatggtacaaaagaagaaccctcaagcatcccacaacaacaagaaagttaagcctgatgtcaaacccaaggctacaaccaattttaagaagaaaggcaagggaaaggcaaagggagactgctttgtgtctcgcaagtctgggcattgggccaaggactgtcctgaacgcaaagacaggaagtctgctaacatggtcattagcaagggcggaggaacatcggggtacggtaaaattttacctacagttctctctttttttcattcacctaattggtgggttgatattggtgctaatattcatgtatgtgctgatatttccctgttttcttcttatcaggtcgggagaggtttctccttgttgatgagaaaagggtcacttgcggctgttcatggtgttggtacggtcgatatgaagtttactttgggaaagaccgtgcagctgaagaacgtgcaacatgtcccttcaataaagaagattctagttagcggctctctactgtgtagagaaggttttagacttgtgtttgaatccaataaatgtgtcgtatctaaatatggaacttttattggaaaatgttatgacaacagaggcttgttccgct

SEQ ID NO: 12220 - DNA, 681 bp, Oryza sativa
gggataacttgtgccgatctcgtgtagtttgaatttttctcaataccaggtcgccgactaagaaggctagtgatcgaacgttatgattatgataacggcgcaacccttgcaagtatcgagccgactgaattaaggctgcttcgagggcctcttccagtcagttcaaatcatctactcggtcttctccgtagcgctcctcgttaaagttgcgaaaacgtaaagattcaaattccacctcactgggccacattgcttccgctccataaactaagaaaaacggcgactggcccatggcccgactgggagtggtgcgcaaggaccaaagtacagacggcagctgttctacccacttgctggcatagggattcagtcggtcgaaaactcgtgcctttattccttggagcaccatgccattagcgcgttcgacttgtccattgctcatagggtgcgctacggaggcataacaaattttaatgccgaagtcttcacaaaagtctttaaatactccgccagcgaattgagtgccattatccgtgatgatccgattaggtaccccaaaccggtgcacaatgttgatgaaaaaatctctagccttgtctgtcatgtttgtgatgaccggtttagcttcaatccacttggagaatttgtcaatagccacaaagaggtgagtataaccgccga

SEQ ID NO: 12221 - DNA, 669 bp, Oryza sativa
cgggcgtccctcacccagcattactatctcacggccggtggcggattctggcatgaagcggcgcggcagcccagcctgcctctcgctcacaatgcgggaaggcggtagtacgctaccgtcgagcagagcggagccccgtgccatgtcgtcggagaaagagagggttgagaacgagtgtgtgtggcgaaggtgaggcgcagcaaagagagagttaggggcgcaaacggcgaaggaaaggggaatagtggcgaaaaggaagggagcaagtcctttcctcgatagctttatacccttgccatcgctgagcccggctcctcgtttctcgtgcccactatctcgctccctcgttactcgctatctcgctccctcgtttctcgcgcccacgcttccactaaattccattcgcccgcttgcggcgcataaggtagatatgcggttgtggcagtcgagatagatcgtatcgtgtgtgcgttaattacgctcgctgaccgaagcgacgttaccatatctccagacgaaacgaatctacacgcccagattcgagcgctgctcaagtgatgtggcagtcttgaagagaccgcccatgactgacggccaagacaccgttaccgatatgcgtggtttgagaccgttgggtttctgcccaatcacggagaccggtcccacctg

SEQ ID NO: 12222 - DNA, 675 bp, Oryza sativa
cacacgaacggacggccgagatcgaaccaatccaaaacggacggccgagatcgattgggtccacggcggctcacggcggacgaccccgataacgtcagcggtgacgtcaccgacagcggcggcggctcggcggaggagacggctcgaacggcgcacgctcgccggcgaacggcggcgcgaggacgcaaacggagggcaccaagacgaagcgggcggcacggcgaactgaccggcgaccaaaacgacggcggaaggtcaacggacggcgacggcgacgaggaggaagcggcgaagctcttcggcttgacgacggcgacgaagctccgacgatctccggcgacggcgaaggggcggacgaggacggcgacgacttggcgagcacgacggtggtcttcccgagcgacggcgacggctgaaacgacggcggcgcacggctggagcggcggcggcgacggcaaagctagggcacacggcgctagggcttttccgacgacgagaggcgaaggcgaaggtggcgacgggtagaggagacaccgggggtccttttaaaggggctcagaggcggcggcgaaggcccaaggcggcggcaacggcgaaggaaagctcggcttggagagagggaaaccgatccgtaacgaactcgattccacgaacttccaaaacgatttagccaaa

SEQ ID NO: 12223 - DNA, 1097 bp, Oryza sativa
ggacgatgtggttggcggcatcccggacccgcgcgcgcgcatcgtcctcggtcccgggagggaactcctccagcgccatccatggggagaagccggggtccctggcctggtaactcgctaacacgagttccaccgctccttgggcgaggtccctcgaggatgacttgatggtcttctcgagctcctcggggagttgttggacagcccaggccatcctcctaaggtgcggggcgaggccttccagattggtggagcgcgaaattgtctggcctttccagaggcccgcttcccgaccggcgcgatccagccgggagactgcatcccaaagcatgccgggccctatctcacccgacaagcggagggcctcggcttccccggtggatgagtccagggcgcgctgcatgtccgcgacgttgtgttcggcagctgcgaggcgggcgactaagtcgctttcgcccgtagccgccccgccgctgcgcttcctcgcatccagctccttttctcgcgtctcgaggttagcagcctgttgctccagcgcggctctctcggcgcggatgcattccagattgcggcgcgcctgctcctcgtgcggtgcctcgcggagggacaggctgtccgccagccgttgtgtcgcggcctcggactcctcaagagctcgctcccgctcagcaagcgcgtcctcgcggagccggagcgcggactcctcttcggcgcaggcggcctcgtgcgccgccagcgtcgcctcccggatagcggcggcggcctcgcggtccgccaagctggtctccacggcgccggcatgatcctccagcgccatggcacgggcttcaagggcctcttcgcgccgccgggacgccgcttcagcctccgttgctcgctgctctcgggcagcggcggcgtcgaggaccccctgggcggcgtcgagctttttctttagctccgcctcccagctcccgtgttgaaggcggagggagtcctgcgcctcaatcatcgcggtggtggcgacgagggcggcctctcgctcctcctccacctctcgggcgatctccgccagcgccgccttgcgggcttcaagctccgagatgtggcggcggtgg

SEQ ID NO: 12224 - DNA, 658 bp, Oryza sativa
acgtcggcgtgagcgccaccgcggtggcgccgcacacgatccacgactgctgcacgtagaggccgagcacgtccagccgcccggcgcccaccgcctgcccgcacagcgtgtccagcgcgcaccccatgccaaactgccatggacgcgcatctcacgtcatcggtaccgtccgcgacggctagcggcggcggccggccggaatgaacaatgccgaaagaaagctcgaggctacgtaccaggacgccgtaggcgaagccctccaggatgctctcgacggcggtgaccgcggcgagctcgaccacgccgaggtggccgacgaagctggccgtgacgaagccgatggagaactggagcaactcgacgagcacggccgggaaggcgacgcgccacagcagcttcgactcctgccagctccggctcacaagaccttgcccctccatgctcaccgtaccacgtataccaccactattatttacagctttaccaccatctgcatcttgcaacaaacaaggagagcatgtgatgagtttgttgggaaatggccgtggtcctagctagcttcctcatcctaattattgtcagataatggatataatatcataggaagattatcataaccagtaagaggtgtgcaggtcatcttccagcagagcatatt

SEQ ID NO: 12225 - DNA, 600 bp, Oryza sativa
caggaaaaagtgtcttcaatagaatatgtcaagcggaacatacatgagcgtgcagcagcttccagctcaagaaaagcagcaacaggtgcacttctcgacaactcaatgtcagaaagtagcttttgcatccactcctccaaagcgttccttctctgcaaacaaaacatttcaagaaccaccggtcaaaaaggctaagcacaactgaatgtagtatttgacatcgaacaaagcaaaaattaatcaatatacataacggctaacctcttctagaagcaccctgcttgaatttattcttgaaaaggcatgcttcggtggagcaggggggattccttttctgggaaattcctgcttaagctgcagtacgggagaatcttagaatgaagaaatgatattggattagaggtcgaatggaaagtaataatctttttttctcagaatcatatccaagatgagacttccaaaatgtccacattcattatagaaaccataaaatttccaaaggtgaagttctcattatgaagtcaccagccgaagatgccaaaatctgtaaaactaatttggcccaggtagcataccgtatacactaagtcaagtttataa

SEQ ID NO: 12226 - DNA, 869 bp, Oryza sativa
cataaatccaagtagtttccctaatggtactccgaagatgcacttttcagggtttaatttcatcctgaaagcgcggatgcttgcaaaggtttcttctaggtccgtgatcaaatcatctttctgcttggtcttgacgactacatcatccaaataagcttcaacgttgcgaccaatctgagttgaaaaacatctctggatcatgcgttgataagttgctcctgcattctttaatccgaaaggcatggtgatgtagcagtatgccccgaagggcgtgatgaataaagtctttaagcagtcggattcctttagtcggatctgatggtaacctgagtagcaatccaaaaagctgagaagctcgcagccggctattgagtcaactacctggtcaatgcgaggcaacccaaaaggatctttgggacaggacttgctgaagttagtgtagtcaacacacatgcgccattgtcccgttttcttctgaaccaggattgagttggccagccagtcgggatgaaggacttccttgatgaagcctgctgctaacagcttagggagttcttccttgatcgtatccttcctatcctgtgcaaagcggcggagtcattgcttgattggcttagcgtcttccttaacatgtaaagagtgctcaatcacctctctaggaataccaggcatatcggatggtttccacgcaaagatatctttattattttgaagaaaggtgatgagcgcgctttcctatttacaatctaactcaacgcctattacagcagtcttagtaggattagagggatctagaggaattttcttggtcttggcttcgctttctccactctttgggatcttggttgcaggcacttctccttcacttg

SEQ ID NO: 12227 - DNA, 693 bp, Oryza sativa
tgacatgaagcaagtgttgaattatctcaagaaaaaggaacaagatgaccctgtaatgtactacaaattctagctagatgaagaaaacaaggtgacaagcctgttttggactgatggtagatcgactcagctatatgaggaatatggcgactgtatcagttttgacacaacgtttagaacaaacagatacaatgtgccatttgcaccgcttgttggggttacaggacatgggtcaacttgcttgtttggttggcatttttaggagatgaaacggcagagacattcaagtgggtttttgaaacatttataacagcaatgggagggaaacatcccaagactataattacagatcaagataatgccatgagatcagcaattgcacaggtttttcaaaacacaaagcacagaaactgtctatttcacatcaagaaaaattgcagagaaaagataggaagcatgttctctgcacaagcaaatagaaacctgtatgaggaatatgatgacatactaaacaattgcctaacagaagaagaaattgaagtgctttggcctcagatgattgaaaagttcagtttgcaaaatataaaatacttgcaactaatgtggaagaatagagctcagtttgtgcctgtctacttcaaatatgatttctgcccttttatacaaagcacagcgctgagtgagggaacaaat

SEQ ID NO: 12228 - DNA, 1277 bp, Oryza sativa
aacttggcctcaagtgcatcccgcatgtccttcccagaaggcatgtgcatgtacacgtccactatgttgtcagcgagtacactgatcaatgctccacggaacaggcaatccgaagcctcgaacttagcctctttctcaggagaaagaggtgggtcacttcgtttgccccgtgaaacatagaagcactgcatcgctgtcaaccacaatagtgcacgtgttttccatctcttatagtttggaccatcaaaggcatgtggtttcagtgcagcagcaaagccaactaccgaaaatgacctatcaggtttttggattgttggaaatttggtcataattcggcatattttaatccaaaataacaagataataaacatgatatttacaataggatttgatccagtgatagtggtgaatgtaatcaacatgagcatgcttaacgttgaataagcatcaacaatcacataatgacacaatgttgacattgcgatgaacattaacagtaaaacttctaattgaaataatgtaataaggttataccccaagaatggtcctccgctggagtttgaggcagtattgcctccgttggtgttgacgggagtctccttctccttgtctccagtgttcgacatgttggtgaagatgaagtagatgttgacgaacagtgagtagtcgcgccttgcgctccccaaaaacatgatcgcccgcccgtctgtgcaaacgtcgcagcaacgcgtggtttcggaggcctactctcccaacgcgtgtgcacacactcgttgggatgggattaccgtagcaacaacagctttggaaaatggatgaaagtgtgtcttctttttctcgcgggagatcaaatccattcccattttataagaggaatggaagatgaagagtaagagtcatggaataggaagaggaatggagcaactaattgtcatcaactagccatgaaccatccttcactacacaaccatcaaccaacaatcaattaagagtaattgatgtaagttaccaatggaataggaagaggaatagagcaactaaatgtcatcaactagccatgaaccatcctccactacacaaccatcaaccatccatcaattaggactaattgatataagttaccaattccttaatcaaatggattaattctcaaaactcttcatcccattgatatcccatagaagaatgaattcacatgaattcctagcataatgagccttggaatttatttgatttaattgatttaaatggattaattacccaattaaatctaacaa

SEQ ID NO: 12229 - DNA, 1808 bp, Oryza sativa
ccattttcttagcttttccatagggattaattggtaactgtaacagagtaaattattaaccaattaggtacataatatttacacatcagccttgagtttgcctttccagcaacaagatgaaatagcacagcacaatccaaacactgcagttttgaggccatcataaattaattacctgacgtgtggtttctacaataggcatcttctctggttctccataggtggcacatgtactagagtaaataagggtcttgactccatgagacgccatagcctccaaaatcaataaggtgttcgatgtaatattgtgatagtacctgttaaatacttaagattatcagagatatactagacatgtttcagatatattatacagttcatcatatctgtgatagcagataatataaatatctgagaactaaaaatcagaaagcacttgattatggagttaacattgtagcataccaagtaccatggattaatagtgaaaactgttttttatcataaggaccttttcccctagcactacaattaggccattagacaagggtgtgtacaatggtaacgtctgtaggggttagtagaataagaggtcccccaagctcatggaactgacaaactgtcaataaggtaatgacttacctaaggggttccaatgtactctcacccacataggcaacagcagcaaagtgcataacagcatcaaacgcattttcggcaaagatcttgttgacctgggagccagttaagtgaaaaactggcatttgaacattttaaaaattacgaggaggtaatttagaagtacaaaatgaggatacagttttttgatctccaagaatcagcatagataaactgaagtcttcctggctgggggaacaactcttggagaacctttactgctcccatgtttcctctagaaagattgtcctaaaaatcacaattaaccatcaagggtggcatttgaagaacaaaccagttcagaaattcagtacaaaggaaaacttaattaccacaatggtaactcgataattgtcctttaacaggcgtaatgaagcatgtgacccaatatagccagctcctcctgttactaagacatgagtaacaccaggttcatggcgagaaaactgcaagatacataaccccacaatcagttatacagttgaattaaaaataggggaaatataagaatggcataataataattgcagcataagaaacataacaggcggatttgcatgaagagttgaaagattaagcaacagaagtcaaaacagatggaacatatccaagtttagccatacacatactaggtctgcatcgcagcttatacatgtttctagacaacaaaagtaatgtgctatgtttgaccttcactctgcaacagtctcttaacattttattctaaagaactggatagttagcctgtagttttagagatgtgatatatttacatctgcaaatcatatcgtagttttcttgaacaggaacatgtcaaaattattatgcagattgattagctgtcagaaggtcttcgtggctgaaagctacagtttgttaggatgccatttaggcatcaacttgccgcaacgaaaagtggcaaacaacttatgaagatatgtgtattgaaatatcaagttggaacatgaactaatgtaatagacattgcaataacaaaggcaattggatggagagatgtcactttcctcacctgcttgttagcactgagagcagaaatgaagatatgtgtattgaaacaactacaatagcagtcatcattttgttttatgctagttatacaaggacatatt

SEQ ID NO: 12230 - DNA, 618 bp, Oryza sativa
ccaagtaaagttggcatttacaatgttggcactgtaagaggtttgacaatatgagctttctttatttactttgattaaatgcagttcgctcatgctaggacagaatcagattttaattaaatgctgcatttgttggttattttacatcaaatttttacgctggaatacacacagatggttattctggtagaataattttttattgtatgcttatgaaaaattgacttctcttgtcaaattatctccattctgcatttttactcatgcatttcttgtgctgtcaatagtatattctaatatatgtatgattgctttcaggtcgttcagtcaaggagtttgtggatgcctgcaaaaaggcaactggagtcaacattaaaattgagtaccttagcaggaggccaggggactaatgctgaagaaacaagtgacccaacaaagatcaacacggagctcaactggactgctcaatataccgacccttaaagaaagcctgtcagtcgtttgaagatggcaaaagtcacatccacgcggatatgggtcaaactaaatatagcttgctgatcaataatcctgctgaatcgtcgatatttgatttttttagttagtggtataggatct

SEQ ID NO: 12231 - DNA, 510 bp, Oryza sativa
gatcaagacgcgaccaaattaaaatatcagcaactaattaaccaattcaaacgataaaagaaaacgttaaataatatccgtctctcacacgatcttttgaagtactaattttatttcatatcctctggctaaaattcaattaaattaaaattgaggatttatcatttctaggtatcaacttttaaaacatctcctctccacttttcagttcatcaggtaagtccacacttgccgcaggtgagtcagtcgtggtgcttcgccataagtgcgccaacgtctttgcactctgggttaggacacatcagtcgtagcctctccaccttccccatcacgtcatcgacacgatagtgacggagcaccgcaagctcttccttgcggtgctcatgctttcccttcttaggtgtcgcgtacgccttcttctttcgcttcttgttgccgccgccgccaccacagatgcgaccgaggaggtgcagcgtcgactccttctgaataccatagtagattagcgtg

SEQ ID NO: 12232 - DNA, 1311 bp, Oryza sativa
  unsure (1)..(1311): unsure at all n locations
tataattcagctagctgcttctccagatgtttctagcttgtggtaggccggtctatctgaatttcgtacgctgcaggacaccaaacagagatcaacatttatgaaacagcaaagatctcgtacatgcccccatctccaagattatattgggtcatctggtgaaattaatctcctggcaaattaagtcaagatgcaccgtctgcaacacgaaatgtaatgttgacacgcaaatgctagaaaatgatttcagatatggtttatattaggacttgggagttgggacacgtatgttttatgttcagatagggtctattcagtcgtagagaagaaagtgaaattgcgagcagatctgcaaacatacattaaatgatgcatccagaagagttagaagtcatgacactactataagtcagattaagcttggattatttccagcgtttccttgcggtcgctgcacttgttttatccaagactaatactgtaaacaacttctggtttgattggaataaataaataaatattaggtatgacacgtatgtccacatcaaatcttcacgggccagcttccttccatcagatttgagaaaaaacataaccaatctggactaattccaagtcaatcgatttgactatagattaaaaaaacaatcacctagctgatcacacttatcctcgaatttcgaaaacacatttttctctaacctatataaaccctaccatggttagcaaaattccgtaacaaacatcgataatacaagatcataaaaagaaaaatgaagcctttccacatggccactctcgcggcgctcatggccgccgcggccgcggccgcgacggccgctggcgccgtgacgttcgatgcgacgaacacggcgtcgagcaccgccggcgggcagcggttcgaccgggaggtcggcgtggactacgcgaagcaggtgctcgccgacgcgtcgtccttcatctgggacgccttcgagcagcccggcgacggcggcgaccggaagccggtggacgcggtgaccctgaccgtggaggacatcgacggcgtggcgttcaccagcggcgacggcatccacctgagcgcgcggtacgtcggcggctacagctccagcttcggcgacgtgaggacggangtgaccggcgtgcttgtaccacgaggcgacgcacgtgtggcagtgggggctgcaggattacggggcgcattcgtgggtgtacgaggggatcgccgactttgtgcggctgcgcgccggctacccttgcggctggttgggtgcagccggggcaagggaacagctgggaggacagctactc

SEQ ID NO: 12233 - DNA, 723 bp, Oryza sativa
atatattttggtgggaacgggaaaaaggttgggttcatagatagcgaggctcccagtgcgaagtcgacccctgcaacgtttaaggttgttgcagaaaaggtttgcagaatgagaagcaaaagcagtataccctaaagttcgtggtcatgcctacttttgcatggatctcatatatgaatactctttgctcgttgatggcttgggaacataaaaatgtttatataggacataaatgttcgataatataattgacatgagtgcactaatatatatttttggtgatcaggtctggatccaaataagaagataatgctggtaaacaaggtgaagcatggggagtactacattgacgcggcttggccattgggtacagctattgaagctgtatcacccaaaaaagggcttcaatagattgatatgaacgattttaagatctactactccctttgtccaataatatggtaattgaatactaaatggaacatattgtagtacaacgaatctaaacagatcttttatccaaattcatagtaataaaatacatatcatttgatctgatgttagtagatctcagatttatatattttaggatggatgtagtacttacttagaaagttaggatatctaatgttgtatgatcgatgtttatatgatggttattatagtaacagagtaacatacactatgttaatagtggagctagctagcagaatacatcaaggc

SEQ ID NO: 12234 - DNA, 619 bp, Oryza sativa
agttcttctacaacaacagcttttattttagcctgaagatgtcccccaatgaagcattgtttggtccaccatgacggacgccgctgatgtggtctaagacaggtgaatgagcggtctttggacctgacattatcaacgaggccgtatagaaagttcgcctgattcgagaccggttaaaggtagcacaatcacgacaaaagagttacaccgacacccgaagaaaaaacctggcatttaatgaaggagattacgtttatctaaaggtttcttccatgaggggaaccaaaaggtttaacgtcaaaggaaaactggcaccaagatatgtgggaccattccagatcatcgccagacgaagagaagctgcataccagttacagctagcagaaaatatcgccgatgagcatgcaatcttccatgtgtcccaattaaagaaatgcttacaagtgccagaagaacaagcttcgttcgaggaaattcacatttgcaatgatctgacgtatccagaacacccaattccgatattggatgaagctggaaagaggactaaaaccaaactctggcgtatgtacaaagtacgatggagtaatcacactgaagatgaacccacctgcgaaagcga

SEQ ID NO: 12235 - DNA, 886 bp, Oryza sativa
atttgtccagtgtactagaatttgtccagtggagactttacaaaattttccatatgcttgatagactcattaaagcttaatcattatgcccacactttggttgcatttaatatttatgcatttatagtcttatgttttgaccagcaaaggtgaccaaaaagtaaggaagtgaaagcggagcagtggaggccaccatcccttctctgcaacacatcaacttggcatggcagattcaatgcttagcacggttccttcatggctccccgtagggtaagtgacttaactttccgtcgttcataattttgacgtagttgtatgcgtggagatcattttggttgatagatacatacattgatagatacatactattgtgttcatccacaggatggaccccttaactacatatttgttggaaatcaaactagccggggatcgaaaaaatgctagggtggaatatgattggtttattttcagtaaagtgatagactcaaatgcgatgtgctacaaagactttattgatgatattgcgaagtcatatccatgggggccaaatgaaactgtcacagttggctacgtggatatggttcataaaattactcatcatgtcacaactgaccaggatatgcttgcaatgtttgaaaagtttgttgatatcaaggtgattccaatgattattcgcatacatggtattaatgaaagtattgatgagttagaccacactcttgttaaagcaagcgcatgtgatcccgatactccttctttggcaaccccatctcaagtggatttcagccaacctagcagcagcactcttccttctcatgtcattgtgccatcagacacatacttagtaaacccattttctatggctgaacatgttggtgttgat

SEQ ID NO: 12236 - DNA, 1439 bp, Oryza sativa
tgtccggcgatgtagagcgtgtcaattccacgccaagcaaatccatcagccggcccaggccctgcagaccataccactttcgtggccatttgctgtctggggactcgatatcctgggaccgtttaggcgggccccgggcgggtttgagtatctgtatgtcgcgatcgacaagttcactaagtggcccgaggcttatccggtcgtcaagatcgataagcactccgcacttaaattcattaagggcatcacggcccggtttggagtggctaaccgtattattacggataatggcacacaattcactagtgaactcttcggcgactactgcgaagacatgggcatcaagctctgcttcgcctcacctgcccaccccagaagcaatggccaagtggagcgcgccaatgcggaaatcctcaaaggccttaaaaccaagaccttcaacatactcaagaagcacggcgattcatggatcgaggagttgccagcggtgctctgggcaaaccgaactacaccaagccgagcaaccggggaaacgcctttcttcctcgtctacggcgcggaagcggttctcccatctgagctcaccctgaagtctcctcgggccaccatgtactgcgaggctgatcaagatcagcttcgcagagatgacctcgactacttggaagagcgaaggcggcgcgcggccctccgagccgcgcgctaccagcagagcctgcggcgctaccatcagcgtcacgtccgggcccgatcactctgcgtcgacgacctcgtcctacgctgcgtccaaacgcgtgctggattgagcaagctctcaccaatgtgggagggtccgtatcgagtggtcggcgtcccccggccgggctccatacggctggccacgggcgacggcactgagctgcctaacccgtggaacatcgaacaccttcgtcgcttctacccctgaggggggggtcgggtgtcaggtttcgggctcgggccaaccccgcaccccctcgggcgtgcagggttggccgggggctgccacacatgcactttcttatttctcttatttcagtatttcaataaaagcagtttcaatttcctaaaggctgtatctgtgctgttttttccttttgaagaatcttgacttgaaataggtcactcgtgctcaatcctgccctcgggggctcgggtcggctaaaatcgccaaacggggcccagaaccgagccgtgccccggggcgtggtgaactccgggggggaatcggcaaaaacccacaatcgggtcacccataaccctcggtcaccacgttcccggcctggccagtctcgacatgtggatctccccaggcactagccccgacccgcgccttttgaggactgggacctgggcacgaacccttaatcaagctaagacacaaaaggaccacggcacagatcatcctcatctcatacacacag

SEQ ID NO: 12237 - DNA, 1030 bp, Oryza sativa
gattccacgtcgtatctgctcccggcgaaagtggaggtagttgtggcccgtcccatcaaaaggtgactcggacgacaacgatacaaatctccgtccatttatgaaaaggtgggggaagtccccacaaaaaagagggaaatggtgcatgtggtatccccttaagatataaaaggaggaccttgcccacttagatgggaggtttttttggactggacttttccagattaggaacccagaacaagggagaggctggctcatactttgtagctccttcacacacgaatccaccaaaacacaggagtagggtattacgcttctcagcggcccgaacctgtatacatcgccggcgtcttgtgtgcttcctgtctcgcgaaccttccacagattgggagcttagagtctcacccagggtccccggccgaaccggcaaaggggggccagcgcggtctcccgatgaggagccccacgctccgtcagatctagattcatagtactagaatgtgccacatgctcatggtaccagggagggagtattgttatactagtactgtactaactagaaaactgaatgaaaaagtatgcaactatgcatgcattagtcatcagtgtgtgaattgaccattgttggtagtcttagtacagtcaatggctactgaactgcgattgatcatgctactactccttagtgtattagcttgtctagctagccaattaaaccggctgctatactgtagtacactgttattgttaaagcctgcaactttcttaaataaaaggctgaacagaagcagagagcaagcccatttactcgtgcttgctgtgttgttagtgatggcatttgtaggtgatgcagactgtacaatcacgagcagtattgttcaatgaatgaacacacagcagtatgtaggcagagtatgtgtacttggtgcatttgtagttgatgactgatgaacagagacagttctggcctggtatgcgagcgaatcgtgaagatattcattgctgtcgttgagctcaggtgataggggga

SEQ ID NO: 12238 - DNA, 2599 bp, Oryza sativa
aatcaaacgttcataaaccaaagtaagcaaggctcgaatttagatgtcatatgtgccattgttgtattcttttcttaagggttcaaatttggaaacacgtacgttcaatgcatatgcgttgtttcgattttagttcaaattgcaggggaacaaaatgtgtgccaactgtcttcttggttgattatgttatgccactcttttcttggttgtgcatgaacaactaagcaattacttaaatcaaactatatgtgtcatgcttttgttgttatgtaattaatgagcaaatatattattttaattattcaattccaagcatcaaacctataaatgtccattcttaattcaaaatccagactcataaataatgatggaagacactattactttaacgagtagaatgcactgctctatgtagaaaccttaggtgtaatcaataaatcactaaacaatactaacacattgttttttttacacacaactaaactcccaattcatgttgaatagtccactaactttgtgtagaaaagtctaaaaatatagggaaataacaaaagtcaaatcccacatgaaagtaacgcacagagcaataaaactaaaacttgggtcaagcattgaagaatgagccaaaaaaaaggggaaaccgcccactttccctcttcccaaagccaagcgaaccatgctatttaatccactacactatttgtgagccttttacaactgtgctcccactccgctccactccactagttttttccattccctgtgtccccttttcagatctccctttccctctccaagaaaagaaaccatcaaagaatacgcaacgagataggggggagtggctactatcaatctccatgggcgcctatgaggccaccaaggtggtttttgcccggttgcaagcgcttgagcccaatcttgctccaaacatcattggcatgctcctcaccaaggataacaatgagatggacatgattcatctcgcatgtggccctgacaacctcctccaatctatcattgccaaggtgcgcaccgacctcaccaacaagccttcccctcctatggcctcctggggcttcccgtccgatataggtgaggaggcatctttctccattgacaaggtggggtgtgatggaggtgaagagttctcctctaaggagtatgattggaagttaccaatcggtggcaatcaccatcggagctttttgtcaagcaccgtcaacacccctgggtggaagccatgtctatactaccaaaggttccatcttcaaccctataatatcacatttcttagatccacacactaatctctattgtaccagcggaatgaccacccatcttggtagcgacgacatgcaagagtactcttctcgaccacctcagatagaccaaagtgacctaaccaacaactgcagtgcacgacagatctacttgaccttcccgcctgattccattttcagcaaagaggatgtctgcaactactttaggtatcacatgttccaccatagtgcccctattgatgtgtcttgtttcaatattggagcatttcataatttaatgaatgcaatctgttttggcttgtttgtgttgtgtggggacaaccagcatgtatgggatggtgcaagatgtgcgtatcccataccaggagaagcgcatgtttggttttgtcaccttcgcctaccaaaagacagtgaagctaattcttgccaagggcaacccacattacatctgtgatgcacgtgttcttgtcaagccatacaaggagaaggacaaggtccccaacaagttcaggcatgttaatcattgcctaattccactttgtatttttgcacatatattaccttttgtgagtacttctattgtttttcttaaaaattgcataaagtctattgattttattaaaattgcagaaagtttcagcaaagtgactctcctagctacatgaatcacaatagattgctttattctagggtgccctttgacctgcgacgacaccaaataggtgagcagtgatatctatgtggtgcttgtgttttgatctcttttttttaacaatttacaaggagtgttacattgtgttagggccgagaattttgtatagggacatggctagtcatgaggcatcttttaggatgaagcaagatgaacaacaacatgcgaccgagctgcaacgtcgttgcttaatgaggcttccgcttctcaatcttcaggattggggccatcatctcagctctcccatgggttcacatgtgcttctaggacaagttgataacaaatataatattaatgagaatgacaatcccattcatttggaggatgtcacattttgaggtctagttcttggtcgttgtaatgtcttgtctattaattatgttttttcggaaagtttattaattatgttgtactaaggttgtgacttcttgttttatttatagacaataagctgaagaatgagtttgctatgagggaaattgcctctactgcaatctccacagaagccaagcgcacggtcatctctacggaagaggggaagagagaatatggtcccaaggcagcaacacctaatgatgcttgtggattcctggaaaggtaagatgat

SEQ ID NO: 12239 - DNA, 1005 bp, Oryza sativa
tggggctcctcaccgggagaccgcgcaggcccccctttgccggttcggccgggggcgctaagtgaggttcttcaccctcgatctgtggaatgttcgcgagagagcaaatgcacaagacacgggcgatgtagataggttcgggccgctgagaagcgtaataccctactcctgtgttctggtggatctgtgtgtgaaagagttacagagagccggagagcaagagagttcaggctttagaacccctcttcctctttctctcctctacgagctcaggtattctcagagtcgtctgagagtctctcccttttttttctcgtccccttgcttcggtgggcaaggtcctccttttatatctcaaggggataccacatgcaccatttttacctactcttcttttggatggggacccaccctatcttgaccaaaacttggctcgcgccttcgcctggaagctaaatcacagcttgtccttgagtgaggccttgcgccgtcactcgcctgacacaggggatagccctgtcattccttcattaatgggtggagatttgcaatggccgctgtccgaatgaccctccgatgggatgggtcatacctacctccactccgccggaagcagatgcaacgtgggagcacggttgtctgccgatgacgtgaccggcgtcagaccagtcacaaaccagtcattcttgtctaccacgtgtcagtttagcatgccacacgtctgcccttcttcatacaatgacttccttgtaatggttgcgatgaagcctggtatgaatctggccgggactgacatacccactccaggagctagcacgccggctccggctagggacgagtgcctagaggctatcatcatttcgacgtgacggggcgaggcgtgtgacaggccgcctgttgccacctaacccgcgatctgaccggtctgtgaccggtcacacactgcgactggtcacggaccggataagcgcgcactgcgccgcattaaatgcggcgtgacgcgct

SEQ ID NO: 12240 - DNA, 5427 bp, Oryza sativa
  unsure (1)..(5427): unsure at all n locations
tccttgctaaaatccagcgcacaagctctcagcatgtcctctaggacctggttggttctctccgtctggccatctgtctgtggatgataagctgtgctaaacgcaaggtaacttcctagggcttcatggactttctcccagaaatgtgaggtaaactgtgtgcctcgatcagatataatcctcttaggtacaccatgaagacatactattctggtcatgtataactctgctagcttggcactgctgtaatttgtcttaacggggatgaacctcgccgtcnnnnnnnnnnnnnnnnnnnnnnnnnaaatggaatcatatcctgttgcggtcttgggcaatccaacaataaaatccatacctatctcatcccatttccactcgggaatcctaaggggttgcagcaaacctgccggtctctagtgctcagccttcaccttctggcacacgtcacagagtgctacgtattctgccacatctctcttcatgttgggccaccagtatacttccttcagatcctggtacatttttgtacttccggggtgcaatgaatatgccgattcgtgagcttcctttagaattaatcccctcagtccaccctgtttgggtacataaatcctctttttataccataggacatccttctcgtcggttgaaaattcctttgcaaatcctgcagctagacgttccttcacctctcggatttcctcgttgtctttctgagcctcttctatttgggttctcagaagaggttgaatgtccagggtgtttacctgccctcgaggcactatatgtagatttagctgggccaattcctctttaagctcaggtgccatcccttccatttccaaatgattgcaatggctcttacggctcaaggcgtcggccacaacgtttgctttgccggggtgatagtgaacctcgagatcgtagtccttgattaattccagccaccgtctttgcctcaagttcagatccgactggataaaaatatacttcagactcttgtggtcggtgtagatatcgcaatggtttccaatcagataatgtctccaaatctttagcgcatgaaccacagctgcgagttctaggtcatgggtagggtagttttcctcatgtggtcgcaattgtcgcgaacctcgagatcgtagtccttgattaattccagccaccgtctttgcctcaagttcagatccgactgggtgaagatatacttcagattcttgtggtcggtgtagatatcgcaatggtttccaatcagataatgtctccaaatatttagcgcatgaaccacagctgcgagttctaggtcatgggtagggtagttttcctcatgtggtcgcaattgtcgcgacgcataggccacaacctttccatcctgcatcagtactcctcctagtccttgccttgatgcatcacaatatataacaaagtccttcctgatgtcgggaagaactagaataggtgccgatgtcagcttctctttgagttgctcaaagctttcctggcactgttctgaccacacaaacttcttctcctttttgagtagttgtgtcattggccgggctatctttgagaacccctcgataaaccttcggtagtatccaaccaagcctagaaaactccgaatttcggtcaccgacttgggtgctttccattccataacggcctccacttttgcagggtccactgctactccaccggctgagattacgtgacccagaaaagcgacttccttcaaccaaaattcgcacttgctgaattttgcgtataacttgtgctttcggagtttctggagtaccaatcgtaagtgttccgcatgttcttcctcatctttggagtagatcagaatgtcatcgatgaataccaccacaaacttatccaagtagtccatgaatactttgttcataagattcatgaagtatgctggggcattggttagaccaaacgacattactgtgaattcatacaacccatagcgtgttgataacgcggttttggggatatcctcggtcctaatcttcagttggtggtatcctgatcgaaggtctatctttgaaaacatcttagctcccttaagttgatcgaagagatcatcaatccttggtagtgggtatttgttcttaatagttacttcgttcagtgatcggtagtctacacacattctcatgctaccgtctttcttcttaacaaatagcactggggctccccaaggtgacgaactggggcgtacaaatcccttttcttgcaactccctaatttgctttttaagttcttctaactcattgaccggcatccgatatggtctcttggatatgggggccgttccgggtatcaggtcaataatgaactctatgtcacgatttggtggcattccaggtaaatcttctgggaacacatcaggaaatcgctgcactacgggcattccctttaggggtagcatggtaaatatacctccgacacgttcggttagcctaggatcttgatccatggttgctctcatatccgatccccagggtgtggtcagggtaacttctctacgtctacagtcaattactcctctatgctttgctaaccaatccatagccaaaatgacatcaagagtttgtggtatcaaaaccataaggttggagggaaacaccacatccctaaggcgaataggtacgtcaatgcaagctgtgtccacggctatttcacccccaggtgaatgtactaacattggttgccttagtttaactctggttaaattgtgttgttgacttgctttcagagatataaataaatacgatgctcctgaatcgaagagaactttaactggagtggagttgagtgaaaacatacccattagcacgccttggtcctcctgggcctcttcagctcgaacgtggttcacttgcccgcgtccaaatccggtagcggtcctgttagtctgcggagtcctgaatagacctcgtctaacagcaggggtagtagtcccgtgaatagccgttgcattagctccggtgcgaataggtgtcttgtttggatgggggcatttgttggcaaaatgcccatactccccacagttgaaacagcttcctggccttactggtccagtggcggcctgattcggtgcaggagctcggttttgaatggtaaccggcctgtggagattgccggaggcggcaggtcgactggttgtcaccactgttggtctccatgccgaagaggttgcccctttaggacgctggggtgccggtctggggcgggcggttcatggcaagccttcttttacgattgtgctccacgatcttccggtcgttttccagcctaacgaccttattgattaaactctggaaactatcgtggtcttgtccaatcatgggcccgcgcaactcgtcattcaagccttcaatgaatttgtcgatcgtttcctcctcgtcggcaagatctctagtcgcgtagcgcgctagctgagtgaaacggtttaggtactcttgtactgtggtattcccttgccgtagtctcctgaactcattcttcttcatcagcatcaccgcggcaggcacgaagttgtcacggaaggctgtggtaaattcctcccaatttggttctccagcatcttcttctcgggctcctttgtatgtgtcccacgagtctccggctggtccttccaattggtttgccgcaaagatcactttatcggcctcacgtactcgaacaagagttagcttcttctcaatgatccttaaccaatcttcagcatccataggttcttcagctgtggcgaatgtgggtggcttggtcctcataaactctccaaagcttgatccacagcggttgccttggttatttgcaatggcttgcaaaagttgggtttgggtggccataactccggccagggtggttaggtcaggtgtctcagtttcttcattgctggttgacgcccaacgtcggcttgccatctgtgtaggttgatggaataagtatcctaattttctaactagctcttatggttctatcccattaagggagttattttggtgtgaactttgtttcgcaagcatggtggaataaactcatttataacacaacagcaataatatcgtaaataacatcacagagttccacaaatagtacataaatcatgatgcaatcgactgcacacatacgcagtccaaataaggttcatccaaaagatacatcaaactaaccatctagctactcgtcaatctaggtaaggagggggggtgtgtgtctcgcatactatccaaaaaccatctgatacgagatcgaagttgcaaggagtccgtcagtctagtcctctagccatccgcaggatcctggggcaggtagagggtggtcgctggcacgcgcaaacctgagtccccacggctcagaagtagtgacctctggatctagcttgggcctcttgcccggaggtcgtgtgctcttgcgagcagtgctgagggtgcgagggcctccgaggaaggtgatgcggggaacaggggtctcatcctctgaaggatcagtgatgtctggctcgatctctggctcggtgtcggtcccctctgtctcggagtcgacctggatcggagtctccaaactggaacccagctgtggagaaggtgtagggatcagtggagtgtgtatcatctccgggacaggtggctgtgtcgttgccgggtccactaggtaaggtgctgcctcggtagctagcatactagcctctcccagaagagcgtggaatgctggtgggtacggcggggtaaggaagaagtagcggtcacggcctacttttcaactacaaagttgtaggtcgcgtcgagggctacaattttgatataaagtttgtcttcattagagttcacatgaaaaaattatgaattattttttatataaagtttttagaccgtcatgtttagggaccggggtgacacaattgaataagttggaggacctaaacgagtgatctgcaagtttagagaccgggatgacacaatcgaataagtttgaggacctaaacggtcgatttgcgagtttagggaccgggatgacacaacggtacaagtttagggaccggtgatggactttactctatacaataacttttcctggcggaaaagccatcaccccaagccatatgattaaaattgttctttggtggatacgtgaccttgatgatttttttttgaaagttcaaaccttgaaaatcttaaatccgagcacaatcccattttgacaggttgattcataaatcatcaaaattctttacaagtgtgcagaagttttatatcatgcatttcctattgaattctgtgatcgtccgttctcatccatataccatctgtttaatctctctcgagtaatctctacctgaaaaaattaaacatgaagcacatcattaaatgagaaaaatatgctcttctaatgacccatgaattttctaga

SEQ ID NO: 12241 - DNA, 2807 bp, Oryza sativa
gccgtcaacccgcaaggagtattcgtagataagatccatgcataagtaggcatgatcacgaacgttggggtattctacttttgcttctttgacactcagtttacaagccttttctgcaacagccttaaacgttgcaggggtcgactttgcactgggtgcatcgctgtcgatgaacccaacctttatcccggtccgatcaaaatgtatgcattggagataaaattatcaagtaaaaatattaatttatatatgtaacataattatacaaataattaaatgcacatatttaggggtatatatttacataactagtcagctagtagccagtctgaagcatgcctgagaagttaaataatttagctggctaattaattaagtaatcacgacgtacatgggaagctatgtagtagaaggcggacgcaacgtagaggtcatcctgccctgctccgccaccaccgttccagacgccgttgaagctgcagttcttggtttcgcagggcgcattcaccttcagtaacttcactacttcttctctgcacttgtggtagtctgcaccttgtggtgcggtcgttgcatcgtactgtttgtcgttgtaggtgtagttaccttgtttttgccaaatcaacaaaacaaattaaatctcacttggttcattaagcactaaacgttaattgattatatgaatcttaaaggattaaagggtcgatgcgtatagtaaacagaacaagtaataaggtagtatctagttaccactgaatccgcgcagcatgcagttgctaaatggtccatcctttctctccaggatctgcacgcgagaagcaaaaccgccatagtgcaaatagctgcaaattgttgattgatcttagtaaactacggttcaaaagactatatatgcattattttccatattttctacagtaagttcagatattaacaggctacagcctacaggcttcagtagttcagtttatttagtattcactagtacaatgtgtgcaacaaatgaattaatgttgcactttctaagtagtatattattcaccagcttgcagtggatcaagatataaaattaaacaaagatcaaattatacttaacaagagcatgaacttattaattgacctgtgcacataaatgttataatcttttcccttgagatactccttcacaacatagggatcttttccttcgggcacctttggagcgttagcagcggtgtttgataacatggcgtatgccatttgtacggatccacctccaagatcaaccacccctacggttttaaagtagtctcctcccaatttatccaggagataattcagagcaacccacatgtatgatccttcctgggatccctcaagaacgttgatccagttcgggttacactgatatttgctcttggtgtggactacatccctaacatgtattaagacccagagtactaattaaagagattattaagaataaaaatttattaagaatcaaagcaagaaatggttttgagttaaaaaaattgtatgatatgatgtatatcattgtggaattgcacgtaccgcttcaagaatttggttcgccttttcatctccaataagtctgagtccggcagttgcctagtacatgtttgattgaattaacaaagaacaaaatttagagagtacaaaaggtcaggccattttgtttcaggccattttgtttcagaggaaacatatcatcattaacattttgtcagtagttttaagaaactatttcgtcagataaaccatcatacggaaacatccgtacgtattagtaattttaaatttaagttcccgatgcaggtttcgtttaataattagataaagagcaaatcaatttagttgtgtacgtaccccaagtttaaggggagttttgttcataagtctggtaggaacaacggtgttggccttgtcaagcagaggcaatatggagtttgcggcatcctgaggacgtccagcgtaggagctcagcccaggatccacctacaacaacacacaaattaattagtcagtcagtagtaggattaaaatagctcaattaagtaggtagtaacgaatcgggatcatctagagtcgacctgcaggcgttcaagcttataaaactttctagcattgcccatattcatatatatgttaatgaatctagacttatatgtgtgcctagattcattagcatatatataaatgtagataatgctagaaagtcttataacctgaaacggaggtagtaggttagattaatgtggttaccttagcgaagagctcgatgtcgtcgccgaccttgaggaggtccagcttgttgtcgaacctgaagacgtgcacccgtgtgccggtgctgccggcgtccaatatcacggcgtacctccccggccccgctgcctgcccttccacgacgccgcctttctggccgagcaccgccgtgtcgtcagcaacggccggcggcgacaaagccagcaggagaagcatggccacgacaaggtgatcagccgccattgctaactagacaaggtgaggcgcaggtgctcatcaacagaatgcaaggggcaggttttaaagggagagggggaattaatggattactaacgtggagtttactctgcataattcagtccctaatcacagtgtccacccattagcatagtacaataatcaatcaacttttacacgggaccatgcatgctgcaaagtttcactgtgaatccacatgtgtaatcctagtgcgctagctttattgcttttgattgattagacgaactgttctttggtgcccagcgtgaaacacgatgattctatct

SEQ ID NO: 12242 - DNA, 556 bp, Oryza sativa
ttccttctccggtgaaatcaattgaggggaaatgtttcccgagatcttctctacctttttccttttggaatcgatcgccaattcggttggaaatccgtggattcgagttcgattcggatcgatctctctcctccgaaccctaaactttccttcgcgtcgccggtcgccgtgggccttcgccgccgcctccttgcccctataaaaggacccccggtgtctccgctacccgccgccaccctcgccttcgcctctcgtcgcctgtagagccctagcgccgtgccgcttagcgccaccgtcgccgccgttcgtccagccgtgcgccgccgtcgctctggtcgtcgtcgccgctcgggaaggccaccgtcgggttcgccaagtcgtcgccgtcctcgtcccgtcctccttttttgccgtaggtcgccggagcaccgccgtccgttgatcttccgactttgttttggtcacccgtgagttcgccgtgtcgccctctacgtgttggtgtcctgtgttcgcgccgtcgcgccatcgttcgccggagagcttgcacgcccgagcc

SEQ ID NO: 12243 - DNA, 7329 bp, Oryza sativa
tccccacccatgtggaaaacaacatgcagcacttaatggcagttcagatacaaatcttgcaaggattagccgcagccgtagccggttatcagcacaatgcgcatggaaatggccaccctcacatgggcaataatagatccaagctgacagattttctgaggtctcgtccgccagagttctctcagaccgtcgagcccgtcgaggctgacgattggctgaaagatgttgatagaaaactcaacttggtgcagtgtactccggttgagaagacgctctacgcctctcaccagctaagaggacctactgcagattggtgggagaattactgtaatgcataccctgaacccactaacattgcttgggatgagtttgctacggctttccgtgcagctcatgtgcctgaaagcaccattgacatgaagaaagaggaattcaacagacttaagcaaggcaacagcagtgtcaatgagtacctaagtatgttcaacaagttggctcggtacgcccctgaggaagtggacacagataagaagaagatcaggaaattcttgaaaggaatcgcggttggaatgagactccagttgcttgctcacgacttccccacttttcaacatatgatcaacaaggcacttctacttgaggatgccagaaaagaggctaccgaagaatacaagaaacgcaagtctaaccatcagggaaattcctcccgaggcgcacctcgccctcgctacggtcaacccatgcaataccaccagtcggtcactcaggctaaccgccagccaggctacgccccttgtcctcaaatgaaccgtccggcacctcagccacagcagcgtgcccctagtggcaatactgcgccaaacagtgttacctctttcaagtcaccgcaaggaccgtcagctgttcagtgtttccggtgcaaccagatgggccactatgccagacagtgccctcagaatcctaccaacaccagctcacggcatgctaatggcagcactgccagaactcctactccagcggcagctcagtctcgtcctagctctcaggcaagtggacaaggtacttgtgcttccaacaactttggtcgaggccgggtgaaccacattcaagctgagaccgctcaggatgctccagacgttgtgatgggtatgttctctgtcaactccgtacccgcaatagttctgtttgattcaggagcttcccattctttcatatcacaagcttttgtgaaaagaaatggttggaaaacccaaaatttacgtgtaccaatgatagtacattcccctgggaggaatataagggcaactcaaatatgcccggaagttaaccttagaattgaggaagttgacttcctagccaaaccgatagtcctagactcgcaaagcttggacatcatcctagggatggattggttggctaagcacaaaggacagatagattgtgccgaaaagtccatcaccttgcaaggacctggaggaaagcaagtccgttttacctctaacacccctaccgcaagtcggtctatcttaacctgtttacaagtcacctccttggagtcggtgcccgtagtctgtgaatatcccgacgtatttccagaagaattaacgagtatgccaccagaccgagagattgagttcgccatagaactggcaccaggcaccgcaccaattgcaaaaagaccctaccgaatggtagccaatgagctagcagaagttaaaagacaaatcgaagaattgaagagtaaaggttatgtgcgacctagctcatccccttggggagccccagtgcttctggttaagaagaaggatggctctgagagaatgataatcgactatagagccctgaatgaagtgactataaagaacaagtacccgttgccacggattgacgatttgttcgatcaacttaaaggagcaagagttttctcaaagattgacttaagatcaggttaccaccaattgaaaatcagatctgaagatatcccgaagactgctttctcaacgcgttatggtctatatgagttcacagtgatgtccttcggactcaccaatgccccagcattcttcatgaacttaatgaacaaaatctttatggaatagctggaccagtttgtcgtggtgttcatcgatgacatcctgatatactccaagaatgaggaagaacatgctgaacacctgaggctaataatggaaaagctcagggatcatcaactattcgctaaattctcgaaatgcgaattctggttagaccgagaagcattccttggacacgtgatctcctccaacggtgtcgatgtagatcccagcaaggttgaagctgtacttgcttggaacccgcccaagaacgtgttagagattcgcagcctccttggcttagctggatattatcgaagattcattgaaggattctctaagctagtcagacctatgaccgagctgttaaagaaggaaaagaagtttcactggtctgcagcctgtgaagacagctttcaagaaatgaagaaaaggttgaccactgccccagttctcaccttgccagatatccgaaaagatttcgagatcttctgtgatgcatcaagacaaggcttaggatgtgtcctaatgcaagaacgaaaggttgtggcctatgcattcaggcagctcaggcctcatgaagtcaactatcccacccatgatctcgagttggcagccgtgtttcatgctcttaagatctggaggcactatttaatcgggaacagatgtgaagtatacactgatcacaaaagtcttaagtatatcttcactcagaccaaattaaatatgaggcagagaagatggttggaactaatcaaggattacgatcttggaattcattaccaccccggtaaagctaatgtggtcgctgatgcgctaagtcgcaaggcctattgcaatgtagctcaaatacggcctgaccaagatcgcctgtgcagagaattggagaagttgaggctgaccgtggtacagtcaggtgtccctgccagcttgacagtacagcctaccctagagtcgcaaatccgggaagctcagaaagacgacgaagggataaaagagttaataaaaagaatacaggagaagaaagacaccaatttctccatagacgatcaaggcacagtttggtgcggtccacgcatctgtgtaccggccaagaaggaattaagagatctcatcctaaaggaagctcatgagtccgcctactccattcatccaggaagtacgaagatgtaccaagatatcaaggcatacttctggtggactggaatgaagcgagatgtcgcagaatacgtagccttgtgtgacatttgccaaagagtcaaggcagagcaccagaggccagctggtctgctacagcccctaccaattcccgagtggaaatgggaagaaatcggaatgtatttcatcaccggtttgccaagaacccctagcgggtacgactccatctgggtaatcgtggatcgactcacgaaatcggctcatttcgtgccagtgaaaaccatctttgatggaaagaaactagcagaactctacatgacccatgtcgtatgtagatttggctgtcccaagaagatcgtgtcagaccgaggcactcagttcacctcaaggttctggaaacagttgcatgaagctctcggaaccgatctaaattttagtacagcctaccatccgcagaccgatggtcagaccgaaagggtaaaccaaatcctagaagacatgctacgtgcgtgtgccctggatttcgaaggcacttgggatcgttgtttgccgtatgctgagttctcatacaacaacagttaccaggccagtattcagatgtcgccgaatgaggcaatgttcggaagaaagtgccgcacccccttgtgctggaatgaggtgggcgaagcgctggtattcggtcctgacatactcaaggcagcagaagaacaagttaagctgatccgagaacgtttaaagacagcgcagaaccgccaaaagaattacgctgacaatcggaggcgtgaccttgagttcgaaaaaggagatcatgtgtacctgcgggtatcacctctccgtggtatgaggaggtttgggatgtccggcaagttagcaccccgctacatcggcccctaccttataaccgccagacgtggcgaagtggcttaccagcttgagttacctgaaggtctcgcagatgtgcacaacgtgttccacgtatcccagttaaagaaatgtcttcgagttccagaagaacaagtccccctgggtaacatcgagctggaaaagaatctgacctacaaggaaagaccgatcaaggttcttgaagaggcagtacgtcagactcgaaggaagaccattaagttctacaaagtccaatggagcaaccactctgaagatgaggcaacctgggagcgagaagatcttctccgcgccgagttcccggagctgctcccttaggtgctgaatctcggggtcgagattcttgttaggggggttggtctgtaacgcccgttccgtcgtggcgcctagcgggaaaattatctcttaaaaaccctagttgcgaaatttgtttctttgcttgttgtctagtgtccgtgccatctcaagatctcaaatccccgatctatcgtcgagttcaattccgaatccaaatccttccaaatcaaattcctccgcaaaagtctattttgtctcccccagggtcgatgggccgaatttctctcggcccatctccccccttcctcccggctatctctctcgctctctctctctctctctctccccctccccctccgctccgcccgcgcgccgcgcgcgcgtgcgcgtgagccgccgagccgagccctcctctttgctccctcgctgccgctccccgcgcgtcgttcgcgcgcgcgcccgcgtggtcgtcgcccgcgtcgcgcctacgccgtctgcgccgcccggccccgctgctctgccgcgcctgcagccgctcggccccacagccagcgcgcgtgcccgagccgcgccgctcaatccgccgcgcctcccattgcatcccgcgcgcgcgtgccgtggtggccgaccgcctggtcaccgtcgccatcaccctctgccgcgccagcccgcacctgtcgcccgtgtcgccgctccgctccaaaccgtcccgccgtcatcgccgtcgtcatcgcctcggccccgccactccgcgcgcaagccgccaagggacggaggcagagcccctcctccctctgccgcgacgccccgctcccctcctccttttcccaaagcggcaaggaggcaaacccctttctctccctccttttcccctttttctcccgccggcgttatcctccctccgtcctgtcgccgatttggccgcgagcgccgagcgccagctcgcgccttgaccgcccaaagtcggtttccaaaccgacattgccgcccttaaagccccaggcgccctcccttcctctttccccccccaatcctccccgtttctcgtccgcgccattgccgccgcctcccgtgctctgtctcgcctccgccgttcatcgccgagcgccgggagagccggtgcgttcgaggacgcgaaaggggactccgggcgctcgtcttcttcctcttccccggcccgaggccggagagattactcccgcgccgtcggcctctcgtcactgcgccccgcccgcacggtagtgcctccctccgttcttcctcctcggtccatctcccccccttagttttcggtggtagcatgagtagcctccccgtagctagccggcgccgccccgaccgttgccgtcgctcgccgtgtgctccccgccgtcgctgcccgagctccgtagcacccgctcgtcgccggcctcgctcggcgtagctccgcccaatccgacgctagcatcggattcccgtagccgcgtagatgctctcgccgccgggaattggcccctcgtgacctcgtcgccgtttcccccttttccctccgccgggcgccgccgccgcaatccgccgccgacggactccctccggcgaatccaagccgttggctcgctcgctcttattctccctcgtcatcccggtgtacgccccgtcgcccctcatcgtcgcaaggcgtcccggagaaaccgccgccgcccgcggtccattcgcggccggcgccttcgtcttcctcccgccagcccgcgtggcagcgcacgtaggcgccagctcggccgggtcgagccgaccccggtcagcccctccccgtgcgcgcgttccaccgcgagccgtgaggctgcgcgtgggcccgccgcatccgcatccaccgcgaatcgtgcgcgtgcaccgcgtccctcccccgcccgcgcgcgtgcgccgcgtgctcgctccgcacggtgaaccgtgtcaccgacaagcgggtcccacccgggaccacacgtggtgagcccggttcaccggctctctctctcctccctcccgcgcgcgcgcgccttgggccgccttgggccggccggcccatttagctcggccggaccgctccatttctctcgggccgcgccctagccgcccgagaaaagtctattgtccctccctcttttcttttcttttcttttcttttctaaaaaggatttaattaaatccttttcctttagaccaaaaatccaataatcttagaaattcaatatccttccaaccgtaagtccgtttgactccgttcaacttccaaaattcctcaaatctcgagatctatctaatggcacgcttagaggtcattaatagggctttattttcgccgtttgttgagttgtcccgtttcgcgtgtagtttcggagcccgaagacccgcagtgcgaggatttcgaggatcaagctccagatctcgagcaaggcaagccacctttgaacatcttgagcctatatttgaaatttaattatgttgcttgaaaaatattatgcattgataggatcgcacttaatctgttgtcccgtctgcaaggcagatcggcggacctacctaatttgttgcatttgatccttcctttgctaattgatataccatgttcccttgtaaccatctagttgcgtcccgatattcgtgcaccctgtgcgagtatcgacggacgccttcaaacttaaaattctgagtaacttcttgggtaaaacttgggttttacaaaagacttggaaaacccgacacctgggtcggtgcttgcgaactaaataaatttccaaaaccgcggaccggggaacgtaccgggtgtacggttttccgctcttgcacttaaggaccgtttccttggaatttcatccaaacataagacaagtacgaccacatgggtggaatgggacacccctggctgagtaactagcttatcagg

SEQ ID NO: 12244 - DNA, 6988 bp, Oryza sativa
aaaaaatttaataagcgttagattaactgcaggccccgccgacccactcattgatttttgcagaaatcccctcattatttcggtatttccagtcgagtccactgaatcagagccgttcaaccccacgcgtggacacaatctgaccattcgtctcctatctagatggctccgtccttacctacccgtggaatcggtcgtcgctcatctccccacgttgcatcccgtcatccccatcgagcgatccccttcctcctgatttctgtctagaggcggcatcgatgctcctcgcctcctccaagatcttccatcgtaggtcgtcacccacgacggcttgccatctgctatcccgtgcccagatgttggatgcatgatctcctccgtcggcacaatccgtgtagccgcatccatcggcgttcgtctccccgtacggtggcgaccggattggccactgaccagtgcctcatctccgtacacgggagtggggttttcttctgttcaagctccctcctcggctgctccgttcatcttctctggatttctctggtgagtctgctacattctttgccttcttttatccccttccttcacccttctctggtcaactacatcagtggctgcaagcctgcaagatggagctgagttgggaggctgagcaagcagcaacaggaggaatcaaggaacaagggggaaaatgtgagggaggaggaaactgggatacctaagtaatttgctaatgcgtttttaggctacctattccaatccctcatcgtatggtgtacattcagattcagatatgattggcttgatatttaggaggtaggttcgtgctttgtcctaatttcagttatttgtttttattttcacaaaattgttcaatttggatatacctaactttttcagtctttagaggccaaatcaaggaatgcaaataactatagagttgtacagggttccttaagccctctattaaggtaaagaacatggaaatctaccaagtagaatagaagttatcacaatctgaactctgttgtattgcagttcaaccataactcgagctgtcaacttgcaagggttttcatcctgtctatatggtcaaatattgccactctgtaactaaatgttgtaaggtatgtgatcctcaatccaatgtttgcgtattaatttacttattgtatcaagcttttctattaacagagttgtggtttcttgtttttcttgttctgtatatattgcaattcaatatttttatatcagctactggatgacaatgattttcgaaaactgacatggcacctcacttggtcgcattaacgaatctagagtcatgttctacttaatttcagcgatatgtgcagttcattatgattttctctaatatatgatgtgtctcagcctgtgagatagttgccagacacttataatcggtaggtcatccaagatacaagtacaaagcaagagatattcatcaaagggtacacaacaattttgtaggtaagtggctttcagttttgttgtaaaaaaaacttatgggaaattttagatgtgctactttattcgctgaagtgttatctgtatagattagtttcacctcattatacacgagttcatgcaggaccaacacaaattattgccatgcattctctatattcttcactgtgtatgatacataacgatataagtgatatgatggcattaaactattgagaactgcggtttggtattatgtgccagattacccatttcaaaattatacaaatgaaacatcctattgcaatagctattgttcggctttaaatatctgaagaggattttaccaaattgttctttcgtccaggacagccatggtatctgattattctcaattgttcttgatcttcagacaagtgaaaaatcgttggtcagtttgaaggaacaaatttcctcttgcaaaatacctattcctgtctagagggccaatgcactatcctcagctcaggaaaacataatggatgaagctgtcaattgttccactgagaaacaaacacaagataagataatagtgaacattcatactgcattgatctctgctctgagttctgagcaagaggtaaaccttatgaactttcttatttgatttatttctgagatgtgcttattaaatttttgcatggtggcattagtaatgttatatggactatcaggtcaatcttgacgcttcttgaattgaatcaatgcaaaaaaaacacgataattatttttgccctttgtatcatggagaattagtagacattttatgttcagatattatagtcatatgtgtttacttaaaagccgtgggattggttgaaggttagggccgccacgtcagcaaattttacaaaaaagaccctgtgtttttgttaattacatactggttcccaccaacatcgtccgttcgatctcgcggtagagccgatctaaccgtccacgtgtccactgtggcggccctttctcagccgtgggatcgtcgaattggcaatcaacggcatagatttcgtccggccggaccaaaccctagccccatcgcccgtctcggacgcagcctggcgcacgcctctcccttctacgcgactacgccggcacgccgtagcctctcgccgccgcctagcccttcttcctttgcgcgcgccgtcgccgctgcatcctcgccctcctccggccatcctcgccctagccgcactaccaagccccgcgtgtgtgacctcgcctgtcgccgccgccgctcgactgccgcctccgccgccgatcgcctgccgccgccgccgccgccgcggttgctcgcctgccgccgtgccgctcccctcgctccgcacaccaggccaccttctcccctcttctcccctctcatctccaggccacccaccgcctccctcttcctctccctatcctcggtgagctacagatccggttcgggggtcatcggaatcgatggtctcggccattggtctcctcgttggtgaatcattttgatacccctttcagccacaattgttttgtgcatacatttagcacaaaatccacaaggtaaggcaatggttttgactcgccattgagcatttccattgcgtttgctggtgtttttacatgatcccacatcttgccttaggttctgtggagaaattgatgggctaggatgaggtgttggtcgcagattacagagaggacgacttttatgctgcgcatctacagtcatactgagcaaatcctctcttaagcagggctgcgatatttagattatggtgagtttttcttgggttcagattatttcatatgaatttagctgtcagaagttccatggttattggttttgttgctgcattgtatggcaccccttgatagaatgacgtcaggaaggaaaaagaaaaccatgctaggtactacaaggctataagtataaggttatatgagagtattctgcaaacaggatatgcaatggaaggatattctttttattaactttgctaaatacctgccaatagcccaatactgacatcaaaaccccctagctctaatactgggagcataacacgccgatagacagtgtgcaaagcttttactgatgtctaatttgttgcaacaaaattattactacaccggatttatgtggtttgttgtgtttgtccagttcaacaaagaaagttggtaggatcatggaggaaatgaatcttatggttattttttcattgcttggtggtgtttcagacaactcagtctgctgccatatatccataaaacaaaacgttccgacaggtagttatttagtactatcctacaaacttacattctgccaaaaaaaaataactttcagcgtgcctgttatttttataatttaatgtgtaaatgatgaagagtgcaagcatctttctcctctgccttgacacaagagtttaggcctctagaatgtcctagcagcactgaaagtactctatgcatataagcatataaattttccatgttgcaagtcacagttatgccagtttgcttctggttatgtccacaacatattcaatgttgcaaaataaatataatgtagccatgcttcaggttacagcttccaatccactcttttaatattatgtagtgtggcatatgcttatgaaagtaatccataatactactatcttctgtaggctttcacatttaactattttattttgttgacatcgtttaacctggtttttttcccccttttcctaagtggttggttgatactattccaatagtataggtgcataccgcttattggtttattttgggtaatcacatacgcgatgtgcctacttctacatttgactattagaccatggtttaaaatgctatttacttgcttacttctacatttaaattatcaggaattgtgttcatcttttagaaataacattctgtcaggtcagagatttcggatggtagtttgcagtttgctcatgaatttgctttgtacttcctccgtcccataaaaaccaaccctagggaaccaaacctagggacgtcctagggatgaatccgtccagattcatccctaggtttggtttttatgggacgaagggagtataaattaagactgtcattttactgcagttggcctgcattcatattgaaagatttaacaccatcttacccttaggatctgtcgagtgactgatgaattacgatgaggtgttgttcatagataagagagatgtcttgtgtggtaccactctgttgtgccatcctgccgagggacccatctagctttgtcctcactcttaagcatggtatgtactatgcaatattcaatcgataatctccttgtgaaatttgtcaacaatattagatgcactactagaccccaacaatttccttctttttttttgtttttaactacaacccagtgattccttttattgcttccatgtagtatggggaagaatattctttcatgcagtaaggcaagaaatcattctgtcataagttaatacaattctcttatgattatgtagtatgcactaggttagttcattctctctcgactagattgttcgctgtctaggattaactaggattaaaagggatatcatattccttaaattaatgtttgcttcttttggtttgtggcaagatcagattcatgttcatgctcagttttgtggattcaagtttgaagaacacaaacaatatgcaggtgcatcgttttttatttatttccatattgttcatgtacaacattgtttaattttaggaaacactaactgcttcatgttgttcctacctctattctgaaagaggtacagtttcagcagggagattcatcttgcaggacacaattcatcttctttaccacagtacggttaacaaaagcttaattatattataatgatcatatacaattatgcttcacttctattaagggaatttttctttacttcagattatttcatatgaattcagttgtcagaaattccatgtttattgcttctactgctacattatatatggtatgatatggtggtgccaccttacctagcttgatagaatgacatcgatggcaaaaaaaaaaaaaaaaaaaaaaaaaaaagcatactaggcatcactacaaggctatcaatagaaagcttatatgaaagcattctgccaacaggatatgcattgaaaggatatactttttattaagattgctaaggtttctgccagaaatgacatgatgcgtacaatgcagatattatagatgatgtacatgctattgttgatgcgcgattagattagtttatggggtttgttgtgtcggtccagttcaataaggaaggttgataagatcatggaggaaatgaagcctatgattgttttatcattgcttggtggtgttttagatgactttgctgctccatgtttgacaaataggacataagcaggtagttatgtaatgctgtcctacaaacttatattctgcccaacaaaaaaaattttagaagatagctcttatttttataatgtaatgtgcaaatgatgaagactacatgcaacttatttgtctttgcaccactgtctttgccttgatccaagggtttggccgggcctctagaatatgctagctgcaccaggaatgttctatgcatataaattctccatgttgccggtcaccagcaattgcaattataagattctatcttaagttcatgacggaatacttctcttatgcttactgtttgtgccacttcttaatccatggccatcatgtgttgatagatgccatatttctcttttcttctctcttcgtataaagtagcctctaacgctggaagtacacatcccagtaacctattgttgtgtgtatattattcccacaattttcattaatttttgcaataacattgcatcatcttttgcaaatcagttttgactattcttttttttcaggagattcctttctgatgtatataatggtgaatagagaaactcatgcaagagcaataccacctcagttactgccaaaagatcagagaatcgcctttcaaaagctgagccagcattgctgctcttgaaaaacacatctatttctactatttttgtttggtgatatttgtatcccaaaacctatatttagactatatcatggtgtgtatttttgtgccgttttggtaattgagacattttttctctattggtcatgatttatgctacataaaagagactgtacatgggaggcctctctatatacgatattacttctcttattttgtcattaaaatcattagtacagttgtaagttactccttggcaaactccaatggtttatcggctttacaaacactgtacaacaaacattgcataatctttatgatcttctgcttaggtagtgtatcagatactgaaatatgcttacgcatattctttgttctgctaatgcattataataatactttttatataaaacaatatgttttctcaataaagttatattcatgtgtatgtggccaggtgctattttatacgc

SEQ ID NO: 12245 - DNA, 610 bp, Oryza sativa
tcggtaccccaatatgattaattgtaatgcatgacttgccttgctctcgcactgatgagaccacagcaacgtcttcgagaaaccgcagatcgacaaaactgccgaaatctacgcgacaaacaaagcacacaagcaaaacatgctataagactactgaaacagaatacaaaaccatttttaatggattctttgcatttttcttgatctactgagacttgaatggacttaagtggagctcggatgaattagatataaattttagaagataatatgtgtttttactaataaaaaaatccttattcgatttattgcgcaataatacccagggctgacattatccaaggggcgggggcgccgacaggtgggccccacgggtcaaaggcacaaagggcgccggtccaccgtggaccgggaccacacgggtggtccacccccggtccacgggaccgacggtccagatcagccccgaggccgataggacggtgcggcggcggcgaggcacggcacggctcggcacaaagcctgctggccggccatggcaagcggcggcggtgcatggccgccgacggcggcgaccggcggagcgaggcggcggcagacagcgcgaaag

SEQ ID NO: 12246 - DNA, 3553 bp, Oryza sativa
  unsure (1)..(3553): unsure at all n locations
gggccctacctgtcagcgcccgagagagagggagaccgggtgaacttcggagggggagggaggagcaggccggcgcgagaagaggtgggccggcggcccaagaaaaaggaaaatagggaaaataaagaggaaaaagaagaaaggattttccccaaggattaaatattgcactttgatgtttttaattggttaaaattatttctaaggctctgaaaattccactaaaaatcctgttaatcaattgtgacatgtggaacccaagaaaaatcccacaatgccatttccaattattaattgcatttattaattaaggaattagctctaggttaattaaaacaatttcttcagacgatttatttaataaatttttaaagcaagaaaaaagggggaaaacttcagggcgtgacactctcaaactttcctattcaaattctctccaaatataaatcctattcaattccattacccaaatccccttcaaaattcagaaacagtttctattcactttgggcctcctttttattctccccacagcgcaagccggcccatctattctagccgagccaccgctctctcctcacctatgggcgtgcgtggcatgcgcacatgccaccgccgccatcgccgtaatttgcgccgcccccaccgccggccacagctcggtgccgccgccgttgtcttgccgtcgacaccaaggaaccaccgccgacgtcagccaccacctcacatcaccaacgtcagccgcaatttgtttccgagccgaattgccatcaccggccaatcaacggacagagccggcgccatgctcctcttcttcacgccgccgtcaccatgtccttcttgacctcctcttcttcgaaccgacctcttgccgcctataaattgacggcaaggtcccctctttttccctacatcaacagagcttgaagctctgcttctctctctcttcccttgtctggccatcatcaccaccagtcgatctcctcctccgtagctcctctttcagttncctctcaccaccagcctcgcctngccgaggagaatgttagtagataaaccttgtgtgttggcatgtttctctttctgttttgcatgcgtgcgagccccggtttgtggaagctgtgcgaatagatgtcatggcgcgagaatagctcggcgtggcgcaggcgacgggggtgtgcacgcattctgcggatccgtgggggtggacacgatcaaatccgcgacgtgggaacgtttctgaagcacacgtttcccttctttgcatccttgtatttgctataaataaggagaagaaaaaacctgaaaagctgcaagcagtttgcagcgccaaactcctctgtttgctctgttcttcgcgttttcagacggtgtacagtgttccacaaaggtgttcgtccaaagtgtcgcgtgtgttcggctcgccgattggttgggtgattcctgacaattggtatcagagcgaggtttagggcgtggacacgtgatcgcgcactagaagcagcattcatgcctcgccgtcgctcgtcgtccccgatcgggcatactctaggaagttccggcggccgcgccatgggcagtggcgggaatgatcgcgggctgttgattcaccgcgtggtcaaggaggcgggaggtccggcaaacaacccggtgctcatgaagacgaattacaacgtatggtcactgttgatgaagatcaagttgcaagctcgctgcttgtggggagcaatcgacccaggagaggttgagctccatgaagatcggatgacactcgatgccatctgcagcgtggtccccgcggagatgatctccacgctggcgaccaaggagacggcgaaggcggcgtgggactgcatcaagaccatgcgcgtcgtcaacgaccgcattcgcaaggcgagtgcacagaagctgcgctcggaatacgaggctctcgcgtttcgcgacggggagtcggtcgaggatttcgccatgcgcctcaacaccgtcgtgacgcagctgtccacattgggggatcccgagccagatgacaaagtcgtcgagaaatatctctgcgtcgcgcgtcccaggttctcccagctagttctctccattgaaaccctacttgacatctccactttgacgctggaggaagtcactggacgcctcaaggcggttgaggactccggccagtcgtcgtcctcgtcttcaccaggtgccggggccaagctctacctcactgaggaggagtggcttgaacgtcacaagaagaagcagcaggaggccaagaagaggaatggcggagggaacggccgtggcaagcgccgcggcggacaagggcacactagcggcggcggcggtggcgtcgggaacgcggacagcactggcgttggcccagctcgcaagaccgacaagtgccgcaactgtggcaaacttggccactgtgccaaggattgcaggagcaagcccaagcaggagcaggcccacgtggtccaggacgaggatgagcccacgctcatgctcatgacaggcagctgcattgatgaggtggaggagacgggcgcgcagtgcgcgacgccatcgccgctcgcgccgcagcctcgcccagacgtcatcgagctggttgagcaaaaggtgttcaccgcgctggacgacgccaccgaccacgacaacaagtgctggatcctcgacaccggcgcgtcgaaccacatgaccggctcgagggcggcgttctctgacatcgacaccaatgtcgctggcaatgtctggctcggggacagcttactcgtccgcatcggaggacgcgggacggtactgtttgcctgcaagaacagcgaacaccgcatgctgcacaacacatactaccttccgcgtctcgccgccaacatcataagtgtggggcagctggatgagacgggcttcaaggtggtggtcgaggatggcgtcatgcgcgtgtgggatgagcggcgtcgtctgctcgcttgcatagctcgcagcccgggccggctttacttgctcgacatcaaccttgcacggccggtctgcctgatggcgcgcgcgggggaggacgcgtggcgttggcatgctcgtttcggccacatcaacttcgctgcattgcgcaagatgggccgtgagtccctggtacgtggtttgcctgtcttgtcgcaggtcgaacgggtatgcgaggcgtgcctcgccggcaagcaccggcgtgcccccttcgcgcaagaggcactccacaacgccactgagctgctcgcgctgatccatggcgatctttgtggtccgatcacaccggcgacacccagcggcaaccgctacttcctcctgctcgtcgacgactacagccgctacatgtggctgacgctcctcgccaccaaagacggtgcaccggctgccatcaagcgcgttcaggcggcggccgaacgcaagagcggccgcaagctttgggcactccgcaccgatcgcgggggcgagttcaccgtcggccacttcaccgagtattgtgcggagctcggggtgcaacgcgagctgacggctccctactcgccgcaacaaaacggcgtcgtcgaacgcc

SEQ ID NO: 12247 - DNA, 1310 bp, Oryza sativa
gaccacgatgacgcgccacttcgtttccatcgcattgacgacgtgcttgggcccgcgacgccgccgggacaggccgttcgcgagctgagcgaggaactgttcgcggtaacagcggaggagccggcgtcgttcgctgaagcagagcagcacagctactggcgacaatcgatgatcaaggagatgcgctccattgaagcaaacaagacgtggcggctcgttgatccgccggctcgccaacatccgatcgggctcaagtgggtctataaggccaagaaagacgccgccggcaacatcaccaagtacaaagcatgcctggtcgcgaaggggtacgtgcagcggcagggcatcgacttcgacgaggtgttcgcaccggtggcgcggctcaagtccgtccgcttgctgctggcgcatgcggcgtgtgagggcagggccgtgcatcacatggacgtcaaatcggcgttcttgaacgagcttctggaggaggtctatgtcgcgcagccgccgggattcgtcgtcgacgggcaagagcacaaggtgctccaccttgacaaggcgctctatgggctgcgtcaggcacagcgcgcttggtacgccaagctcgacgcgtcgctgctaatgctcggttttcaccggagcgactcggaacacgctgtgtacatgcgtggcatgggtgtgcatcggctggtggtcggggtgtacatcaacgacctcatcatcacgggcggccactccggcgagctcatgcagttcaaggaggagatgaagggcacttttcagatgagcgatctcgggctgttgaaatactatctcggcttggaggtgaaccagtctgaggacgggatcacgtgtgccagagtgcctacgctcagaagattcttgaggtggctggcatggccgggagcaatccaagcctgactcccatggagacgcgcctgaaattgagtaagtcaagtactgctcctgctgttgatgccactgattatcggcgaattgtgggctctttgcgctatctggtgaatttgagaccagacttggcgtactatgtgggctatgtcagcagattcatggagaaacccaccgtcgaacacctggcggccgtgaagcgtgtgctgcgatacatcgctagcactatcggctacggctgccactacatgaggaagaaggaggctgcaagtctcgtcggcttcagtgacagtgatctcgccggcgacctcgacactcgcaagagcacctccggcgttttcttcttcctcggcgacaacccaatcacctggcagtcgcagaaacagaaggttgtggcattgtcgtca

SEQ ID NO: 12248 - DNA, 581 bp, Oryza sativa
caactgaggggttctcatcatccaatttaatcggcaaaggaagatatagttatgtctatgtaggaaaactatttcaagacaacattgttgctgttaaagtcttcagtctagagacaaggggagcacacaagagcttcatggcagaatgtaatgccttgagaaatgtgcggcatcccaatctacttcctatcctcactgcatgttctagtattgattctgaaggcaatgattttaaagctttagtctatgagttcatgtcacaaggggacttgcataaatttctatacacaaccagagatgatataaacttgtcaaatttgaatcacattacattggctcacagaataagtattgtggtggatgtatcagacgcattggagtatctacaccacaacaatcaatggactattgttcattgcgatctgaagcctagtaacattcttctagatgatgatatgattgctcatgttggagattttggccttgcaagttataaaaccaattcctcaatgccatctctaggtgattcaaattcaacttcttcactcgcaataaagggaaccattggatatattgctcca

SEQ ID NO: 12249 - DNA, 6497 bp, Oryza sativa
caatgacttcaaagctttagtgtataagtttatgccaggtggggatttacataaattactatactcaaacggaggtgatggagatgctccacatcaaaaccacattacattggctcagagaataaacattatggtggatgtatcagatgcactggagtacctgcaccatagcaaccaaggaacaattgttcactgtgacctgaagcctagcaacatccttctagatgataacatggttgctcatgttggagactttggccttgcaagattcaaatttgattcgacaacatcatctctaagttatttgaactcaacctcctcccttgtaataaagggaaccattggttatattgctccaggtaactgttaactttaccttgttttgcattgctacatatttaatttattgtctgatatatgccaacttgtgaactcaactcttgtcatatgtaattttagaatgctcggatggtggtcaagtttcaactgcctcagatgtatacagctttggagttgttctcttggaaatatttattcggagaaggccaacagacgatatgtttatggatggattgagcattgcaaagtatacagctatcaacttccctgacaggatacttgagattgttgatcccaagctgcaacaagaattgatcccctgttctacagataaggaagatttggacccctgccaggaaaatccaatagcagttgaggagaaaggcctacattgtctacgctctatgctaaacattggactctgctgcaccaagccaacaccgggagaacgcatcagcatgcaagaggtggctgccaagttgcacagaatcaaagatgcatatctcagggaatactagggatctctcgtagcatcgtgtgcatcatctgtttaagtagttcggtacaacattgggtaaagaagtggccattgtcctactagaatgtgctgttccttgttacaacgcgcggcaagatgtttctgctctaatatactgtttgatttgtttttccttgatagagggtggcatgacatcttgcatctttcatacagagttctagagaaaaggcctttatccttcatacggagttcaccatattccggatattccggatcttatattggcttaacagtcccatatgtctaaaaaaacttgtacatttatgaggatttttaccgtccaaaggtacctggcggtaccaattctttaccgttggatccgagcaaatccaacggctggcagagattggtactgcggggtgtcagttctgtccctgatgtggtactgttgacggagtagatcacgactacggtatttgcatactatagggattattagtgccaaggcatacgcgagaatgagataaaaagagacaaatatttttatacaggttcgggtcctttaactgacaggtaatagccctactcctgttagccgaaaccggtgttgtttttattcatcagaatcacacaaatacagtacttgggataacctatctagctgtcgtcgacttggcggcatagaacaccaacatataattaatgacgcgatagcctttctcctcgaatacagacgagatcagagatggcgctagatccctcttgtcggcctttgtggcaccagattgggtatgtctagacttatctccgatgtcgatgtctggcggcgtgtattggtgtctatttcgactgaccatgtcccctctcctcctattggatcttgtatttacacccatagatgtccccttgttcaattagaactaagtagacaagtatggatacgaccggagtaatccttgtagtttccaacttgaactatgtttcttctttcttattcggaacatctttcgcatgcggggtctgatttcgtataagacttgatacatggtggacccaaccgagcttggttgtgtgcatgagcttggttggatacgagcttggttggttggttaaggatcatcaagtactagcacaagctagtttgcaaataacaaattaaataactaatatggagctaaataaataatactaaaataagacaacaatagcatggagtacttgctttcccttcacctagagcatctcaattgtccgcattaaagtcgccgcccgtcataagtgtattcactttttttcttgaagcaaatgacagcaggagatctgctggatatattagaagggggaaaagtacagggagagagtcaagagcaccctaaaaacagaggcactttcagagattacagacaaaataaaagcagctaaagaccgcactcaaaaccgtcaggtttggcgcacaagctgtatgaggtctatattttctttaaccagaaaagctacttgggtggcacttaggtaactttgttgaaaaaccctgcgattacgttcaagccacacctgccaccaagttaccagcaaagcccctatcaatttctttttctttctccttgcatcaaagaagcaatcttttcccaccaatctaaaatgcataagtgttgtgactgatttggcgcttgattgagatctagccagccacgaacctgattccaaacaagattagtgaaactgcattcttttgctaggtggtttgtgtcctcgaatgcatcagtgcagagactgcagatccaatcacatggccaatgtcgaatcaaaaagttttctgccgtgagaattttctggtgcagaattagccaaccaaagaaacgttgttttggttctgcttcagcttgccacaggggcttgaagctaatgttcgtagtagttccatggaactatgcctcataagcactcttcgctgtgtaatcaccatgttgggtccatttccaagtgatgttatccagagagttggtttgcaagacgatgtgttgcaattggctgcccagatgcaccaaatcgttaatttcagctaaagtagtgatcagtctcaaagaggtgagccagtgattgttttccagttcgagttgaacacagtttcctttcctttttgcaagtctgaaaatggacggcgctacgtctttgggggcacatccggacaaccaaaaatcatgccagaaagatgttttctttccatctccaagcgtaatcttagtacttgctctaaataaactcttatcaagctcatcacatggggtctccatattaatccaaggcttgttttcatctttccattcataccacagccatctgagtctcagagcccggcaaacttctctaaattgaggattcccaagcctcccaaagatcttggtttacagacggcagtccaatttaggagacaactacccccacttactttttcaggttcatcacccttccaaaggaaagctcttctaaaaggtcaatccttttataaagccatttgttttgttgaagaattgtgagatggtagattggggtcaaggacaaagtatttttaaccagaacttctctccctgccgaagtgaaaaagcggcctttccagccagggattcttgagcctactttatcaaccagtggctggagatcaactttccttagtttccttgtgtgcaatgggagtcccaaatatttacaggggaagtctgaaacttttccagggaatatattgaggcagtcttctaagtttattccactgcagcttatggataaatctcagttttgtccatgtttgtgtgtaggccgctaacctctacaaaagcatagagaatctcacgaagggttagcaaatcttctcgagttggcttcaagaaaagggccacatcatctgcataaagagaacatctgaatcgcctgtgtctttgaagacttgcaaggaggtcgtgatcttcggctttctcaaacaagatatggagtggctccatagcaagtatgaaaagcaagggggagagaggatctccctgtcgaagtcctcttgcatgattgatttatgtgccaggtgtgccattcaaaaggaccatcgaggaggaagttccaagcaggttagagatccaattgcaccatttttggctaaagccgaaattttccaggacttccaagagataggcccaattgacagtatcaaaggccttcaatatatccactttgaggaaaagagttggctttttggctccgtggaaatacttaatcatgttttgaacaaacaaaatgttgtcttgaattgctcttttcctaatgaaagcaatctgactttgggaaaccaaggctcctagtttgggagcaagtctgttagctaaaattttagctaaaatttttgcaaaactgtgcataagacttataggtcgataatcttcatctttagaggcatcggttttcttagggacgaggcaaatgttggcagagttgaggtcatgcagtctgaaggaacctaagtctccgaagaaggagaccgtgttcatgagatctgttttgataatatcccaagcctgcttaaagaattgccacttttaagatatggcaattaaggatttgccactcgctctctatgacatggggctctcgtgggcatccacatcgtcgagctccgcctttgctgccgtttgggtgaggagagaggagtttgagagaggagaggagaggagagaagaggacaaggagctgaggacttagaaatatcatgtggagctctgtatcctctcgcacctatttaaatgccataaccgattttcacatgcggacagcttaaaaagcccacctgcaaaaaaaaaagtgtattattgtagatagcatctttaagccgtctgcctatgaaaatagatttttctggtggccaaccattagaccactctttatatattttcgcaggctgataattgtagtaaaaaataatgtctgtatgtgaaaatatatgtgcctcactgtagaaaattatttttctagtagtagtgttagctgctatcttgctatctatctagtcccatgtgctatctattgtaaaccacggtgatggttgttatcaccgagatataaacagaggtgtggcccctgaaccgggcttgaacggttctgcagctctggttttcctatccccggctctgaaagttgcggcgccgggtgaagacagttgcagcaagctggatatggtacaggcatattgacttgactcgagaccctccgatcaacctaggtacagcagaaaaggacatgacagtcggacgtcttttgactgagcgctgaactgaaaagctgttgaaaccatacgaaatgaaattttctcgaaatttcggagtcaattggtgtggaaatttcttccacgtcgtctcggtcggtcgttccgccgaccgacttcttactccaacatcttgctctttccattattacgcatacgctttccaaatattttcctatagaactttttatagaatagctgaaaaatcgtattgaactatatttttattgttttaactaatatttaattaaccatgtgttaatttattatttttattttacacggggaagggttcccaacattaaggttgtgttctttcacatcagttcccaactcatctccctcgttttttccgtgtgtacgcttttcaaaccgtcaaacagtacgcattttgcaaaaagtttatatatgaatgttgctttagaaaatcatattaatccacttttcaagtttttatgctataatactttattaatcacgtgttaatctaccgttcccaacccctccaagacagcacagcctcacggcccgaataaattgcctcgatccatcaatacccaactatttaattttttttctttttttcagggaacccaactaataattggcgtcataacagaaacaattggcagctgttgacgagcgatgacgccctgcctgagtcagtcagtcaagattgaatgagcattataccaaggcctatctatctatataatcaaggaaccgcgtgtctgatcgaactcgcgtgccattctaatctggagattgctatttgctggtcgatcgatctgtatggctattgcgttgcttaccgcaggcacgcagtaaggttgggtttccatccacccttggccggcttcgagtgcccctgctatcgcgagctgtaactctgtaagcttcttctcggctctaagtctcatttgccataggaacatgtcgttttgtttgaagttacaaaaaaaaaagctttaaacaacagtgtctttttaaatctagactagctagttggatacacatactttgccacgaataaaaaaaatacattataatattatctaaaataaaaaaaatcatgaaacatgtttcccatctttttttttctatttggaatatccaccttagtttgattttgtatatggatatccactaatatttgattgttttcttcttaatattaataagttgaagggataatttgcatttttttaatgtgagtatgtatgtggcagattcactgttattaccactagatgctttgaaatgagtctaaacgttgggtgcataggtatagctagttttatttcaaagacaattgtgacatataatactcccttcatcccaaattaatacaacccgaat

SEQ ID NO: 12250 - DNA, 1549 bp, Oryza sativa
gggtgttggtttcatgtcaaacaatatcaagggaaacatcccaaatgatttttcaaagttcgtctcgattgggtatcttgctgcgagtcaaaacatgttgtcaggaaggtttccacaagccatcttaaatctctctactcttgatgttctttaccttggttttaatcatctaagtggagatttaccatcaaatcttcttgactcgctacccagcatagaaatactttcattgggagggaacttcttccaagggcatatcccctgctctgtggtaaactcttccaacctaggtttactagacatttcatctaataattttactgggcttgtaccaagttccattggaaaacctaccaaactgtatcacctaaatcttcagtccaatcaacttcaagcacacagaaagcaggattgggactttatgaatggcttaaccaactgtactaggctacaaatgatctcgatagctaataaccgtctacaaggccatctaccaagttcattaggtaacctttcctctcaacttggaatgctacatttgggaggaaatcaaatatctggtgttttaccttcggacatagaaaacctctccagccttacttatttccggattgataccaatgaaattacaggtgtccttccagaatggcttggttctcttaaacacctacaagtattaggcttatttaacaacaacttcacggggtttattccaccgtccctttcaaatttgtctcagctggtatatttaattctagattttaatgagttcgatggacacataccacatatcttgaaaaacctccatatgcttttatcattcagtgctttccacaacaatcttcgaggtagcataccaaatgagatatttacaatcccatcaatagttcaagttgatttatctttcaacaatctagatggacaacttcctgcggcaatgcaaaacaactttcaaagttgtcacttgcatcgaataagctatctggagatattcctaacactttgggtgattttgaaagcttggaatacattgacttatcctggaataatttcactgggatcatccctgcttccataggaaagataacaagtctagaggttctcaaattctcacacaataacttaactgggccaataccatcattgcttggtgacctacattttcttgagcaactggatttgtcattcaaccatcttaaaggtgaggttccgatgaaaggaatattccagaatgtgacagccttgagcattggtggaaatgagggactatgtggtggatcacgagagttacacttactcgcatgccctgtcatatctttggtctcatctaagcacaagaaatcaattttactaaaaatactaatcccagttgcctgcttggtatcacttgctatggtcatatctattttttttacttggagggggaaacggaagagagaatccctatcattaccttcatttggtacaaatttccccaatttttcatataataatctattcaaagcaactgaggggttctcatcatccaatttaatcggcaaaggaagat

SEQ ID NO: 12251 - DNA, 638 bp, Oryza sativa
gtaccctcacatgtgccacacaccggaacgcgcaggtggtgcacggccagtgggactccattccaaagctcgtatggggtcttgccaccaatgctcttggacgagctcctgttcaacagatacacagccgtgttcatcgcctccccccaaaacatacctaggagtcctttggccttaagcatgcttcgcgccgtgcccacaacggactggttccggcgttcgacgacgccgttttgttgcggcgagtagggagccgtcagctcgcgttgcaccccgagctccgcacaatactcggtgaagtggccgacggtgaactcgcccccgcgatcggtgcggagtgcccaaagcttgcggccgctcttgcgttcggccgccgcctgaacgcgcttgatggcagccggtgcaccgtctttggtggcgaggagcgtcagccacatgtagcggctgtagtcgtcgacgagcaggaggaagtagcggttgccgctgggtgtcgccggtgtgatcggaccacaaagatcgccatggatcagcgcgagcagctcagtggcgttgtggagtgcctcttgcgcgaagggggcacgccggtgcttgccggcgaggcacgcctcgcatacccgttcgacctgcgacaagacagg

SEQ ID NO: 12252 - DNA, 1762 bp, Oryza sativa
tgaatgagagggtcaggggcaagatgaacatttcgcattccattgccaccttggttggtgatggggtagccgtgggccctgaatttgggtgtaaaatggtagaggagagctgatttgtggggacctggggcaaattatctaagttatttgggaagatggcatttgagaatgctacatcaaagtgaatggcaaattgtccaaaatcccgacgagggaatagacaggagaaggcgagcgagacggcggcgcttcagtggccaggaggcgacgacgtcggtggtggattgtgttcccgagcgacgtgcacccggggagggtggtggtcggcagagggagtgggagaggaggccagaacggtggatggaagagctctactccggccggtgtagcagtgatggtggtggcttgattcaaaggggaaaagaagggggaaaggggtaaaatgggttctctgtcaggaatcacccaaccaatcggcgagccaaacacacgcgacactttggacgaacacctttgtggaacactgtacaccgtctgaaaacgcgaagaacagagcaaacataggagtttggcgctacgaactgcttgcagcttttcaggttttttcttctccttatttatagcaaatacaaggatgcaaagaagggaaacgtgtgcttcagaaacattcccacgtcgcggatttgatcgtgtccatccccacggatccgcagaacgcgtgcacgcccccgtcgccagcgccacgccgagctattctcgtgccatgacatctattcgcacggcttccacaaaccggggctcgcgcgcatgcaaaacagaaagagaaacatgcaaacacgcaaggtttatctactaacaaatctccccctaaaccttgcgtggagttttgatttcgatgaggccaatccgagaacgaagttcgatgaatctgtcgcgcccgagtgccttcgtcaggatgtccgccaactgcccgtcagtgccgatgaactcggccttcaccctgccctcctcgatgcattccctgatgtagtggtatcttgtgtctatatgtttgctgcgatcatggaagatagggttcttactgagcatgattgcggattggttgtcaatcttcaacgtgacggcgtcggcctcctctccccggagctcagcaaggagacgcgccagccacacgccttggcaggccaccgttgtcgctgcgatgtactcagcttcgcatgacgacaatgccacaaccttctgtttctgcgactgccaggtgattgggttgtcgccgaggaagaagaaaacgccggaggtgctcttgcgagtgtcgaggtcgccggcgagatcactgtcactgaagccgacgagacttgcagcctccttcttcctcatgtagtggcagccgtagccgatagtgctagcgatgtatcgcagcacacgcttcacggccgccaggtgttcgacggtgggtttctccatgaatctgctgacatagcccacatagtacgccaagtctggtctcaaattcaccagatagcgcaaagagcccacaattcgccgataatcagtggcatcaacagcaggagcagtacttgacttactcaatttcaggcgcgtctccatgggagtcaggcttggattgctcccggccatgccagccacctcaagaatcttctgagcgtaggcactctggcacaccgtgatcccgtcctcagactggttcacctccaagccgagatagtatttcaacagcccgagatcgctcatctgaaaagtg

SEQ ID NO: 12253 - DNA, 883 bp, Oryza sativa
tagggcgaattcgagctcggtaccctcaagaatttcctgatcttcttcttatctgtgtccacttcctcaggggcgtaccgagccaacttgttgaacatacttaggtactcattgacactgctgttgccttgcttaagtctgttgaattcctctttcttcatgtcaatggtgctttcaggcacatgagctgcacggaaagccgtagcaaactcatcccaagcaatgttagtgggttcagggtatgcattacagtaattctcccaccaatctgcagtaggtcctcttagctggtgagaggcgtagagcgtcttctcaaccggagtacactgcaccaagttgagttttctatcaacatctttcagccaatcgtcagcctcgacgggctcgacggtctgagagaactctggcggacgagacctcagaaaatctgtcagcttggatctattattgcccatgtgagggtggccatttccatgcgcattgtgctgataaccggctacggctgcggctaatccttgcaagatttgtatctgaactgccattaagtgctgcatgttgttttccacatgaggtggggaagggaggcgttcttctccagaattgtgactggcagtgtggtgagagcggtgagactgttccatctctgcattacgggaagctgtgcgatgcgagcggttgctgcggcggggttgctcaacttctgcgttgcgggaagcagtgcggtgcgaacggttgctgtggtgagactgctcattagctgactcatgatttgcttctgtcacaactctaccttcttcaaaaccgaagcgggctggcgcacgggctgcacggggggggggggggggggggctacccatctaaactcccagaagagggcgaggta

SEQ ID NO: 12254 - DNA, 1663 bp, Oryza sativa
ctgatatggagcttggaagacgagtggaatttgactagcaaggtattgactaggatttggttgtgtactagtcgatgctagagttgagtagcataacgactaggtttggtatcttctctagccgatgtcgacgaatatcaacacggctagaggaataggaagtttgtgtaggtttagcgggatggaagtattactccgacaaccgtgagtggcggcggagcggctaggatcacacggagcccgaatttgggttttgccgggctttacaactaattgttcgacgtcggggccagtagaccatacggacgtccacatagaaggtgcaaagttctaaccgacggattttattggctaaagggtattttgaaaataaaaggaaatatttgaaaggcaaatataagtttaactcaaatatttattaaaatggtatttgaataaattaaggaaattcaaataaaatcttaaaatagaaaatttggcatcaaaatgtagattttgaatttagatgaatttaggtccaaatttcatcggaatcggatctacggtttaggagatatgggcttctaaagaataggatttgaattaaataggaaaaagtgaaatagtactgtacagggcccacctgtcagtctttcttttcctttttcttttctccttcttccttcttctcgtcttcctcctctgtcacagggagacgagagagggattttggacaatttgccattcatttcgatgtagcattcccaaatgccatcttctcaaataacttggacaatttaccccaggtccccacaaaccagctctcctatgccattttacactcaatttcgggtcccatggctgccacatcaccaaccaaggtggcaatggaacacgaaatgtccatcttgcccctgcccctcctcaactgtcatgtttgtaacataaaaattacacaaaattgccactgacactaaaattgaacagctggtctcgtaggagcaccgttaacacatcctagccaaaatcccttgttcatgacatcccaagttcccaacccaaattgcacaacctgatcaaatatatcagccatattgcaccaaaattttataaattgagaaaaccacaacccaaaataccagccacaccaaaataacaagtattgggtttcaaatagcataggtttcaaatattgttttctgcattcccacatagcacgtctagtagcaagcatggctggccttaacattgttctttgctgccattaaatacataaataaccccatctttcttgagtccagttttttgtaacaaagagaaaaagacaacatcaattcttctgttctttcttcgaagtcaatttcttcttggttggtggtagtggttgtgatggagctgcttcagtcatagccaaacgcctccttgtcaccggtccaggtgaatcttgtgagcatccttctccagcaacagttggtgttctagctactcttgttgtttgactgaagaagagaaggggaaaacagatttatctcatacctcgttggccgttgcagtgctgccgccggtgaatcgacagcgccaccgccgccgcaggagtgagaccagaatgggacgagtgaaaatgagagtggagagggatctgtggttgaggctgtgttatgaatgagaggggcaggggcaaggg

SEQ ID NO: 12255 - DNA, 908 bp, Oryza sativa
tcactgcttgagttcaagaaggcaatcactcttgatccccagcaagtcctgatttcttggaatgacagcaatcacttttgcagctgggaaggagtcttgtgcagaaagaagacaaccaatcgtgtcatttctcttaaccttacgaaccaacgtttagtaggagtaatctccccttctcttggaaacctaacattcctaaaatttctgtacttagacacaaattcattcaccggagagatccctctgtcccttggccacctgcatcatctccaaaacctctacttgagcaacaacacattacaaggaaaaatacctgattttacaaacagttccaacctcaaggtgctactcctcaatggcaatcacctcattggacaattcaataataatttcccccctcatcttcaagggctggacctttcattcaataatcttactggaaccatcccctcttctcttgccaatatcacggagctattgggtgttggtttcatgtcaaacaatatcaagggaaacatcccaaatgatttctcaaagttcgtctcgattgggtatcttgctgcgagtcaaaacatgttgtcaggaaggtttccacaagccatcttaaatctctctactcttgatgttctttaccttggttttaatcatctaagtggagatttaccatcaaatcttcttgactcgctacccagcatagaaatactttcattgggagggaacttcttccaagggcatatcccctgctctgtggtaaactcttccaacctaggtttactagacatttcatctaataattttactgggcttgtaccaagttccattggaaaacctaccaaactgtatcacctaaatcttcagtccaatcaacttcaagcacacagaaagcaggattgggactttatgaatgg

SEQ ID NO: 12256 - DNA, 4968 bp, Oryza sativa
caaagctagagcttacacgttctacttcagacaatgcagcagcttttccatctcaaggaaatcatccatcaggtcaatctcaacatgattgtttacaacatctcttgagctggcactactgttcttgaactgatcaagttcggctatcagagccgaggcccatgaatcagaatttctcatttcactgtcaacagtcagcatacgctccccactgtcagactggctatcagtgagagattccatgcaagcattgttaggcgcaggcctagaatcattggccaaggaagttcttcgtgtcagatggcgcagcttacggcattctgcctcaacccttgcaatctttttcacactttccaaatgttgtttacttgctgtctctgctgcttcattgctcagatctctttccagtgacagtctcttcaagtccttggctagcgtgagcagctcgatcttcaggcccttgttttccttctctgcagcctgaagtttatcctgcagatcatgctggacagccacagtggcagcttctaatttagcggcttccagctgctgctttagctcataaatatggttctggagctcagacttgtgagaatccaattcttgagtcttcttagcaactgcatcacgaattttctcctcttgttcttccctagcttggcgaagctgcctgacacattctttgagagcatcatctaggtggttcacttgatcatccaaagaggcattcttctgagttgaagcttcgagtaacctcttcagggtactaacttcagcttcagcttgttcccaacctacaagtaagtcaaaaataaagttcaatatgaatttggttccatattggaataaataaaactatgattttcttgagaaggtacaactgaggagacagacgacacactcactccacacacactaacacgcatgtgcagacaaacagaattattggttgatactactattttaactttgccaaagaactatttgaatgagtttcctctttcttagttctattgatgtcctcacatataaaattaattttgaataatgaagggaagccacagactcaataaatgcatgggatcacaataatgcaaaatgtctaaaatcatagtgaaaagaaagattacctgcaacagcctcttctgcaacctttgtatgctgcttcaccaagtcatctttagcattgatagtcaaaagggctgaagcaagcttctcactcaaactcttcacagaatcttgcatatcttcatctttgacatttgtgaagacatctggctgtggtgactgacaatgctgtgtggaagaatcatctgacacagtttccaacactagcttttcatttaaagattttgctgttgcagttccttgagtctcattatctgtaattcttgagcaaattttaggtgattggctatgatttggggaagcaccattcggaataggcttttcgccctggttttgccagacacagaaaaaatgagagtattttccgcaagcacttacaaataatttcaaattttaaatagtctacagaaaaagtaagagatttaatgattgtaccggagaagcaattcctccctcctctctcatctccggtctctctttcagagaacttgattcagacaactagagtatgctctcaagccaccaaagtggaaatcaaacatgtgacctgttacataagaattaacttccttaacaatgagataccacaggattctgaaaaaaaatctatatgttacattctatcctctggaaaactgcaagtcaaaaacattcaacagagctatagagatcagcactatcaaaacattcaagttaaccatgcaaaactgagggggtaacagatgttaatggtggttctttctatatgcagtgtgctattctggaatataactatctaggaacaaaattgaggcataagcctttgaagcaaaactccagaaccatgtcagatagctattaatttattaatttgagaatcacttataacttcagcgagcaaatcgctcctcgacacagcaataaaagaacaagatattacatgacagttaagtgctacattcatttacaatttaaatattatgtccaaatgccactacttgcgtaacattatccttagtttgttaatccacaaattacaattgcacttcatccaggcacctaactacataaagaatgcatcaataccacatgaagcataataaaaccatttgtgacaaggttatgttgcttacgaagtagaacattaacccatgcttaactcaaagcccatttgtccctatcagggaaaaggggcccaataaagaacccgctagaagtcttgggaacctttatatcttgtttgatgcatttaaagattgtgtaaccatatgtttggaagtacttagtagtctcttacaaaatcatataatcaggacgaatcaagtacaaacctaactactcaagtctatttccaaatattaaaactggcatgctatattgctattggttactggatgtctgatttctacaaatttattcattgacaagcgtgtgacaaacgagtgaccctgtaatggctggcccaacagcaacagatcaaattgcaaatttgcatgtcataaatctgtccaaagcagaaaaaatgacatctcagctagagatgccaacaggcaacagcatccgttatgtttattaaaatcagaaatcccaactttggttcttaagaaaagtttgttccccaagtctaattcgcaaacacctaaactatcaccaaatcatgatgtttctagtacagaagtgcagatgaatagccaaacagaattcagaatttcttttctcaaaactgaattcaaaatttcttagatatggatcccattcagacagaatttaactattgaggtgaacctgatcaccggagtgcaatgacatcgaaccagggcattcaaacttgtgcctccagagtcaactcttggagatccatcttgcaaccaccggtcatcagacaatcaaagcatcaatagtgatcacttggtctaccagccaccatcaaaaagcatggtttggatcactgaagtctgaaacacaaaccaatggagagaaatctcatcaataaacatcacattgcatattactaatgggattccttaataatgtaatgttgtaaactgagcaacaggcagtaactacaatcgtcctagggaagtaaaagtaaaactttaaaacgttgcaattaccaaaatgtgagcaatgcacaggatccgattttccactgtaatatacaatgtctataacttaatgaacacttcaaaacaaagataccaaggaacacaaaatccaacaaggcattgagtacgattccagaaaccaagagaaaaataatatatgcttgctgcaaagcacggtaatatcaaagtttttttttttagcaaacgtaaaaagtacaaaccctatcctacccttttctaagacaaatctttgcatcaaacgaacacatcaaagatcaaaatgtggctagtaaatactcctaaaacttcaaaaccaaatctggcagcacctaaaaccctacaaaaatgcatgccaaagcagaagattttacccaactccgaggcctcaaaacgagccaagaaatcaaaatcacttcgcataacgcaaaaacaaaagagagagagaacaattaagaaaccaccaaaaacgaagagagcaccgcgcgtaaactggattgcagcgcaaatcaaaatctcccccctttcaatctttggaaaaactgcacccgcaatcaaatctcatcaaaatcaagtctacgacgggtggagtgcgcaagatacagagcaaaaaacctacaggaaagggaacaaagaagagagattcagaaaatcggcgcaggtgaaggggaaacagggagcaattaatacctctgagaacccccgaattaaacccgtcgcctggagaacagcaaaaccaccacaagaaccatgtgaacaccagaccaaagttcagtttttttttgtctttactgctactactattctatctctttccctttctcctagtagtttatttgggataaagatcagagggaagaacagccgcagattcacattgctcacctcgcccacaaaatcaatcacagatcgaagcgaacacacgcggagaaggatgagagagaagcaagcacaggaggtaaaaaagcaggaggttactgtaccagagcagcagcatcaccatgaatgacaccatgcccaagaaaggaggaggagggaaaaaggccactgcttttgacgagatgagagcctcgagtgcgtagaaatcgcagcaagaatccaaaaaccgcctccttttttgcttccttttttctctcttctcttcttcttcttcttcgcggttcgcctcctctctttcccgcccaggcagctcaaaccaggactcactttcagctgctggtgttcttgcctcccctcctctcctctcctcttctactgctcttcaatgtgtcattattgtagtactagtactacctgtgctgctaccactttcatctcaagaagaaaagggagaagggagaagaaaaaaaaatgttgttaccgcagctgttacttgtatactgataaatacttcctgtctttgaccgggcagagagtactgccacggtctgctgctactgtgtaagggtattcctaactcaataactagatggtgtccatagtattaaataagttgttatctatgataaaaaataatgtggcaagtgaataaataagaaaaaaagaagaaaatcatgtgttgcatctacacaacatccaagacattatgtgagataagtaacattaaattaaagtaggaatagtggtgtttgcattggaagagtaatgtctagtactagtttttttgatgatgtggagttcatagaaaccatgtctagtgttatgggttgggactgccctaacgtactactacttaattccactaaacaaccaccattat

SEQ ID NO: 12257 - DNA, 616 bp, Oryza sativa
ttgtacatgccttaattatttggtattgttgcacctatttgcaaggaatacttctggctttgtgtaccttcgatttgacagtataccagctgcaatgagtgcacagaaagcacttcatgggaggtggtttgcgggaaagatgattacggcaacatttatggtatggaatacaacatttaattgaggtcaatcttccctttctaaattttgggtttgctgattgctcttttgctgtgtcagtctccgcagcagtactcaacgaagttcccgagctagcggacagcaactttcggttgatcgctgaagattcttgctctattgctgtgtaacggtctcctgtaacattatgtcatgcagccttttgtactttatagcatgggttattcaacactaagttcgcatacatcactcgtttttgcttaagacattatctataagctctcgaagtgtacggcgggcaaatattttaactcttggtgtttcaattgatcgtgccgtgatggcaaatattaaagaaatgttgtcgaattttggggcaatcgtaattgcccaggaaaatgatctcattacttgatttatacccctatcatccgtttgaaaagcagaaattcttgtt

SEQ ID NO: 12258 - DNA, 631 bp, Oryza sativa
aaatgccgagaacatgccacagtaccttattattcttatggtatcatcaagttatcgtgacaagacatgttagccataaccttttaatttttcactgcatttccaattcaaaaaatgtgcgtggcatatattaactacaaatagttggtactggtttgaacacttggccttcctctgaattttttaccttccttttgtctgtctgcagtttgactgctgggatagccggtactggtttgaacacttctgttggattaccacctgcatcagttcttggtgctcctccagtcgctgcatctgtactgcctacagtgcctggtcttggttcagttcctggggtgtctcttccaattactacccaagccattgagacagccccacccagtgaatgcctattgcttaaaaatatgtttgatccatcccgggaggtttgttcttactactgcattctttttttttttgggttcaccaacagtccataccttttttaaaaaaaatctttactggtctggatcccttctggttggttgaataaaaactaattgaaacttactttatttgcagacggaccctgaatttgatttggatatcaaagatgatgttcaagaaaaatgctccaagtttggccaag

SEQ ID NO: 12259 - DNA, 702 bp, Oryza sativa
tgatggccgatgctaattgcgagtaggatggatactggaaatagcggatgaaatgtgagaacaataattcctcggagacttcagaaaagcatcgcaattcattacataaattccccgatgtacttggtgctcatcctagtcaaaagctaaagattccagaagtgctctcttcctcaaatgagaattggtcctcaacctctgcatcggtgaaggtaagagctctctgcaactttttgggacagaaaacctcaacatcggaagtgtacacagctgtcacagggcggtgatcggatagcctgatatcaactgtcctgtaggcctgcagcctcattcccttgccaaaggaaagaattcggtcacacctacaaagttaaacaatatttttttttgttagcacgcatcgctcatcgcaacttagagatttcctcatacacaacctcaattcttacaatacctcttattaaatagtagtaatgaggtgattaatcgtgagttatgaggaccaattctttcctcttacacaatacctcttacaatacctcttacaccttcatgagttatgaggtgattaatcgtgtaaacaacgaggaaaaatgttactacctccgtcccattctaggttgtttagcatgtattagggttagaaaaaaaatactacaatacctcttattaaatagtagtaatgtataggtggatctgaga

SEQ ID NO: 12260 - DNA, 690 bp, Oryza sativa
gtatcttctgcagcgagatccgggtggaccgcgacacgacggcgttgagccttcgccatcggctcctcatcacgtcatagccgaaggcgaagatgtcctccttgcgtgcaggttggccagtatcacctttaggatcttcagcatccggagctgggtgtcccgggacgcgcccatgatgctctgctctacgtacgaaagtgctcttttcgccaccttctcgtcccttatcagcgcccatctgcgcaacgcacagcacggtatgacgtatatgtagtgtacaagtttttgcgtcgttgtgttcacgtgtcgcttgcaatgtcaggcttaatttgagggcgtgtacccgaatctgctgccggcgtggccggagagcttggaagcggtgaagagcatgacgtcctcgtcggcgggcgccgggatgtgcgtcaggtgaggccagtagtacgcgtggtcgacgatcgccgacgagccggcgaggacgggcttgcgcaacgcggtgtcggggttgttcggcgaggtgacgaactcgatgaagcctttggtggagtttcgcgagccgttgtttgaccacgtagcggtggtgccgtcccatctgtactcccggccgtcaaacatgtcggtttgtgacttgtacgcctacacatatcatcgatcaaagcagttcacttcagcacgacttaataaactgag

SEQ ID NO: 12261 - DNA, 720 bp, Oryza sativa
tatagtctgaaaggcagcgaagaaaaagcccctggttgcgtgtttgtttgctcgacaaactagaggccgcttgtggggctagtagtgccgtcgtggtttcattgtgtatgtatacctaaatatatgttacataatgatcttgctttcgtcgactcgagagtcgagacagtgcctccatttagtccatattgtactatgcttacatgactgccctgttgaagaaatagcctatacagctgcactgttattttggttgttgatactacctgataataatatggcgtgtaccaaagctttaacgtggccatgttcagcagttcaggtcatcttcgttgctctctggtgcagacgagctacgaggtatgagctgcctgatgttggtgatacctgacgaaaaatccgtccgaacggctgtgatggatatcagcttttgctgcctcttcctcctgactttgtttcatcggctcatcgccatttcgcctttcgtcaatctctaaccctctctcctttctccttccccacgctgggctgcgaagaggaagatcgatgacgcgtggaattccatgacgcgtcgcttgtgagcccggaacgagatctcaatacccgtttatgacggcccatataagtggaacgggattgccgctaacaagcggcccatatgtgttggtggaacacgacgtgcggcccaagtccggaggtggaatcagatggacgtggtcc

SEQ ID NO: 12262 - DNA, 613 bp, Oryza sativa
tatagggcgaattcgagctcggtaccctaaatgccataactggcggttcatctttaggagtcgaatcaaaaagacagagaaaagcttatgtgagacaaataaatcatgtgggcacaagttatcagtcaattccaccagcttactcaaacacagttatctcgtttggcccggaggatgctgaaggcatacttttcccccatcaagacccgttagtaatatcagtggaaataacacagtgcgaagtgcaaagggtgttggtcgatggaggaagttcggcagatgtacttttctacgatgcatttaagaaaatgcaaattccagaagacagactaactcatgcaggaattcctttacaaggatttggtggtcagcaggtacatgcaatcggaaagatatcattacaagtggtgtttggaggaggagaaaataagagaagagaagaagtcgtgtttgatgtggtagacatgccatatcaatacaacgccattttgggaagatcaacaatcaacatttttgaagcaatcatacaccacaattacatctgtatgaagcttccggggccgaaaggggtcatctccgttcgaggtggtcaattagcagcaagaaaatttga

SEQ ID NO: 12263 - DNA, 506 bp, Oryza sativa
atgggccaaattaaggctcggagttattactgcctctgacgctcacaacgtcatttccaagcctcgatctggcagcaaatggacagacatgaaaatgtcctacttccacaccttgctctacggtggacacatctatgccggtccgggccaggataatttctggtgtcatgctgccgccttcttcttgaggaagcctaaggccttaactgcctcggcttgggtaagctcggatgaatcgcgaatatcacgacggaaaatttgcgaacagactgggagcaggttttcttcccatgtcttatccattgcgataaggacgtcgttaatctccttgataatttcgtctcctgctggggttacatcgcgttctggctggcgttctgctgagaagttgataccttcctcaccctcggtattaacatggtcgatggcggcatccaggcgctcacgtcgaggccagtattttgctgcctgcttcacgaccgtctttaggatcatctgctcttcat

SEQ ID NO: 12264 - DNA, 602 bp, Oryza sativa
tactttcagaagttcgattgttttaaacttatttcctcaaataatttcaggtaactgtcggtgcatcatttttatcacaaacattggctttggaggactcaacaatagtgaaatttgaaatatgggataccgctggacaagagaggtacacatacagcactatggttttagcttcttccaatcttgggataatggcatgctgttggtgcattagaagcattggttttgtgagaaagttctagtagtatgtgttactgatttttacaattgatccatcttacgtgccacacatgcatatggtttttctcaatcaagaactcattggtaccagccaattttaggtatgctgccttggcacctctttactacagaggagctgctgctgcagttgttgtctacgacataactagtccagaatcatttagcaaagcacaatactgggtgaaggtatgctatcgccaaattatctgcttttctgatgtctggttgattgattactctttctatcttttactatgagtttgtattttttgcccgaaactgttctagtaaaattttatatcatactgtaagattgctgctaaaatattataaatgtgttg

SEQ ID NO: 12265 - DNA, 639 bp, Oryza sativa
attctttcagttttttctccaactgcattttctcactgtttttaagcttttgctgcctctccatctctgacgtaagatgatcaacttcatgttctaccttcttatataggctttcataatcaacttcctcctttatccttatcgtgttcactattttcattgcctgaaatcacataatgaacgacttaatgtggtgttataacttataacaaaaaaggaacaagaagaaggaaacgatataaaacaactagacaacatgagtttctttctttgagtaaatgcagagttgcaattttaaacaacgagagccattgaattcatttcaagaggaaccagtaacaagtagtttagttcatgcatgaattaagtctctgatgtaatgcaacatgcacagtttgcactgtgtgcaaattaatgctgctcagttcactctagtaatttatccagatagaagcagttgaaatgatgttttcaactccatgaaactaagagcattatgttggtataagacaagtgcatggcataatttaatggcctgggatggagtagagttcaaatattaactaaccatcatatatctaatgggattcactaaaaatatatctagtgggaaaagctctgaataccatttacaagaat

SEQ ID NO: 12266 - DNA, 857 bp, Oryza sativa
acttcgacctacgagttggtacagtacttcatcacttatacattgctgcaacaccctattcagtaagcacggacatcattgtctgaagggagaaagtgcacacctagtgtactatgtcagtgaggccctggacgacggcaagacacgttatccacgagatccagaaacttctctatgttgtggtcatgacatcgcggaagctacgtcactacttacacgcccacaaagggacggccggctcatcctttaccctgggagaagtcgtcaggaataaagatatcatcggtagaattgcgaagtgggtcgaagaactctgccagttacatgtccacttgatactgagaacaaccatcaaatcataagttgtcgctaactatgtagctgactggaccatccccaaaaatagaccaggtagccagacggataatgagacttggaccatggcgttcgatggcgcactcaatagccaaggtgtaggagcaggcttcattctcacatctcctacaggggataagttcaagcacacaatacacctcgacttcaggggcacgaacaacacagccgagtacgagggcctcctcgcaagaattcgagcagcagcagcacttggcgtgaagcggctaatagtcaaaggagattctgagctaggcgctaagtaagtgccgtaacattacagatactctaatcctgaggtgacccactatgtcggctaagtgcgtaggcattgaagtgtgacatgtgtttaataggattacgtcaaacccgccatttagctggccggcatcaggaattgacccctcggaccagtagattcctcggcgtgctgcaaagccatcggtaagggaatcctggagagg

SEQ ID NO: 12267 - DNA, 582 bp, Oryza sativa
ctataacatgcaattgagctacatctttgcaagttttagtagcccgtttggtccccagaggaacatttgacaaaggagagtttggtaatgcaataccaattttaatggttgttccctcctctgataatgaaccacaaagaaaatatggtacacggttcctcccaggttccttttcccagaatctcggagtaagctacagtaagttgaatatttctttagcaatgttatagagaatcacaatagcatgcataaatcaatagtatatgtgctgtttagtttacctcaaagcaaacagcagttccatcagccacacaataagccgcatagcctggatatcagcaaaacaaaattacaaattcatgaattatcatgaatatttgacatttttactctgctcacatgtgtggaactaaatattgatataaggctataaccgatattccgatacttgacatagatatactatggttggacatgaggtgaaatgcacctgcaatttctgaggcatggacactccagatcaaatattcagacaattgataggtagaaacaccctgagttttcattccaacaaatggcctt

SEQ ID NO: 12268 - DNA, 1197 bp, Oryza sativa
  unsure (1)..(1197): unsure at all n locations
ctggtncnnattttgaactcgtncttctgcaagcagctcatcatcttatgggccatccacaccactccaactntgtccaacanagaaacactgttctttctcgtgtacggctctgaggcagtactccctttagagttaagacatcagagcacatgagtccaaaattactcaaatgaggaacaagaggaaaggcacaacgactatgtgaatcttctcgaagaacatcgagaacgagttgccatccgagcagctgcataccagcagtccctagtccctatgccgatatcaagagaaacgtgttcgagcccgcacacttgccgtcagcgattatgtcctacgacgagttcaatcccaagcagggaagaacaagctttcccccaaatgggagggaccatacacagtggttcgagtattgcggccagacgctttcaaaattgcagatggtgaaagacgcggattatctaattcttggaacattgatatgttacgtaacttttatgtatagctccaatgtatccacatctgtaagttcccttacagttcaatacatatatatatatatatatatatatatatatatatatatatatatatatatatatatatatatatatataccactactcggagggattctggcattctaaaatactgtgttttgccatatatccgccatcacgaatacacctaacaaccctntatgcccgtttgacataccctccaagtgcctatggggaacttggtagggaccccacagcttataggtgatgttagatgctttaaaccataccaccatgtaaaaatcggcttgtagaatgttaaatgagggggttttaaaaaatgtgtaaaagggaaatagttttcaaaattccaccgtggggttgggaaaacaaagttaaaagggggggtttttttaaattttgtttgggaacatttttcaaaaaaaatgggggtggggaatatccgttaaaaaactgcacagttttttgaaaatttctaccaaacttcccaccaggaaataacttttccggttttccaaaatgtggaataccaatggggaaaattcctttaggaactctgggttattgcgggttttccaaccaaaggagaaggcctctaactttgcaaaaaaaaaagaatttgtccaaaaaagcaaagagtttccaaataaatgtgcggggggtattatacaaaaca

SEQ ID NO: 12269 - DNA, 850 bp, Oryza sativa
  unsure (1)..(850): unsure at all n locations
ccttgagatgcacattggttcatcagacggcccaagaagccaccgcccacaatgcagttatattgcaaaacattattcatgattttgtttgtatttttggcactgtcaagtgcaggttgagtgtgcctgttaagcttgaaactgtaggatcgaatcacaagaactaagccaaccagaggggggatgaatggttgatataccccaaaaccaaaacttttagcggaaataaaagttaccctcaaattcgatgtaaatcggtctgaccgaagttgatccgccagtctgaccgcgctcgtgccgccggtctgaccggtgttgatcactcggtccaaccgcctgaagatcacctgccgcgtgtgaagttgccgccggtctgaccgcccttgcgcatcataagaagaaatctcagagtaccacactgcctcacgctcaggacaaacactaggacaatcgttattaaagatgctacttacatgaatacttttcgatgttcccggataagttcaaactgattgaatctcagttatcttgttgtagcatcagtttgaatttgatgtaaaatgtataaacttgcatacttgataaaaatctgcaattgatccatatgtgcacacacaaacatccatttactaaaatgtgttttgccaatgtgtgcacaagtccaagtagcatacttgcaattattgtatggntttattgtttaaacactggtcactattcttnttatttatatggaatggnggatcgaataaatttttaacctagagcacattggcctttgtaccaattttttttgtgaagtgtcctctgtgtataaggtcactttaggcgccacatgatatgtccagtt

SEQ ID NO: 12270 - DNA, 1012 bp, Oryza sativa
cccgccgacggagaagcggcggtggaggtggcggaaccggaggcggcagctggtgggcgtgaggcccgggcgcgcggcgagggggctccgcgtctgcacctccatggcgacggagtcccagctccccgtgccgtgcctgctcacggcgcaggccaagagcagctcctccaacgtcccccagatctcacctccccctcctcctcccgccgccgccgccgccgccggagacacgtcggggccgtccgatccgtccgccatgtgctctcgtcgtcggcggctgcttcccccctttttcttctctctcgctcgcgcacgcttctttgttcgatttttatctcggagagatggatgggatggatagatagcctctgcctctgtgattcgagcgcgcggcggcctcgcgcacccaaaagacaatttcgcgtttctcaggggggtgttttggagaaggcgagcgtgctgttttcaaactggggcccaccttctgcctttctttttattgtacgatccccatattgcccctgattgcgcatactattatcccgtactatatatgagacgcaaatgtcgcaacaaaccgtgtttatttgttaggccttgttccattaatccctataagtaagggattagaggagatttatttcacatctattgtggcgtgaaattattctccctcaatctcctacaatcctattcaatcccctctaaattgaacaaggccttataggagaaaattcttgctctaattccaaaccgcaaatttgatacgcagtactctctctataaaaaaaaactcagcatatccagatttgatgtactataattccatcccaaaataaactcgttatgtacaaattcgttatactaggatatatctctatatccaattcgttgtaatatgtccaattctagtacgaggtttattattattttttttacagagggagtaagttttttttagaaaaaaattgattccagtaaacgtgtaaacgatctaagcaaagtcagaccg

SEQ ID NO: 12271 - DNA, 651 bp, Oryza sativa
tgatacttcttcacttccggcgagcctccagtgccttcttcaactcctcgctcgcctcattcgacaccggcttcggtccactgtccaccatctccttgccgttcccgtggcgatctggcttcgccaggaatggttgtggtggtggtggtgccagggacgacggcatccttcgggcgtcgcctttaccgggcattgaggcggctctatttccaccgatctcggcacgcaggtcctccacggtacgccgcagcatgatgctctctgcattgagcacctcgagctgcctcttgacgagcgagaacccttcagtctgaaattccggcgcatccttcttcttccccttgtcggcatcggaatgtggaggattccgcagcgtgtgctcaattgtgatcttgttcatgaccagcagcggcaacttgttgatggccaggttacccgccttgcggccgtacccgtcgtcggcgagggcggccttcagctcgggcggcacgcgcagcccccactggaaccgcaggctcgccttgctccacagcggcagcacgctcctggtcgtgaggcgcatcccggacagcagcgcgccgaccccgccggcgttcttcccgtcggcggctcacgttcgcggcgaacccgtttcccgctgaacgagaacgc

SEQ ID NO: 12272 - DNA, 1233 bp, Oryza sativa
caacaggaagaatacatggactgatagcagccaagaagacctctctagacttatcatatctttcagaattgatttcttcaaatctaaagtctgatggcagttcaaagctcattgagtcttcatatgcaaaccaaactcgagcatctttctggaagccctcatagaatctgcagaaccagtctttgagcagttcagccgatagctttgctccagaatcggctggtgttgatgcagcttctccatatgacatgcatctgcgatgggttagtacttccccatcgtcacttgtgatcagttctagtcttggaaattgggactctaacagagctggccgattcacagctttcttggcaactaagttaagccatgtttgcagtaaccacgatggtccacctgcacctactactgagcctgcggctatcttggccgatgcgttgttcaacatctgatacagatagccgaggaggattttgcccaaagggatttgcttctttgcttcaagggcttctgctaggaattgccagttggtagtagggccacaacttgatccacagaaaagaaatttctcaagccacattagtagaaaggctgtgtgctcttggggggtgacagatcctatgcccatgtttgcggcgatatagccagaccagccacctattgtttttgttttaaattcaaactggttcttggaatttagggtcatcagattggccgaataggtgacatctaaaccagtgatcatgatgacatcaagcagagtggggggtcatcggcccttgattgaataggaaggcattgagggtgttggaccagaaatatgttgcagaagccatcaggggttcgtccttagctgaatttgctaaagtaagagcaagggcttggctgattccgagttcatcccagtgaccttgcttgctagccaacacacgcttgtaccatacgggctaacttttctcaggagaacttttctcaagcgaaggccaagacttgaaagtatctttccagtgacctagatttgggttggccaatctgatgctcatgtgataggctaggaatcgcaaccagattggaaagatgctacggataaaaatagagaagaagaaaacaagatgagacaaggaaaaaccaatctattgcataaagaagaagatctagccgatggacacgtacctctgcatactcggctgatggcgctgcgaacgggctggcggaagtcgacatcgctgcgggtgg

SEQ ID NO: 12273 - DNA, 1937 bp, Oryza sativa
tgtgcttttggcgtatcggctggtcagtttttgggatttcttgttcatgagagggggattgaggtaactcaaaagagtattaattcaatcaagaagattcaacctctggaggacaagaagaagttgcaggagttgatcggcaagataaattttgttagaagctttatctctaacttatctggaagattagagcgttttacacctttcttgagattgaaagccgatcaagaattcacctggggggcagaagagtagaaggctttgaataatattaaagaaatatcttagttctcctccagttttaatccctccacatgaggggattcctttcagattatatctctcggccggtgagaagtcaatcggctaagttttgattcaggagcttgaagggaaggagagggctgtattttatttgagccacaggctcttggacacagaaacaaggtattctcctgtggaaaagttgtgtttgtgtttgtatttttcttacacaaagttaaggcattatctattgtccaatgaatgcattgtgatatgtaaagccgatgtggttaagtacatgctatcggctccgattttgaaaggtaaggttggaaagtggatatttgctttaacggaatttgatcttcggtatgagtcaacaaaggcgattaagggacaagctatagccgattttattgtggatcatcgtgatgactcaatcggctcagtcgatattgtgccttggactttgttttttgatggatcagtgtgcactcatggttgtggtatcggcttagttataatttcccctcgggggaaagtttcgagtttgcctatactattatgccatatgcaactaacaatcaggctgagtatgaagcagttctcaaggggttgcagttgcttaaggaagttgaggccgatgctgtcgaaattatgggtgattcgttattagtgatcagtcaattggcaggagaatatgaatgcaaaaatgatacattaatggtatacaatgagaagtgccgagagttgatggatggatttcggctggtgattttaaagcatgtatctcgggagcaaaatgttgaagctaataatttggctcaaggggcatcagggtacaagccgatgatgagggatatcaaagtagaagttgccacgataacagccgatgattggaggtatgatgtgtatcaatatttgcagaatctatctcaatcggcttctcagaaattgcattataaagctttgaagtacacattattggatgatgagttgtattatcggatgattgatggggtgttgcttaaatgtctgagtgccgatcaagccatggttgtgatgggtgaggtacatgaaggaatttgtggtactcatcaatcggctgataagatgaagtggctgctttggcgttgtcggagatatgggtccggggatttgcgaagtgtggggaatctaccttcctatcctgctgcgtgtccgtacagcctggccctgcccccgagcacgcgaaccgctggagcagccggggggggtcggggcctcggggtgccacgtcatgcccctcgggcccttgcactgcttcgccccgaggccctcgcctagccaccatttggcggggggagcgagcgaggagggggcccaggctgagcttccattaatacgcgcaacgccccaactgccccgtgtcacatttaatgcagtgaggcagacgtgcggcgtgcgaatctgacgcgccataatcaagaatgaccggtctatgaccggtcatgacaccggtcacgtctgactagaccgacaaccgtactcccacgtcgcgtctgctcccggttgagtgggggtaggtatgacccgtcccatcggagggtcattcggacggcggccaccacaagtcttcatccattaatgggggaatgatagggctgtcccccgtgtcaggcgagggacggcgc

SEQ ID NO: 12274 - DNA, 1197 bp, Oryza sativa
catccacaccacgctaagttttcacccccacccgtcaaaaggcagtgggcggtcccctactgcgccgcggtgaatccggcagctggacaacctgacaccccggccgacccaactccatcacgcccaccctcgccaccggtgcctaggaaagggtcgagctatacttcagatcaagcagttacccactcccgcttgtggtaagcacggtaagtctcccagggtttcccgtgaaccggtccttaactgccatgggtgcgaccagcaaaaccatgcacccacagcccaccgtccagtgtattttaattagctaacaccattgcggtggcaccaatccaaagctatgctcatagttaaagtctatgtaataatgtgatccctatttgtgtgctagttgagctaagcatggctaagcatttcctaaaccaacatctaatcattttgatacccaggttatcaatggcatatggtaaacaataaatggctgagtaataggacccatcccagatgacattgtaaaagaatgcgacatttaatagaaatgcgggacatttgtagattgggtacaatatgatcaattgtaatgcatgacttgccttactctcgcactgatgagaccacagcaacgtcttcgagaaactgcggatcgacgaaacggccgaaatctacgcgacaaacaaagcacacaagcaaaacatgctataagactactgaaacaggaaacaaaaccatttttaatggattctagggatttttatgaatttactgagacttgaatggacttaaacggagctcggatgaattactaataaagaaaaagtccttaattatttattgcgtaataaatcccaagggctgacgtcacccaaggggggggcgccggcaagcggggtccgcatgtcagtggcacaaggggagagggagggggcgccggctggtggctcaaggggaggggtggtccaccagctggtggggcccaccgggcagcagcacaaggcgggaggggagtggatggtggttcggcacggctcaagccggccgaccatggcaaggcggcagcggccgcaggcggcctccgacgacgaccggcggacggcgaggcggcggcggccggcgtgaaggcgacggcgcacggccggaacagcggcgtggctcggcgctcgcgggaaggggaaggaaaggaggaaaggtgtcctcacc

SEQ ID NO: 12275 - DNA, 4086 bp, Oryza sativa
  unsure (1)..(4086): unsure at all n locations
ataacagcattaaactaaagaaccatgtgcttcctttttatgtattgttactgcttctttataggcttgtagctttgcttgtgtgcttcgtgtagcttctgtcgttccagaggttcctgaagcgtggttcgtggtcgtcgccgaatgttcggaaggccattctctctgagcaaggcaagtcacatcatccttgagcatattgaatcccagtttataaaattattttgatttaaattaatgcattatctctttatttaaattcctgcgttatcactgttttatttagccatgcctatttacctttgttatgaccttattattatttctattgttattattaccttgttcaccctaggataaacaaaaccccaactagtgggtactctatttatggttccactagtatgaacttaggtagatgcttcgctgattaattaggcaacattaggtggttttataactttagactttgggaattctcatatcatttagacactatggactggttgccttatgttggaattggacacacacctccccctctattcaaaacccccaaaatggttttagcctgggctcgaggtgcgtggttgggttttgttagtcgtacctcgggtactataaggattaagctcaggcctctattgcaaagcactaccatacttccacatgtctagtgggtaaggctaagtttgtggctcagtttggtcataaacaaaggtacacggatggagatggacgaagtcggggctcgatggacatctctaggacaaatgaaggctacacgagctgcggctcggtagttgagatgtcatggcacagggccggtgttctgctgctaggggctcaatcctacctacctgtctcgggggttccagccgtaggcggggttgggtcggtactcttgtctatggctaggatgggttgggaactatgtcacatcgtccgtccgtatgccgtggtggtatgtggcacgtggttacacgtgaggaagacgtgtcttgtgggtaatgatgtacacctctgatcagagtataatctatgcgaatagccgcgccctcggttatgggcaagcctagcaatgtactcaagttagtgttttaattcttaaaaccgcttaacaactaaaatgtgaaatggttgggctgggttggcttgggacgagctgggacctgggtctggtggctagttcggtctgaatcatcgtaggccttgggttaaggcaggttcgtgtgggttcacagccttgattaataacattgtgtagctctagaatcatctttacaaaatagctttgggcaatgaagtaacttttaaatgttgtttactgcaaaacttaacccctattattatccccttgtacccccttgcattaatcatgcatctgccggtgtggcttgctgagtattgtggttgtactcattcttgctctatctttacccccttcagtaagagaagctttggagaagaagtcgtaggtggagtcctggcttataccctagttgagcgcctgtgaagatggaaccgtcggcccgctagtccgctgctgattatttctgtttgtcaggccttaagtgcctttgtaataatgtaaatattatcgatataataaagatgtgccttttgtatcatgtttgtttggtgtaccccagcttttcctgggacggggattaatacactagcgttctggaaaaggtatttttccgggcgcgacagtcaccgaattgggaaggaccgtttcaaatccataaggttgtgtccaaaggagtttatatgttacaaggacttgatggaaaagtttatggacgagcacttaatggcaagtacttgaagagatattacccaagtgtttgggttaatgcatgatcggttgggtgttgccgatgcatgatagccgatgtgtttacatcgccttgagatggccgatatagttatatcgcccttagttgttttactatcataatcggttgtgttttgccaatgtatgacggccgatatagttatatcgcccttagttgttttattatcataatcggttgtgttctgccgatgtatgatggtcgatatttaatatatcgcccttagtccaaattataattttatcgatgccttcatcattgcaaaattaggggggcacatatatacaaaagttgagaattatcggcagaaaggttcagtgataatcaaaaggagtaccaaagtttcttagccgattacaaaaattttctaagtcctattacaaagataatcatctagacaagttacgctggattgccgatacagcccgttggctaatttgatctacttcttcaatagcttggatatcttgggcgtcggttccaggaatgaccttgagagactggtcaatcggcccgttcctgatagccattttagctgacttgttcttcgacgccttgggatantcagttnnaacttctatcnntgctcaagagccatttcggcgttgcattcctctagttgagctatgagatctattctgcgagcctcaagccgatctattttagtttgaattggcccaaccaagagttgatctagcttagctttctcttcatgaacggtttgccgattggtttgaatagtggcttcaatatcccttcgctctcgccgatcggctatcctttgcttggccttttctaccttgaattgatgttgctcgaggtatacagctggagaaatggtatttgccagatcattcgggattagggattgaatctctgcaaatcttgcccggattgtaccgcagtcaaccaccaagttgtctaatgatgtctctagccgatgagatatgtcttcaagagttcttttgacatcgtcatctagagggactagagttttgcttgttattttttcttctacctcttcatcaaagtaatccttgatgtcaaacaagaacagatcggctaaagcctacaaaaggaaaattgaagacagttaaatttcaaagcgaattatatagccgatctaagatttatgacaatgaaagacttactggtatggcaggagcagctcgttgttcttcctcctcaatattgtggctgcctgcagccgatggagtacgatcactgggcgtcgactgcacaggaggcgaaggaggaggagaaggctgaaaaaaagacaagtgttaattaacatcagttatgatcatatttaaaggattttatagaggaaaccttaccggtggagctggtttagatggtgctggtgctattttttcttgacgacagttttttttttctacaaatacaaaattgataaccaatcaactctgcaagttttttcaggagatgatcaagatgggttatttccccttgagaagtgagctggagcagcaggagttggaggagtctatttgcgtgaagccgatgatgttttttctcctaagtcactcagttcggctgcagcttggtcgacatcttccttaatctcttcttcatctagggcttgttctatggatggatctaaggcaggcaagtcatcggttggcttggatttcttcttcttggcctttctctttggagccagagccgatggattagcggctgatgccttagttttcctattcctactggcatcagctagttctcttagctgcccttggagtagacttgaggtcctgggggcatggtagccgatgacgggggagttagtccacctccatttggtaagaggcctgaagcatactcgatgtccttgccgctgttgcttttgcgaggatgggaagattctattgtctgcaagacagaagatgagactagtaaaggtacaaatcggctgacaattattttacaggattgacaaagtaaggatttacctgagggataacatctgggaatagatctgtcatgtacatggaagctgattggtggaacaagtgctgcttccattcaccccaccatctgtcaaagttcctgctcctgaactttgctagttctacatttttgatgctgcccaaagggggtcctgggatgttcaacagccgatccatcatcaatgttgatgagatttcgcctctaaattgaattttatcggcaaagataaaagccgattggcagctgtcccatccca

SEQ ID NO: 12276 - DNA, 9119 bp, Oryza sativa
ttcctgcagccccacgtgacgccgtcgcccggggtagatgagccgccgtcgccaccaacctacaccggccggttgcgttgcattgatggtcgcggttgccccctctctccgtgccgttgagtggagcaccgagccgggcggtgtctttgccagagctgggtgtcacggcggcggcaagccaagaagagcttggggaagggcaagggcgagcccgccggcgagatgggcgtggtaggcgtcggaagggatggtggggctgggagcgtggcgccatgtgtgaccgcgtggcaaggcgttgcgcggagaaggggatcgagccccgtcctcttgtggtgtcggctcggctcggctgagctagggcttccaagccagcctcaaaaagaggggaaagaaaaggagagaaaagaagagagggaggagggaaactagactttttctgtgcagggagggctgagggaccagaaacagacttcactgatggtccttagatgaattgggtcagtaacagggggaggaaaggtagaggatggtggaaggtgaggggaaagtttaagcttcccaagagaggggagtggagggagcaagaatagactttctcgggcaatacagggcagaggacttgacaggagaagggaaggaataagattactaagcttttctttttaagaagaccataaaaaaaagaaactcaagtttaagaattttggtataaaagaaacttcaaataaaaagaaaattggctgaagaatcggcacgatgctgagattgagatcgatctccgaccttaactatggcaaaaacccaagttgttacattgatattgcgaaccactgggtctagtaccagggggtactaccccgggtggaccactcggtcgggatgatccgagcggtcaaacttgattccaacttcagaccatcgaagatattgaggtgtttctggctggacggcgttgatttccctatcaatcagcttctatttcctcttggattcataatcttgtggcccaccgaagatgtgattgagctcttttcggggatcttgaaaacctggttgtccctgatcggtatcatctttcttttgagttgaagtactatgctctgtgtcagtcggcttcttcaattgtgtggcatattgctcggcaaattacttgtaaataaaacaatcctttgcaaattagtgtgatgtgactaggggccgttcatgatcttgttgtaggtgctgacacgcggtcgttgatatgatgaatgcttgtgaaagcggcgactccttcatcgttcccatcgttgcgatccggtttgtgatgacgttgtcggtcgtctctgtctgcaccacgacgtttgagggtgtcaagtaagtggacgggctaccgataggggtgaaaacgataacggtaattaccgaccgaccggtgttccttttcgactttctaccggccaagccatatggaaatggtaatcgaccgaaacaaatggaaattgtaaaaaatatggaaatgaaaacggaaatggttttgctgttataccgatcgtttccgtatttaccgtattcttgcggaaattaccgtttcttataatatggtaattaccgtattctaaatatgtcgatattatagggcatgtctatacttgacccacagcttacagattgaatgactcttcaataaaatctctaacttttgtacatggctaaaatgaagttaatttataatttatatagtataagcttgaatttatctatatatataacatacttatgtaaagtttaatatatgtttttatagtttaatgtttccatatttgttaccagttttcgatctgtaccgacatgtttccgtccgtattgttccgttttcggtttttcgataatttcgatatcatttttgttttcgactttactgtttccgatttcgtttccgagaaaaatatggttacggaaatggttgaggctgttttccgatcgtttctgaccgttttcatccctagctgccgatgatgagggagcgatgctcttgatgtctatcggggggagagtggacggagttttcccgacaagccatgccatcatgacgtgatcttgaattagcggcgctaaggcttggtttgtgatagtcttgagatcggagaggtggagaccctgactgccaaatggtgtatgaaccgaggcagagggctgccgagtgcttccctagttgactggactgaagcgggaaggaagacggagtcgtcgatgcccgaaacgaatcctattgcagtagtcggcgaaaaacttgatgtaacccctacttggcgcgccaactatcgaaacaagatttcggcaatactaaaaggggtagcaatcaagctggaaaagtggatgggtcagtagagaaaggtttatacaggttcaggccttgtcgatgagaagtaatactctactcctgtctggggaattattccgccgagtgtattattgatctaacgatctgggagaaaagttctgccgccctaggagtactcggacccctccttatatagggggaggaaccgagatttacaatgtacagcccatattacttacggactaggctaacagatatattacaattgtaactaactaggactacgggatatttccttgatatacaaattaatataattcccgagtccttttctaaacatattctacctgtataagctatcccctatacacagtcggatatacttgccatgtgggtatgtggtacccataatctccacaatttgtgtgcttaaattcctaaaaaaaatattggcaaagaagctgatccttactgttcgtatacgagcagttcctttgttgcaaagcaatgagcagtaaaactttaaatggaatttgaaatcatatgactttcctgcaaaaagttcaatccaaaggaggcttaaaaaatatcgtgaattgagatcacctacagttgctagtatcatcacgtacgaccatcgttggatctctcacatcacacaacagtattgtccattactctctctatcccataaagaagcaacacctagctacgcaatgcaaaattaaataagaggataaaggaccaaaataccccttattaatagcaaactagtattggcggatattgttgacgagaaatccatgctcagccgatggtgccagaactgtgttggtgcgaactaaatcgacgaacacaacggcttggtagatctgcttagctccagtgccggtccaaatcttggtgagatgcgggcgtgccagtcagtttgatcctacaactgacaagatatacaaagagctgatcggctatgttaacgaccaaatttggtaattcaagtatcggagatggaaccgaagcggaatccaagatagagatcgttccggaaacagagcaagagtcagctaaagtctaaatcagccgcgacaagaatcggcagagttcgagtcggataaggttagccgattgagccgattccaacaatgtgactcggtacacgttgtcaggttgagttaatgtgcttcatatggattgccacgcacggattaagtcctgaaaaggcaattgtatctattagttcggatattttatgtaatttccttatagataagtttgggtaaaagtctgccgcaaagacttatggtatcttagagtttgttagagataagagtcatgtccgataaggacattttgtatctcgggtataaatatgacccgaacccatgtaatcaaataacacacgttcaatacaatctcggcgcatcgccacccttttactttcgtttactttcgacgagtcctcgctttcgggttgagctgcatcggtttcgatcttcagctagaggtaaaacttgttatggcagcttgcgttctcgggattagtgcttccatctttatgatactctaattttgtttatgtaattcatcgagttatcatatatcttatataatctttgacaatattgttatttaactttcaatcggctaacatctatcattggaaggcagccgattaagttaaataccaacgttgacctagattatataagatatccaccaccctatgaaacactcaacggcttgattgtctagatattgtccttcttttcatacttatagctgtattagtttagtttgaccttataagtcgtgattaaaatctcaatctctagcatgcttttttgttgctgattagggtttcatcggggtttcagctgatcttacctgatttaactactttatatcttatatgcttgattgatatgttaaatctgccctttatgttaagatcttgttgtatttaggtatattaagttcttgttgcacttaggtatattaagcttcctgtttgatatattttgcttgctttaatatcttaatatagagtggtatcggagtactagccgatacatgctagatttatctgatcggctatgctgtgaatgcttataatctccttgttaatatatatttcgatctaagtgatttatactgtctcggcatggcgaccgatctatcctaatcacttgatttaagtatatattgacggaagtattatataccattaatagctatagctgatcgaatagatttagttatttcttgcttatttatgactgccgatcaattcaaatatgacattggctcaaagataaatgatacgtcattggcgactggccgatcggctattgttcatagatttaaccgctattttcctatctttatttcttgttggttgcaggatcaaatcaattggcacactcacgaacctaaaggcaagattttttggacctgcactgaagttaagcagatcttccaggcctcgtgtttttcgcattaacacgcttttggcacgcccggtgggacacgacaaacatgtcagcagataagccacctccgccatcaatgggcaagtcgttagaccctcaaaccaagattccaaaactgactgggtccgatgttaataatgggaacattgttccagtcactgtcgacaagctgtcactagaacaaaaaaaggattttgaattcatgatgaagagcgctcaggagcaattcatgaaatcgttcgcagaaacccgcaggaaagtttaccaaaagtacaaagtaaaagtagttgctgccgacgaagttggctcaagctcatcccaaggtgataaaggcattgcagatggctcaggcaataaagttgacggccttcaggatggagtggttgaggatcttggtgaagataacaatgaagtgcaaccgcagtttaacaacttccaagatcagattaactatgcagcgcaacatgctttgatcaactaatcaggagacctagtcaataccttaacaaacatggtaaagtctgtggttgatggtacaatagctgagcatcaagttgcgggaccagtttatctttcaggaggcatcttcccatattacaaaaacttggtaactggtaaccagaagtttgctaccaatgcaccaccaattcagccgatggcatcagcttcgactccagcaccacctgcgccatcatcggcaccaaggcaaataattaataatcctcgcctcttgtctagcgaacaaccgcaacatgctggtcagaatatcaatcggctgtcccgggagcaaattgcttgaatgtttttgccaactcagccaactggtggaccaattcagcagacgccgccaaggcagcagacagttcagtcgattcaacagcagacaactcagccgatacagcaacagatggtccagctgatgccgactgggttgaggacgcctgataatcggctgacgcatcaaaatgtgactcaggttgtccctgagcatctggtacacattgtacaactagatcaatcggttgcagcctaagttatccctgagcacttagtgcgtaatattcagccgaatttccataattgtcaagggggtaacttcaattatcaatatcagcctccttcgcctcatgctcagtatcaacaagggggatcacctcagcctcagtatactcctcagttcaaccagtttgagccgatacagcaacaaaagcaagggtgcctcaacagagacaatgggacgatatgattgcagatgtgatgagggagcagtttgggcttaagccgaaggatactggaaacttgtatcggcatccataccttgagtggtttgagagggttccattacctaaccgatacaaagttccagatttttcaaaattcttaggacaagacaatgtctcaacttatgaacatgtcagccgattcttggctcaatgtggtgaggcatcggctattgacgctttaagggttaggttgtttcctttgtccttgtccggatcggcatttacttggttttcttctttgccctacaaatctgtcaatagctgggccgatttggagaaacagtttcacagttatttttacagtggaatccatgagatgaaactatctgacttgacagcaatcagacaaaggcatgataaacctatgcaggattacattcagagattcagacagataaggaataggtgctacagtttggctttgaccgattcttagctagccgatctggcttttcagggtctgatagctccgatcaaggagaaattttcatctcaggagttcgaaagcttatctcatcttgcacagaaggtaaccctgcatgaacaaatgtttgcagaggctaagaagaatatcaaaaagatcaaccacgtgtacccttacatgtatggttccgatgaagaggatgattccgaagtagcagtagtcgagtgggtcaggagcaagaaggttgtgccattgtcacgactggaattaacccaataggcattccatacatgcgtgtattattccttgtcccaggaggcaaggtacaccaaatgttgatacaattcagagtttaacaagcggaagcgtaaatagttaatttattacatgggcgacgaaggcccagcacacacgaagataaacgaaaaacagctgaagactagggcgacgaccacagacacttgacggcaggcacgagctagacactaaagccttcatcctccaggaactcctcttctgggttggggaaaaaattgagcaagattgagtacaaccaccgtactcagcaagacacacccacgaatgcagaataaatgcaaaggagtacaaggcggttataataaaggggttagggtttgcagtaaacagcattaacaagacttttagttgctcagggtcattttgtaaagacgatcctagagctacacagtgttattaatcaaggccgtgaacccgcacaaacctgccttaacccaagacctacgatgattcagactaaactggcaaccagacctgggtcccagctcatcccaagccaaccctggccaaccattccacattttagttgttaaccatgttttaagaaataaaccactaacttgggtacattgctaggctttgatgtgcactagggttcccgatcttccgaaaggttctgataaacaaatatttgggcggagtcgcgacacaaatcgatccggcttcatgaacgcgcacgctcttgagccccgcaatcgcagcaccacgtctcctctggttatcacccgtgtcgaaacgcggatgacctcgccgagaaggctaatccctgtttgccaattgaagaatacaaacaagaatgagatagaaaacaaccaaaattgcagatgaatgattaagctcacaagttggggtcttacaaaccgatctagcggcgaaactgttctcgatagaataatctaagaaaaacccaaaaacctaaagatggcggcgggtactgatacatagagtttagggtcgtgcaaaccgctctcgatgcaaccctaatggagaacccaacacgatacacggcccaaaggcccaaatacggtgacgcaacaccgggatagattctagacatcaacttgttctgtcgattcccattgactcggaaagaatttggacgtgggaccaaaaccattggaaatgcgatcttcttagctttccatccatataaagaatgccccaatccgagcacgtatgcgacctgggcgcccattttagtgtagactggttctagactccgaattgcacccgaggtcgacttggtttgggcctccaccttgacttggacatcctcgaggatcctccatggctctaagtccttctccaagtgtctccttgtcccctccattgtacctaatcacaatataatcattaggtagcaatctattctcgaattcatacaaagaagaacataggaatgagctcacctctaaattcaattgtcgcgcacgagctcttgttatcggtccttgaatgaccgttggaggattgttgtttgtatccgaagtagtgatgtccgcattaggcttgcccataaccgagggcgcggctattcggatagattatactctgatcagagatgtacatctttaccgacaagacacgtcttcctcatgtgtaaccgtgcgccacataccaccacggcatgcggacggaagacgtgacatagttcccaacccatcctagccataaacaagagtaccgacccaaccctggctacggccggaattcctgagacaggtaacctaggttgagcccctagcagcaggacaccggccctgtgccatgacatctcgactaccgggccacggctcgtgtagccttcatttgtcctagaggtgtccatcgagccccgacttcgtccatccctatccgtgtacttttgcccatgaccagactgagccacaaactaagccttacccactagacatgtggaagtatggtagtgctttgcaacagaggcccaaagaccggtccttatagtggccgaggtgctactatcaaaaccatgcacctcgagcccagtctaaaactattttgggggttttgaatggaggagaaggggtatgtccattttcacataagccaaccattccataatatccaaatgatatgtgcatttccaaagtctaaagtaataaaaccacctaatattgcctaatttatcagcgaagcatctacctaaattcatactagtggaaccatgaatagagtacccactagttggggttttgtttatcctagggtgaacaaggtaataataacaatagcaataataatgaggtcataacaaaggtaaataa

SEQ ID NO: 12277 - DNA, 2351 bp, Oryza sativa
cagccggcgccgtgggccccactcgtcagccgcacctaagggcacgggtggctgacggctgggccccatgcggcggccacacggcgcgcccggaggcagccacgtcggcgtggccggcgggaggcggcggtccacggctcacctcggtcgacgacggcgacggaggaggcggtcggtggcggagggagacggtggcgcggctcgggttgacgaggacggaggtgttccggcggtcggcgagctcggctaggcggtggacggggtcggcggcggtgcggtgaagccggaggagacgacgtcgaggcgggggacggtcctggcgagcggctaggcccggccgaaggtcgacggcgacggcagagagagaggacaacggcgtgggcgttaatccgacggggaggaggggcggcaaatggcggaaacggactagggaggtacggggagggtttatatagggttgggagtgagagagggcagctagagggtaaggaaaccagcgtgggggtcccggtaggcatcaatggcaccggcgagatttgcgggagcaaatctggccgtttgaatgcgggagggggaggggaaaatgggggggaaagggagagggaatcacgggggacatttcccccctcttgattgcacgcgggaacagtcggggcggcggatttggcggcggtggcgctaggcgcaggcggagagagcggcgggaggaagggatgacgggtgggccccacccgttagcgagggtggcgggcaggcggaatttggccgagagagagagggaggggatttttagggttttctttttatgaaaccttttcgactttgtttatttattgataattattatttgtgctgtgaaaattctactaaaatttatttacacattttaggcttttaggaaatgtacaaaaatcctccaagccttatttgacttttaactttgcacattttaattttggaggctttcacttggattttaattattctaggcataattttaatgatatatttttagggttgtattgggacgtgataaacctaccccccttaaaaggaatctcgaccccgagattcggaagaactggcaaagaggttgggatgggctgccttcagcttgtcttcatgctcccaagtagattcttcctcggcgtggttgctccactggagcttgcaaaaacggattacccgattccttgtcctgcgctccattgtgtccagaatcttcactagcttgtccacgtaggtcaagtcttcacgaacatcaatctgctctgaatcggcctgctcggacggcactcgaagacatttcttgagctgcgacacgtggaacacatcgtgcacattgcccaaggatgcgggcagctccaactggtaagcaacttcttcgcgtcgagcgatgatacggaaaggtcccacatacctaggtgcaagcttcccttttgtctgaaacctgtgcactccccgtagcggcgtgacccgaagatacacaaaatcgtccactgtgaactccagatcgcggcgtcggttatctgcataacttttctgccgagactgtgccaactttaggttatcccgaatggttctgactttagcttcagcttctcttaggatatcagtcccgaatacttggctttccccaacttggtcccacaacagtggagtccggcatttgcgtccatacaacgcttcatagggtgccatttgtatgtaggagaactcagcataggggacacttttatcccaggtcttcccaaaatcccgaacacaagtgtggagcatgtcttctaggacctgattcagacgctcggtctgtccatccatctgcgggtgataagcggtgctaaaattcaatcgggtgcccagctcttcttggagcttcttccagaagtgaggtgaattggcttcccctatcagacataattttcttaggaacgccatggagactcacgatcctggcgaagtaaagttgagctaacttgttccctccataggtggtcttcacagggatgaatcgagccaccttggttagtcgatccacgactacccatatagaatcatatccaccttgggtttttggaagtccggtgaagaaatccatcccaatttcatcctatttccattatggtatctgtagaggttggaggagtccggccggtcgttggtgctcagctttgacacgccgacacacatcacaaagggccacgaactctgcgatttccagcttcatactgacccatcaatatttctctttcaagtctaagtacatcttcgtactgccagggtggctggaataaggactttcatgagcttcctgaagtatcaactgtttaagttccttgtcgtccagaatg

SEQ ID NO: 12278 - DNA, 7413 bp, Oryza sativa
cagtgcagccaagaatccatggctaatgacacttaggttcagggcttccaactgttgattaagttctggtggaatgccgcggacgcaaagagaactgcaatagcctttttgactcagcgcgtcggccaccacgttggccttaccagggtgataatggattcccacatcataatctttgatgagctctaaccatcttctctgctgaagattcagatccgactgggtgaagatgtatttcaaactcttatgattggtgtatatttcgcagcgatttccaaagagataatgccgccagatcttcagagaatggaccatagcggccaattccaagtcatgggaaggatagttgccttcatggggtcgtagctggagtgaagcataagctaccacatgaccttcttgcattaacacacaccccaatccttggcccgaagcgtcatagtacaccaggaaatccttgcgattatcaggtaagattaacactggcgaggaaaccaacttttccttgagagtttgaaatgctctctcacactgcggactccacacaaatttttcttccttctttagcaactacgtcatgggcctggcaattttggagaaattctcgatgaacctctgatagtacctaccaaacccaagaaactgcggacctgggtgaccgtcttgggttgcttccaattggttatggctgttactgtttcgggatccacagtaactcctttagcagatatcacatgccctaagaacttgacttcggacaatcagaattcacacttgctgagcttggcatacaactgatgttcccggagctttcccaacaccagacggagatgctgcttatgttcttcctctgactgtgagtacaccagtatgtcgtcaataaagaccacaacgaacttttccaaatactccatgaacaccttgttcattaaattcatgaagaaggtaggagcgttggtcagaccgaacgacatcaccgtgaattcatacagcccgtactgcatggtgaatgcggtcttagggatatcttctgcacagatacgcaactggtgatatccggaacgaagatcaatcttggaaaagacagtggcaccttcaagctgatcgaacaaatcatcaatccggggaagagggtacttgtttttgatagtgacttcattaagagctcggtagtcaacgcacatcctctttgtcttgtctttcttttctacaaaaatcatgggagcacctcagggggaagtgctcggccatatataccccttctctttcaactcttccaactgcttcttgactgcggccaattcatttgttgccacacggtagggtcgcttgtacatgggagcggttcctagagcaagatctatcctgaactcaatctcccgctttgggcggcataccgggttgctcttccggaaacacatcaccgaactcgttggctacgggtatttctgatagtcctagctaatgaagtactgagttgccggtgggagttgggtgcgcaaagaagacagccggttgatcaggcttccggtacacagtgacagtacgtcttgtgcaatccactactacttggaattgggtcaaccaattgatcccgaggatcacatccaagtccttggtgtcaagaaggatcagatccgaggggaaaggaattccctggatctctatagatacggccggactataatactttgttgtcatagcccctccaggggtggtgatgagcagagagctcctaagctttgctacccccagttgatttctccccatgaattgcacagatataaatgagtgggaagctccagagtcaaacaaaatgatagtggggatggaatgaatgaagaacgtaccggcgatgacatctggagttgtcagcacatcttctgtagtaatgtggttcacacgaccccgagtggcatcctttccatcattgttggggtggggaggcgcttggccttgctgacgcctcggcttcgggcatttatccgtgaagtgcctaggctcaaaacagtagaagcacagacgcggctgaccttgaacatccctgcgtccttgactaggctgcacggccggtgcagggggacggggtggaaggttccctttctagttctgctgctgctgcggctgtgggacgcaaaccacaaattaaggtcgtggcgcggggcgaggctgctgttgctgctgctgctgtgaggaggatccccctggatagggattggtgtagcggatcctttggttagccccatgttgattacggaaattcgccaagcgacgcttgtgtgactccagttccttgtgcttggtctccaggcggatgctcttgtccaccaggcgctggaaatcagtgtaatccccggtgaccagacgcaccgaaaagttcagggtccattcctaccagaaacttctcctgcttttcttcatcttcacgaacatcctcctgggcgtaccgggccaggttattgaactcatgcaaatactccgtaacagaacggttgccttgcttcaactcccgaaattccctcttcttgagggccatgactccagctggcacgtgggtcctccggaaagcggcggtgaagcaggcctaggtgattggctgcccttctggttgtgtagcctggaagtggtcccaccatagtgatgcgggcccctgcaactgatgggttgcgaagataactttctcctcatcattgcactggacggtgtccaactttttccccacggcatgcaaccaatccaaggcatccacggggttattggagctagacaaggtaggcgggcggatgcggaggaactcggcaagcttggagtgctgtgggggtggtggtggtggtggagcattgtgttgcagcggattctggatgtggtggaggaaagcagccatcatgttggcctgctgggcaaggatttgggtgaggatggggttggtgtcagttggcggtggtggcggcagagggggaggtggaggtgggctgccatggttgttgtggttgctgctttcggggtgacagccctcaccggtagcagcgcttctcctggttgtcaccatctaaagattccacatagaaccagaaaacagaaagagttgacgattaaaactaaccacccacgactaccataattcttgaatttatttctgctattaaattggttcattaaggttcaagtcgcttatgcgaaataaataaagacaggctccgacacagttataccacacaccggtataaccatgccccacacgactctgcaagaagacaaacgaaaagaacacacgcgcgggcctactagctgctcgtctacttctgcgacgggccggggcggaaggtgagcaacagcacatcctctgtgctgccaacgccaaaggctccctcctcctgaggaaccaagggtgcgggctcggcgcaaggagtctccacgaagcaggtccacgccaaggactgacgaacaagctcaggcctggaggtactcttgcgggcggtgatcttctgactgcaacagacacggcggtgcttggggtggcagacctgtccttaagcaatcttaagctgacacagctgcgcttccacggcgtccaactccttcttcagctagaaattctcctgacgcagctccaggatcttcatgttgttctcgaccaaaccacggcgcaccatatcgatggaaatcgatacgggccgtgtcatacgcctccactatgcacgccaaatgcatgatggtagcgtcatcctccgcgctagcatccctgaaggcggcgtagtcgcgggttcctccatgacgagggtggtagtggtagggcgagtgctgcaactcgtccggatagactggtgaagagtgccgatggcgaggagcacggcgttctgccaagcggcggggaaggagtctccacccgcggtgactgccagcgaattgctctcgggggagctggtgaggatcacagtagtgacctcccaagcggcacggggctgtgcatcgtcaccatcctgctgtgaaagcttcttgccctggtagtccactccatgcggatatccctggacaacgcacatgccccgcagctccaaagcgaagccagtcagatcaagaccacaccggttgaggttgttggccatctataaacaaaggcaaaagaaaaattttagagatcagcttttgatgagaaataaagcagcaagacagagaaagactaaaggattttcgcaaataaggggtggttttttatttcaaaatacgaataaggcttggggtctaaggctcgtcctagggtcaaggaggctctgataccaacttgcacgatcagaattaacccaacaggcattccatacatgcgggtattatccttgtcccaggaggcaaggtacaccaaaagttgatacaattcagagtttaacaagcggaagcgtaaatagttaatttattacatgggcgacgaaggcctagcacacatgaagagaaacgaaaaacaatggaagactagggcgacgaccacaggcacttcacggtaggcacgagctagacaccaaagccttcatcctccaggaactcctcttctggattggggaaaaaaatgagcaagattgagtacaaccaccgtactcaacaagacacccacgaatgcagaataaatgcaaaggagtacaagggggttataataaaggggttagggtttgcagtaaacagcattaacaagacttttagttgcttagggtcattttgtaaagacgatcctagagctacacagtgttattaatcaaggccatgaacacgcacgaatctgccttaacccacggcctacgatgattcagaccgaactggcaacccgacctgggtcccaactcgtcctaggccaacccaggccaaccattccacatttttgttgttaagcaagttttaagaattaaaccactaacatgggtacgttgctaggcttgcccataaccgagggcgcggctattcgaatagattatactctaatcagaggtgtacatctatacccacaagacacgtcttcctcatatgtaaccacgcgccacataccaccacggcatacggacggaagacgtgacatagttcctaacccatcctagccattaacaagagtaccaacccaaccctagctacggctgggattcccgagacaggtaaccaaggttgagaccctagcagtaagacaccggccatgtgccatgacatctcgactacctgggcgcggctcgtgtagccttcatttgtcctagagatgtccatcgagccccgacttcaaccatccctatccgtgtacttttgcccatgacaagactgagacacaaactaagccttacccactagacatgtggaagtacggtagtgctttgcaatagaggcccgaagaccggtccttatagtggccgaggtgctactatcaaaacaatacacctcgagcccagcctaaaaccatttttggggttttgaatggaggagaaggggtgtgtccatttccacataagccaaccattccatattgtccaaatgatatgtgcatttcaaaagtctaaagtaataaaaccacctaatgttgcctaatttatcagcgaagcatctacctaaattcatactagtggaaccatgaatagagtacctattagttggggttttgtttatcctagggtgaacaaggtaataataacattagcaataatgaggaggtcataacaaaggtaaataggcatggctaaataaacagtgataacgcgggaatttaaataaagcaataatgcaataatttaaacctaaataattttataaactgggattcaatatgctcaaggatgatgtgacttgccttgctcgctttcccaaaagtcggcttcaacctccacgtagagcggatcttctgaagctgcagcgtctacacgaccaatgaaatggaaaaaggcttttactctaataaactccatataacaaacaaaaacaaagcacaaaaatgggtccttgacttcttaaggaaaaattagagacttgaacagtccaattccgagtacaaacgaccaagttatggccacttgaagtttattgctctttaagtcaatatttgtgaatttcttcatttaattttttagttaaaacgatttattgcgtcagccgaggggagggggcgcgcaggctgggttcacaggagtggtgggccccacgcggcagcccctcggttcacggtgaaccgggtgcacccgcgggctcaccagccggcgccgtgggccccacgcgtcagccgcacccgagggcacgggcggctgacggcggggccccacgcagtagccacacggcgtgcagggaggcggcgcccgcgtccctatggtcgccggcggcagccataggcatggcggagcggcggccgagagagaggaagggaagggtgaaaggaggcagcggtccacggctcaccccgggcgacgacagcgacggaggaggcgatcggagtggagggagacggtggcgcggctcgggttcgcggggacggcggcgttccggcggtcggcgagctcggcgaggcgatggacggggttggtggtggtgcggcgaagctggaggagatgacgccgaggcgggggacggtcccgggaagcgactaggcccggccgaaagtcgaaggcgacggcggagagagaggacaacggcgcgggcgcgaatccgacaaggaggaggggcggcaaacggcggaaatggacgagggaggtacgaggagggtttatatagggttgggagtgaaagagggcgaccggaggggaaggaaaccggcgcgggggttatggtcggcatcaatggcgccggtgtgatttgcaggagcaaatccggccgtttgaatgtgggagggggaggggaaaatagggggaaagggagagggaatcacggggaacatttcccccctcttaattgcacgccagaacagtcgggggcggcggatttggtggcggcggcgctaggcgcgggcggaaagagcggcgggagcggcgggaggagggggatgacgggtgggccccactcatcagtgagggtggcgggcgggcccgtccgtcagcggcgcgcttgtggggaggaggctttttagggttttctttttataaaaccttttcgactttgtttatttcttgataattattatttgtgctctgaaaattccactaaaatttatttacaccttttcggcttttaggaaatatacaaaaatcctccaagccttatttgacttttaagtttgcacattttaattttggaggctttcacttggattttaattattctaggcataattttaaggatatagttttagcgtcgttttgggacgtgacagccatgcccatgggtgagaagttctgggaaagaggaaagatttgattttgatatcaccatggctgataagattttcgatttaaagctaagaaa

SEQ ID NO: 12279 - DNA, 5273 bp, Oryza sativa
  unsure (1)..(5273): unsure at all n locations
cttcttgctatggctcaaggtggggatcaaatccctggtagcagtgaaacgcttgccagtcagcttgctgttgttgcatcatggtgttaaagtttgcgagctgtgcaccaacagactgctgccgttcccgtgactgtaccacatgatcctccaaggtgtgttgctcattccctgcctgcagttctaagtgtatccatcctccggatgagttctcccagatcccctcgagaggagactgagcaatgcatcaagaggatggaggtagaccacttgaactgaaggagcccgagtatccctagtgcagctcctgtggctcatgcctcctgctgtcgctggcactctgccaggacgaacctccggtgtcatgttgcaggaattgggtccaaccacgggcatgcacggtcgggccccaactgtttccatacatctgcactggtggttatgaggaagacgcctccagaggtacttctctcgccattcgtcatgttaccctgcgtgggacttctcgaggcaactccgcttggaaagaaatggttagttctcggcagttatacaaatgaaactccgggttaggtaacgtaatctcatttgcatagccgggaaacaaaaatataagataatcatttggaccatgtttgagtatgtggcattgaaccaaataggcctcatcaacataagagcgggtaataggaatatttgcatataaagcagagtcccaactcttcatgctaaatgagtcaccaaagaaatacactcaacaggactagacaacttcacattttctaaccattgcttgatcctgggttgaacgggtgaaactttgattttttttttaaccatggcatacaagaggactagttcgcactatccggatattagctctaggaaacaacgtgaaacaagaaacttatgcaacagccttaaggtaggattatggatgtcattagttctaggctttctacaggatgagagacccgaaatactttgtcaaaacatacgcttgttaaaatcaggaaatgcgttcctgaaattaactttgcatgttttgtcaaagactagaagcaagctaagttctttccaagaaaggtgatattccttgcggaataaccggaaagtaacgccatcgcctacctctagcaaggcacataaaaactgcatggtaagcaaacgggaacccggctcttctacacatgcaaatttatcccatcctacagcacgccaaatagtatgaaactcagcatccatacctatccttttcagaaggtcgagtcgtatggtcaggtctgagcacacgtttggtctttcaacatatgataggcttgcatttcccggtggcccacaaggtcgagatcagagttgtcgtacagccttggtggaacgtacgcctcctccatggatgcatccgcggaagaaggtgcactcggcttatcgtgtcggcttgtccgtgagcttgatcgtctcttgaatatgcccgaaagtcgtttcttcatagctacagcaaagagcaagaatacaagactactcggacgggggttaagcaagtacccgccgattatccttgcaccgaactaaagcaaacttgtatatgcaaggtgtctaaactaaatgcagtgaattgtgtgaatttgaggtaagcctgcaaaactttgaatgaattttgcagcaaggttttgagagggagtgaaaatgagttaaagtggtgtgacctccctctcccagttgagctgcatatatagtgcatggataacggctagtaatggcatgtgggccccactagccactaccctgcagaaatttgcaaccagccggtaccaggccaattcgaccgaaccaaggggttcggccgaaccactggtggacccaatcggccccacatttagccattgggctccaacgactagtgtgaaggtggctgtgcaaaattttgccaaaaattgcattttattttgctcacaaaaaatcatttgaagaaattgcctcaaattcaaatctaaatgtgcatttgaaaattcaaacatgctttgatgcaatggaaaataaatatgagattactaccaatttacctgttggcaagggcgacgtcgtttcaggtccgatgagcacgaccatacctccaacgaattttgctcgatgaggcacccagttccggaggtacaggaacgggtgtcttctccttaacccgccacaccttcctgatcataggtgcgggcagcggcctcttcgaaactgggaatgcaggttgaccggcctgtatttccagtttcttggatgccggcttaaggtactgacggttcctcgtttcttcccgctccaggaagttcatcatgaaagtgttgaagttatccgtccttcggggttttactttgacctccttgtgtgtcgatatgttcttgatctaccccatggagcaatgctccatccttggtccccttgtggacgattcccgttgttgttcatgagcttgacgttctcacaggttttccgacaatccgtgccagagtgaccagtattgccatcgacctcacatgtcttgtgagagtccatggccttaacggtaccctgctcggcgtccttctcattgttgtccagtctcctcataaggagatccaactgagcggctagcatttccgtccacttgacggtgtacatgtcgcattgacgggtttggagtcgttccttgctccaccccttatttgagagcatcttctcaatcggttggcatataactgttcttgagaagaatgtccctccagcagcagcatccaggtgatcccaggacgagggggttaatccgttgaagaaactctgcaggatgagccactcggccatctcatgatgaggacgggtggtgacgtattcctgcagcctttcccaagctttaagaatggtttcatccctcatcagctgcaaactgggtattcttcgacgaggagcgttggtcttgcccatcgggaagaatcttgagaggaatgccgttgagcgcttattccgggtattcaccgttgcacggttgatgtagaaccactgttctgctctcccgaggagagagaacggcaacaggtggagtctgactcttctgacggtatacgtgctacagctttccaggaattcctgcaattgagcacttgaatcctccttaggcttaccacagaatgggcaagcctgcaccatcgttaatttagctggtcttcaaatcaaagtcaccgtttcccctgctgacttgggttccaactggcatgttaccagcagagggagcagcgaacttgcaaagggtcttctcatccatatcgtgcaattctggtggcacggaattggctggtctagttgccaatagagtgaccttgaggatgaatgacacggggtcggcttcatttcacccgtgactccagataaaaaattggtcggcagatcagaaccagtcctgtactactctgttttcacataaaagagaaaacaaacaaggtttgcctacaaaggacagtgacttatatagaggtaaatataaaattattagcaagtagtaaactcttaatcgtttatcttacccggcaacgtcactagaaatgcttgttggtatttcttagcaacacaactggaaatatagttcccagcaatggcactataaataatcctgctatattctggttacagacgtgatccgcaagcgcacggatatataccattgtagcatttcaccagggagtattccaaggtatcatatttattttatcccaagggaagatatgataagaaagtaccatgctaatagtttatatattacttatatacatcaaagtctacgcaggggttaattcagttcaaagggtagggtgacacacagaagaaagaactaagaactactctcactaaaatatagtctaagctaagtggagaaagaataagaaaagtatcattcctgtacttctagtatatatacatctttagtctatacttgctattatacagtcatgcaaccaataccccgtacccagtgtcctcctggtgttttgagaagccacccctgactgccgagttccttacgacagccagtcatgaccatacaactggggctaaatacggaggaataccctccccagggaattaacttaggattacattccagcgcggaggaatacccatactgagctgtcaccaccagcggcccacctctcatccgcaatatataaccccaattaatggtatctaataatctaagcaccgcgcttacattactaaatactactctacatccttgcaacggacatagagtaaccgaataatcggacactaaacccacaccaatacacctatctggaaagctagttacacgactatattgattcaattgtaaagtaaagtcggcactcaagtaatatgaattgaataaaataccgaacttgtataaagaagaatattctgctagttacacaactatattgattcaattataaagtaaagttggcactcaagtaatatgaatggaataaaataccgaacttgtatgaagtagaatattctattaattcagtaagtcttacaaaagaagagagaaaagctattaaaaccatacccggaatctcttgaagactcgaggactatgaagactattctcttgatcttcttcttgatcctaggagcatctttgctctccttaggacaagtagcaagatgaagtatccaaagagcatctttcaccgccttgtgccatgtgtccatgcttatgacggtttctaccggtagaattgctcctaaccgtcataggatacctgtagataactgcaggtggaaaatgggctggattaggccagctggtggttcggccnnnncncccnctcttcaccttcctttccttctcttcccatctcttcccctttttaataccctttttactttcctgttttaaccaatcacttctaacgtaacgaatgttcctggaacgaatccctcctatgctaccgtgctatggatcattttatcacctggactttttttcggtcttgcttgacatacgtcggtatctctagcgttctactggcttacctgaatattttaaacatcaggatagctcctctctggtacttaaacgattcttaccatagggagtatctataattcaagtctctcgtttggaagttacatctttgatgcgtatgcttacgcaatctttggttctcctagtgctacttcctctatatttggcaccctcgcttttctatcctaccctctctttctctaacgtttagtaatggtatctcttttcctttgctttgacg

SEQ ID NO: 12280 - DNA, 1797 bp, Oryza sativa
  unsure (1)..(1797): unsure at all n locations
tgtgggaanatttgaatttgacatttcctcatacccgcatgcctgcaggtcgactgtagaggatccccttcccttttcccgattataaaaataatatcctttcgcttccttaggataccccacaaagaagcatttatctgatttaggtgtgaggttgtccgattgcaaacgttttacatagacctcgcagctccaaatctttagaaaagacaaactgggatgcttcccaggccatatcttatatggtgtcttctccactgattttgatggaaccctgtttagtgtcaacgcagctgtctctagagcgtaaccccaaaagcttagcggcagatcagtttggctcatcattgatcacaccatgtccaacaatgtacgattcctccgttcagacaccccattccactgaggcgtttttgaaggagtgagttgtggaacaattcaacattcctttagatgattgccaaattctaggctcaagtactctccaccacgatcagatcgtagatacttgattgtcttgcccaaataattttgtacctcattctaaaattccttgagcttttcaaaggactcagacttatgcctcattaagtagacataccatatctacttaagtcatcggtaaaggtaataaagtacccaaaaccacctttggcagttgagctcattgatccacatacatgagtatgtactagtcccaatagttcacttgccctttcattttgacccgtgaaaggtgcctttgtcattttgccaagtaaacaagattcacatgtctcaaatgattcaaaatcaaaagagtgtagaagtccatctctatgaagcttctccatgcgtttctcatttatatgacccaagcgacaatgccaaataaaagtgggattcaaatcattaggacgttgcctttttgcattaatgttatagactgaacatccatcaagattcacaatgtataagccattcatcatgggtgcatggaaatagaaaatgtcattataatagactgaacaaccattgtccacagatctaaaaccataaccctctacttgcaaacaagaagtagagataacgttcttacacaaagctggaatgcaataacaattatttaactccaaaactaatcctgacggtaaagataatggcatagtgccgaccgcaacagcagcaactcttgctccattgcccacgtgaatgtccacttcgcctcttgctaagctcctacttcttttcagcccctgcaacgatttgcatgtgtgagcaagtgacccggtatcaaatacccaagaatcagtataggaagtagcaagattaatttctataacattaatacctgaggtggaactctttccatcctgctgcttctgcttgagctgctctaggtatttcttacagtttctcttccaatgacctatctccttgcaaatgaagcactctgcatccttagctggccctgtcttttgaaccttggtcttagagttgctagtagtcgtgatctcatcagagtttagctttctcttttgaccactcttcttattgtttggcttgcgcttatgcatacccatcacatggttggagtttttcttaatgctttcctcggcagtctttagcgtcacatgcaattctgccaaggtcctgttcaggttgttcatgttgaaattcattatgaatggctcaaagctgggagggagcgactggagaatcaaatcagtagccaactctcggctaaggggaaagccaagcttatccagactctcggtgtaaccaatcattttgatcacatgtgggctcactggatta

SEQ ID NO: 12281 - DNA, 942 bp, Oryza sativa
acctatctccttgcaaatgaagcactctgcatccttagctggccctgtcttttgaaccttggtcttagagttgctagtagtcgtgatctcatcagagtttagctttctcttttgaccactcttcttattgtttggcttgcgcttatgcatacccatcacatggttggagtttttcttaatgctttcctcggcagtctttagcgtcacatgcaattctgccaaggtcctgttcaggttgttcatgttgaaattcattatgaatggctcaaagctgggagggagcgactggagaatcaaatcagtagccaactctcggctaaggggaaagccaagcttatccagactctcggtgtaaccaatcattttgatcacatgtgggctcactggattaccttctgcaagcctgcacgcaaacaaggactttgaggtattaaacctctcagctcttgcttggtcctcaaacatgttacgtagtcccgtgattatcgtatgagcatccaatgcctcatattgcctttgaagcttaagggacatagtagcaagcatgagacagcttatatcaagatattcattgcatcgcctttcatgctccctacgttgagtagcaggagcattgttgggcaagtcagctagaaaaggctgtgtaagcacaaactctttgtgctcttgcctgagaacaattctcaggttgtgataccaatccatgaagtttgttccagtcaacttctctttctcaagaatagaccgcaagttaaaattggatggtgcaggagctgtcatgatctacaatagaaatatatgtgtgcaaaatcagcaccattttacatttaacctttcattaaacaatttaacaaaagatactcccaccatgtattgtgaaacaaaattccctcatttattagtgtctagttagctttggcatcacagctacacaactatcaa

SEQ ID NO: 12282 - DNA, 578 bp, Oryza sativa
gagtccattataaaagttctgcaggatcagccagttgtccatcccatgatgaggacaggcgggcacgtactcctgcagacgctcccatgcttctagaatagactcatctcttgtctgttggaaactagaaatccttcgactaagggcattggttttgcctatcgggaagaatttcgagaggaatgccgtagagcatttatcccaggtgttgacagcagcacgattggcatagaaccactgcttcgctctcccaagaagggagaacggaaacaatcgcagcctaacggctttgggactgacgcccttgatggtgtacgtgctacatatctccaggaactgtttttttttactgaaagtactgccagggctttgcccagcagtttaaattttataaaatataaatatgtacaaagttacaaagggaaggcaaaacaaatatgctacaaagtttgtatccaatcagaaagagattgcttgagtggatctttcattctacacatatgtagaagaacttctttaacaaacatagatttccatgattgaagtgatggctgaacagtttgaaagattaatccatt

SEQ ID NO: 12283 - DNA, 657 bp, Oryza sativa
aacactacacttggttggtgggctttgatctttgcaactgccattttcaaataatctgcttcctggagcaaaaaggacatgacaacgcatcaccaatagcaacataacattcaatctataccgcccttaaaatgaacttcggctttacaacatatgcataaaaagatattaatggcaatacctgctgcagtaaagtatcaaaacttgaaagcaaattcgatatgcgctgatattcaagtgcaccaccaaggatcaggatgcgtggcttttctttccgtgacgccatgcgccgatgagcaacattctttttacaaacaactccttttacaacaaaactggaaataaagaaccaaaatgaagctcttacatggagcactaataagatacgaaaaagtaataaagtgtgaaatttcaaaggccaataacttgataaaacaaaaattgccagcaagtttgcatcatgaatttgaattacaaaaagctgagtcactgtcggattcatatttttttaactattaggaaaatgaatactccaaagcggaccagtataaaatcattaaagtttgaccataatctgcagaagggtaaattttgtttacctatcacttggacgaccacaagccaagcattttacctttacatagccaccagggccct

SEQ ID NO: 12284 - DNA, 683 bp, Oryza sativa
aagaagatgtgataagagagttaatttgagtggtaatgaagagaggttaatcatggagtagtagaaaggggttgatcagaatattgggtcagtattttttgtttctattttttgcgtgttgtaatcctagaagggatatgcaacttgttgttagatctgtgtgtttgtttgttatacacgtacgatccgatatggttgattaattatattctggaaggttgcatgcaagaaagttaagtggagaacaataagagattctgtgtgcttgactgcttgttgctgtgtgattcgttaggtttcagttgtgtccaacgtgtaggttctccctggtaacactagtggttaaaaagggtgcccaatttgatgcctccctatggaattggggaacaaaggatggacaattctgcggcatccaaacaacttgatgggaagaatcaatgtgcaggcgaaaatgggtttctttttcaaatagtacaaactacaaaatgtgagccgaatttcacatatatgcgttcgtggaaatgaattcttcctaatgttggaagaaactctaaccaccattaggcccctttgtatatttcattaaatacctatacatcgagactccgcccaacatttttagcggtgtgcatagtaagatgaattggggaacaaggatcgttgacaattcgtggcatattcaa

SEQ ID NO: 12285 - DNA, 1840 bp, Oryza sativa
caaaacgaggaaaaactctaataaaaaccaagtaaacagtacataaaaagtaacaaaacatgtagatctcaattttagatgaattttgcaagttgaatggcccaatttggagttcgaatgaattagatatgaattttagaagttttgagccattttaatgaatttttagaattattaataatttattgtgcaattattaaataatttctcaaaggaaaggcctgctgctgacatcatcaaaggggccggctccgacaggcgggtcccacgagtcagcgacacacaaggggttggcgcacggtggacacggtccaccatggctggggcggcaccgtggaccaggaccaccacgggtccacgggcggcggcccagatcggcaaaaaggggggctggcttgccggccaacccgacaaggcggtggcggcggcacacggccggcggctgagaggcggtggcgcacgaccaccggccatcgacggcgagcggcggcgcgggaagcagcggaagggatgggaggaggagagggggatgctcaccgagcacccgacggcaagacgacgacggaaggtggccggtggagctcgggcggcggcgctccgacaaaggacggcaaccggggtttcctggggaagaaaagggaggtgcggggagatgagtccggcgacgattcgcggagacagaggagtggccgagctacacacgagggctgcggtgccggggaaggcaacggcgcagtgcggcgtcaatcgaggaggcggcgcaacgcggttggagacaacaaatgagatgatggctcggcctcgcagtgagaatggcgctgcggggggtggaagaggaaaaaggagtggagaccgggtggatctcggcacggcgatgccgacggcgacgacaacggcgacgcagcttggcggtggctagggtggcggcggttggcggctgaagatcgccggcgggcggcggagagagggagcgcggtggctcgaaggatttcgagcacgggaagtctcgggagagaggggaaaatggagagggaggtccgagcatcctttttattggctcggggcgacgggatcgtggccgatttgggccggcaaccgacggcgacatggggaagagagagagagagtgagaggctccggattccgcgggggagggggggaggagagtggggcgacgcgaacggcgaggtgaagaagggggcggcgcggtccgggcccacacgggagaggctgtaggctaccgaaggaggcggcgacgtgggtggctcgggcggccacggcggttgccagcccgtgggtcccacctgtcgcgagagggagagaggaggccggttgggggaggaccaatagactttagagggaaagggggccgagcgagatgattgaggggaggacttggaccgagcccgaaaggagggaaggggaatttatttgcttttctttttatttaatttgattatatgaactttgtattgttataattatttattgagctccgaaaattcgcgggaaattttttaggaaaaattcccggccaatgatttttaagggaaaattttaattctcccattatttcacttgattaaattgatttaacttttatttaatttctagaaaatacattatttaatgatttttaatccctaacgaaaatcgaggcgttacaccgggggcaacggggaccactccgcggccacccaggaatgccaccgcctgcgaaggtgtcactgcgacttctccccgtgccactacatcccctcctctaccgccgcatcaaagggagtgggaggcggagatggcgcggtggctcaaggaggccaaggagatggaggtgctcgag

SEQ ID NO: 12286 - DNA, 3368 bp, Oryza sativa
acccataattccctgtacgggcaagccctagcggcagaaaagatgaaatttagatgggttgggggtgaatacctgagatggggtcaattggcaggatttgcacccgctcagagaagggtagtcggtgacggtggatactcaaggatgggcggcggcaccacgctacggcaatactcaataatggaaaaaaaagaaagagaagataagatatatgtatgaacgatcactcatataatacgatatatttaagattcacacgtagaattaaaaggaatgacagtgacaactgtttttttgaaaaaccaaaccttaaattcaaatttgctgatttccagtaaaagaaattcatatttgctgattataatctgcaacaatgccaaagaaaaaattctctagttctgcatcaaacacttccaacaagaagcattggtagaagccaagatgccaacaaaagtgtgtgcagtttgtactgcattttacagccagcttagggaaaagttcagtcactctcttgatccaagtacttggatccaataaatagtggggattttcagaatttttggggagttgatgaatctactaaaatttgaaaataataaaaccaagcaagcacccaaggctattaaacatcctgttatcttgtaatgttgtgtttaccttgtgactaggagcaagacacaaaatttcttcttcctaaaaaaagagtggctatggctactgagccatcgcatgagtgcccccaaaagagagagagagagagagagagagagagaaagaaaagtgcagcccgtgagtgaacctgtactatatcttttgacctggataccaacaacggcaggagacaactaatttcacatggctcttaatttgctgctaccccagacgaccagatgttagaaaattaattttttgtgtagatttcagttagtttgcttatatgtatggtgtacctgagtatgcagtcccttctccttgaagaatctgtgagggagatcccttgcccgtgagcctattatgtcgcccaagtttgaaaagaaattagcaagtttaagaattggaaatgaacaacattgccgtaatgataagatgagattcagtatgaacccagtaatagatcataggttagctcttgcaaataaaagtaccaagaaaatgagagctaccaagatccctcttggaatcagaagatctactcctgtactcagaatgaccaataataattcaaacagtagatatcagaatcagcttgttgtacaatatataatatcattaggtttcaataataaattatcagaagaacttttttttttcaaactaaacagtaggccaacatatttttatccaaactgatcagtagaccacaatatgtccaattcatccttaacatcacatgagccaatcgagcaaaagaggaatttggatggaggcaatcactgatatcattttgttaacctcatatggcaaaagtgcacggcttcatatggcagaactacattatcaagaaacggcatagctcaaggaaacgtttgacatttcagttttttaaaaaagtgttgtttcagtccaagttgtataaacacaaagtcaggcattgaaggattttgtaggtacactttaatgtttctcaaagatgaattggcgttcattcacacaaatcacaggtcaaatcttagctcgtatgtaagcacaattcacatgctatcttatgcgcaaaatggaaacattgttgacatggtagtcctcacatcctgttgacatcaataggaggaataaagagcaggagatagagtaggcagcattttatcgaggacctacagatgcagtttatagagtcaccttgatatgccttaggagatctttattgaaagcctaaattccagtgacgctgacctatttttaacatcaacatcatgaggaaaaacaggaatccccaaataatcaatgcatagttagatcaaaatgataagctgagttaatttgcattgggatgcttgtgtgcgaggcaaacacgtctctgcaaatagtcgatcgagtgtacgcatcgatcctgccatatattgatttacatatcgtgcacatatataactgcatgcagatcaaataatcgatggagaattcgagatgacaagaataaaaatcaatggttcaagaaactgaatcatatgtatcagaaattagatgtaatcacaaattacttgttcagaaataatttatgtagctgtagtgcaagtcatctaacctatatcacaaaatggaaataagatgtaatctgaacttaacatttttttattgtcttgtgaagaaaaaggggaaatggaaaaacataaatgatgcctatatgattttggttgattggggaggaggatgatatctgtacggtacctttcggcggtgggcgagtggaagtggatgacgaggcggagtggagaccggcgaggcgagcgactgtgttcgggcggtggagagcgggggcggcgcggagaactacagcggagatcggtgcgcgaggggcgagaagggcgtgtgggagcggaggcgggggcggcgagtgtgtagatcggcggcggcggggtggcggtgagggtgaggcgtgcggcgtgcgagggaggagaagggcgcgtctggcggcagcggcgtggatcggggctgctgtggcggcgaccgagaggagagggcgtgcgagagggagagaggttttttcacctgtgtgtgtttggttggtgggatataaccggataggacatagccgccgctttttggagggtgtttggatgctgggcgagagtgggatagggcggcccagaggagaatattctctccagatgctggatagagggatctggccgatttggccggatgcaaccgcccgaggctcgggcgagccgggcaagcgagttgcgtgactcgcgtcacccctcaccaccacgacgcgagcgaggcgacgagctcggcggccggcgagagggccggcgcgggcgacaagcgtggcggccggcgagagaggcaacgagctcggcggccggcacaggtgacgagagaggaaggcggcggcgggaggaggcgagccgcggtggtgggaggaggcggccggcggcgggaggaagccggcaggaggaggctgccaacggcgtcggcgagcccagatctggcactgcttttttttttcttttttctttttttttctatgtgtatttataatggagtgtgtatttataatggagtgtgtatttataatggaatgtgtattatgtattaatttgatgaggtatattcaccatctcaagtgagaggtgaccacacctacaaatccaccatacttcctccatcccgtcgagtgatagggtaccgagctcgaattcgccctatag

SEQ ID NO: 12287 - DNA, 961 bp, Oryza sativa
attagaggcctttcaaaggcagaaagacaagaatatgcccctccagcaggctctggcttcatctctggcttttcatctatctcaggccggtcattgatagacaaaatttcatcagctcgtgattctccttttggtcctacctcatatttatcagcacaggcaagagtagttgatgattataccatgtcacaaattattctgaaagagcttaatggcggggatacttcaaggatgctaattgttataacgggtgcaagccatgttatttatgggtcacgaggaatcggtgttcctgccagagtatctaaaaagatgccaaagaaagaccaagttgttgtactacttgatcctgagagacaaagcataaggagggaaggtgaaatcccggttgctgacttcttatggtattcagcagctaaaccttgcagtagaaactgctttgaccgtgctgaaattgcacgagttatgaatgctgctggtaggagacctgaagctttgcctcaggtttgctgcttgatcttcgttttagtccattgcttgttaacttcatgtcgtgatagacctttgagaaaaatctgtaaaatcgtgtatttagtgaaggtaaccatgaacaggctcttctagatattgctgccctactatcttcaggagaagaaatattgaatgagtaatactgagcaagatttgacaagaaaccttcagattacctaaatatcttgtgttgatttgtattaagctttttattctggttttcgagttccagaaatgtgccccagagtagtacaggtagcacaataaaacctaagcctctagcattttctgaaccctggctgtgacacagattagctaataaaatgcatcacattagtcaatatgcccagtgcagtaacatctttttcacatgacccaaaaaattcttgtaagtcatagagcaggagctttcttctgtggccaaaatgtt

SEQ ID NO: 12288 - DNA, 977 bp, Oryza sativa
ctgagtttctctaacaattgtgtttcagatcattgctggtttagtggagcatcggctaggagagagtctagctactagctacaatcagccacttcttgctagtttgttgtcctttgtggcaaggacagtgaactcatactggggaacacaggttgagcattctctgcacatttctagttatatgtttgtgttggtagcatagtgcagactcaagatgtttagatcactttagactaaagaactcttcagggaatctggctatgagtaatggcattgcactttcccatcctacatcccgatttatattgtttatttaattcaatcaatggtcacaggaaccttaacattcacatacatccattaaagctttactgctattaaaggaatattttagttgagctttacctcggaggcttcaagcagctttcctatgataatttacgcatttaaactccttaatatattcatagtgcttttatggttttgaagcttatattttacacaagataggagcttacagtaaacctatcccttctctccttactggttattctgtttggtgcagcaatgggttgatcttgcgagatatactggactacaaaaaaccaaggaagttcctcctgttgaggccacagcaccacctgctgaaacgtcacagttagccacaccgcccgctgaaacatcacagttagccacaccacccgctgaaacatcacagttagaggatggtagaacagaagtacaaaatttggatgacaacagcaaccaatcaagtggttgaacctagtgatttggttacttcacaatgccttcaaagtacataacgatatagctaggtttgtatcacaattccttagagttagggagtacatcacttgttaacccccaacacagtacatgcatgtactgcttgtgattttagagtaaaaattggaagggggacacttgcagtcttctgaggattgcagcaacaaccg

SEQ ID NO: 12289 - DNA, 1594 bp, Oryza sativa
ctgaatttctcacagatggaaatgcaccctggttggaagaacaataagattttcgaggcctgcaaaaaacatggaattcatgttactgtaagatataatttcttatgaaaatcagatacaataagctaacctcactgatgcaatttccgtgcatgtttttgttataaaaacaaacgctctttaacatttttcttgtatatttaattatttatgtcacttttgcaggcctactccccactgggttcttctgaaaagaaccttgcgcatgatccagttgtcgagaaggtagcatccacaaatgttcagatagaataaacaatatgaaaagttagcatgctcttcaattacgtgtactcgatagctaaatacaaccatataaatgcagatagccaacaagctgaacaagactccaggtcaagtgctcatcaagtgggctctccaaaggggaacaagcgttattccaaaatcaactaaagatgaaaggattaaggagaatatgcaggtgtttggatgggagatccctgaagaggacttccaggtcttgtgcggcatcaaagatgaggtgaggattgaccttgtgcatcccgtttgtagcgtgtgggcttgtagactgtagctcagctgtcctaagagctcagaggttgagtgcaaagagaatatgtttaatgaaattactgttaaagatggcttgatgtggatgttattgttcttgatatggtagactgcttagaaaatgaaaacttggtatagtagaggtgtgaaacatcacttgctagttttgacccaacgacattgcatggcaattcagcactgcacgggcggaatctggatctatattcctatatatactgcaatagaataatccactccatagtgacaatgcagtagtaagattccgtcagtttgtacagctttactacatgttttaagtagtttcttcagggtatcttccaggctagccaggaagacatctcacacagaaaatttcggtgttcagaacttcagatagagcatcatttgatctgttcggtgtgacatctaattttaaatactggacttaactaaacacatatgctacacataataaactactaaataagccccgtctacttagctacaactaatctttttctctgatataatgtgattggaccttggtattgcagaagcgagtcctgacaggagaggagctcttcgtgaacaagacccatgggccatacaagagtgcatctgaggtctgggataacgaggactaagctgccatgtttcacccaaagatatggcaaataatggttatgatgttggtcatgcacgaaggagttatgtgatgttctccaagcactgtgacgaaaccagctaactcagcacaagatgtactactatgtgtaaaactagtattgttctatgtgtgctcttcttcaagctttgtgtaaccagcttctcagcacaagatgtacagccagtgctgtaagataaataaaagtatcatggctttgccgttgcacttgctactacatgctttgcctgcttagcattatggttgagtttactctttcttcatagaaatcgaaatgtgctgcctgcctgtcaagct

SEQ ID NO: 12290 - DNA, 1295 bp, Oryza sativa
taagattaccggcaagcttgcacgtagtcggattatacaggttcgggccgctatggagcataacaccctactcctgtgtttgggattatggatgagttttacaagggtttcttcactccagagagcgcacttgcttcctctcttcttgagttcagattttctgggagtcgtcccctcatctcagtgggaagggtcctccttttatagcttaaggggataccacatgtgccgcctctacctaccctccataggggggaccccactccactttttgggctttaaaccgggccttctcccggaagctaagcaataaccgattctcgagtggaacccggcgccgccccccgcctgacacgggggacagccctgtcattccctcataaatgaacgatgacatgcaacagcccttcctcgagtgacgctaggatgtgacaggtcatacccacccccactccgccggggacaagggcgacgtgaggacatgattgccctatccatcggatgtgacggagacgggccggtcacaaaccggtcacatccaatggacaggggttagctaggcgcgccgcacgtctgcccttactgcattaaatacagtaagggacagttggggcgtcgcacatttatggctgttcagcctgtgctcccctcttgccctctccctctgccgcgtggcggccgggtgagggcctcggggcgaagccgcgggagagcccgagggggtgacgtcatgccccgaggccccccccccccctcagccgctttcacgactcgcgtgacgcgcgagtggggccaacctgcagagtcatgtggccggagggaaagtaattcccctctacttcacatacccccgggcttatatctccgacacctgggtacgtcggctagaggaaagctacactacaagcccagccgttgcctacgctggcttgtggtaagtacaataggttattccagggcatcccgcgaaccagtccttaattgccatgggtgcgactagcaaaaccatgcatccacagcccaccattcaatcgcattttagttggataattacgaccatgaagcatggccagatgtctcgagcacgcagctcattctgatactaaaaaggtctaatactgtaattatcccatcaactgagctagtggtaattaagcatggctaagcatgtagttctagctaggtcacataagtaacatgagctagtcgatttattacccaatgttaacaaatgacagatatcaactaaacatggcacaagcgagcagataggtaaaccctattcccatgtaatt

SEQ ID NO: 12291 - DNA, 693 bp, Oryza sativa
gggcgaattcgagctcggtaccccccctattcaagctcctcaagcgctccgggccgtttgtatggacggaggaagctgagcaagctctcaatcagctgaaagcttacctcacttccccctcatcttggtagcctcgggaccggaggaaccattgctactctacttggccgcgaccccccatgtggtgagtgccgccctagtagttgagcatgaggaaggcgaacgagagggccctccggcttgcgatggcccctcgtcccccgaaggtctagcgcccaaagcttctagcccccaggagggccccgaggcccccaagggaggagcggaggctttggcaggtggccctgagcttgatgatcccgaggcagtctgggatccccccaggacctccgaacaggtgcgccccgagttaccagcccttgacagcacgaaccggcccccccgaaaggtgcagcggcctgtctacttcgtcagcgaggcacttcgagatgtgaaaacccggtatccgcaggcccagaaaatgctttatgccgtcttgatggcctcgaggaagttgcgtcattacttccaagcgcatcgggtttccgtagtgatgtcataccctcttggccaaattttgcacaaccgagagggtactggacgggtggtaaaatgggccatcgagctggctaagttcgatctgcacttcgaacc

SEQ ID NO: 12292 - DNA, 713 bp, Oryza sativa
ttttcctaatgcaaaatgaagactaataatatattagtaaactacatataagcgttgttaacggtctacatggctatcagctaagcaaaacgaaagctaactcatctactggaaaatctctcaccaaaagaaacctgtctagatggctgccacatttgccatttcagtccgacagtgtccacagcggcgagtcgacgatgtcggcgtcgagctcctcaaccttgcaatcccgagtcgtcatcacagcgtcgacgtcgaggtacatggcgatgtcatccagacactcgaacatctccagctcaggccaagacgcgtcccactcccaatcccaatgctgcgccattgcctccgtgccgccgccatcctggagtatggccggcaacggcaacggcaacaccaccggcttcacgtcacgctcctcgaacactgcgccgccgccgctgccggcgacggctgcaggagaacagcccggggtttggcgttgctccggcgcagtggcggcggcggtggtggcaggagaacagaacgggggttcgcattgctccggcgcggcgatggcggcggcaggagggctgaatgccgggaagttgaggaccgcgcggggaccgaggatggacgcggcggccttgtcgtaggcgagggcggcgtcgacggcgctgccgaaggtgcccagccagtgccgcttcccgcggttgggctcgcggatctccgag

SEQ ID NO: 12293 - DNA, 552 bp, Oryza sativa
ctatcccaaccagcagcaagatgctgatgatgagctgcaaccgtccgctcttccgcaccgtagggttcatgaaatcttcagctagaaggtcgacgagcgccatgtagttgaggattccagcagccgctgcgtcgagaatgccttccacgatcagggccgtggggctattctcattgtaggcggaggagatgccgataccgatcataatcccaaccggtgtggttagcgagaagaagatggccattgtcactgcagacttaagatggaacctagcctgcaattatatattaagtgggtaaatttcaccgccctatatatcgatcagcgtgcatttgtataaaatgatatttctacgtttgaaaggagtctcactactgatatttttttttttggaatctaaaattctcgtattttcttttaatgtatctaacatcttttacttacaagtgttttttttctttctacatgttaagttttaaaggttatgaataaaactaagagtcatagacaaaattgtgtggaaaaatccgttacttatgtttctaagtttca

SEQ ID NO: 12294 - DNA, 631 bp, Oryza sativa
ttaagcacttcatgaaacttcctaaagtaaataacagaaattcacacataaacacttagctgttaatctgaaatagttgaaacaaatggaaaaatagtcctgattgttacaaaataatcaccttactaattggtacagatacacctacagtagtcatgtacagttgtacaccatttgtcttacctcatgatttcttcatggaggacaaaatacaaacaatgaggatgaaaggttaagctatgaaaatcaccaataatgggacgcagatattcaccaggatccatgatagaactccacaaaccctgtagtagaagctgcaggctgcagcacgccagtaccataacgtactgatcaactgatcacttagctgctccttcaaacaagtgctggatgcatgcctcaacatcttctggggtgtatttgatgtacaagtcatgcctggcttcgggggatgatttcaatctagaaatcaaggctgtatatactggcattacagcttccgccactgctgccctaacatccacccgcagctgttcatctgctatcacccattctgattgtacttcatagatctcctgaaagtaggtattaaacatccggagtttctgcttcattgccgtggcagggagtc

SEQ ID NO: 12295 - DNA, 629 bp, Oryza sativa
ttatctgccaagcattcagcttagaatatcacccaagaaaacttttgcttagtactttcctaatgaaaatagcctagtacttttgcttcttcccaaaacaatgtttacttagcaagttaacatttgtcgtttatttggtgggttatatctgtgttcactgaaatatccatttcacatgtggcagcaatggttaaacttaccaaatcaatctgttggagaacagtggtaaaatctgaagatagtaatggaattggtgttgtcgtatatcaaaaaccagcatcaaactcttgctacctggagagaaggacaaatgaaccccctatgtgttctaagaaagatgggccccgttttccttggtaatttatagctcatatccttctctttcttccctgttctcataaagtcagattgcatctgatcttgtagtcaccagtggcctatttctgatgattacttattggttcattgtcagacaacagtgaaaagatagttactaacctatcctgcttaaatatgttttagataccgttaatgatctatagtgtattttctgtttggtgacatgtatacaatttatcttttgcaggtacgctcctcttgatacatgcatttccagttcaattgaaagg

SEQ ID NO: 12296 - DNA, 712 bp, Oryza sativa
ccaagtagcaatggccagcaaaccaattctgtctgtatttgcaaacaacttaatagtaaaccatctccaggtacgaggatatgcatttgtagtttggtacagtatcatattaataccatctcgaaaaagactacagtagtatcttgggctagtaactgcgcatcttctgtgtgatagactgctctgtatttgcccatgtcatagagatgttcgtcaacatactacctatgatcggtcgagagaatggtacactgcttgaatattgcaatcttgtcttggagctgaaactgaggcttgaacctctattcttttctgaaagctatctaatgggaccttcactgatatagcactaagctcgcatatcgctaaactttccaagttcatctgatgtatagacagctgcggaacctgtttctgatctaagaatgtaatctgaatatctggttactgcaggctggatacaggcatgtagatacggctgctcaatatggaatagaacaggaggtacaccaaaacaatattatgtttatctggtagtctattgcgtgatgtttcgttaagcattctctgcaattcaggtcggcaaagggcttaaagctgcgatggaagctggaatcaacaggaaagatttgtttgtgacgtcaaaaatatggtaattatatttacaatcataataacttgtcctttggtgtaaaattaaatataaatgcag

SEQ ID NO: 12297 - DNA, 1878 bp, Oryza sativa
ggcgaattcgagctcggtaccctatgcccccgtacacacctctcctcccttccccctccccttcttctcttcctaatacactataaatttaaaaaaaataaaaaaacaaagttggaaaaatttatgtatagaaatactatattaaaaaatatttgaattcaaattcaaatttgaaacgggtatgtaaactttttacttataaactttgggtctataaactaatatttgaattcaaattcaaatttgaatcaggtatgtaaacttttgacttataaactttgggtctataaactttaggtgtataaactttagatgtatagaaatactatatataaaaaggggatgctatataccggaatcccgttcaaaaacaggacgattctgataccgatatgacatcgctctgagcaactgtcaccacctgcatgcattgcagcaaaatgagaatgacgaccagcgcttgccaaacgccggcttcccggcatctcggcgaaacctcctcggaagcgctcgcctccgcgcgcgattactcgcttcctcccgccggcgcgcgcgccgtccaccggcttctccccatcatggcgaatcctcctagaaagcgcgcgattcctcgcttccttccaccgccgcgagcatcgtccatcagctcctctgcatcccggtgaaacctcatcggaatcgcgcgccattccttgcttctttccagcggcaccctcgtcgtccgccggctcttctgcttccttgtgaaacatcctcagaatcgtgttttgcaaggatatgatcttacaatcaaaatagtacaaggtttgacagagaaagcttgcatcaatgaacttgacaccagtgggaggacaacatgctgagaaggcccggtttaagaatcgaggtgataggcagtaaaaatatgtgaatgagagtaataccatcaagactgtgagtatcttgactgctatcatggtgcctgcgggtttcattgatgatacattagtagaatcatgtgatacttgggaggtttcacgatccttctcggtatcataaaacctgaaggtttcacgcatgatccctcgctaggtatatatcatcttgtgtgatacctgaaggtttcatacatgatacatcaaaagtatcattatgtgtgatacttatgatgtatcacatgatcctacttagatatcatgcatggtatcatggttcctgcgggtttcacgtatgatacttgaggatgattatgtgatacctaggaggtatcatgatcctcctcagtatcatggatggtattatcaggtttcaccgatgataccttaggaggatcatatgatacatgggaggtatcatgattctgctcagatatcatgtctggtatcatcaagtttcatagatgataccttagaaggatcatatgatacatgggaggtatcatgattcttctcagatatcatgtctggtatcatcaggttttatagatgataccttagaaggatcatgtgatacatgagatgtatcatgattctgctcaatatcatgactggtatcatggtttctgtgggtttcacagattataactaagtacgatcatgtgatacttgggaggtgccatgatcctcctcggtatcatggctggtatttactccacaaaaagtctacacccatgtaatacacttcatttgttcatatatggggaaatgatttttgcttccgtcaacttccagatcaaatatatgtacatggagtggacatggataagttcatatcatttgattcgatcgatgtatcgtctgacactgcttagagcaagaaaatgaagaacctcctgttgatggagaccgtcaaccaaagaaaacgcggtgggtgtcggcgtcggcgccaccaccacgctca

SEQ ID NO: 12298 - DNA, 3606 bp, Oryza sativa
taatgtctgccgcgacccacaagcagcacggagatagttcatgacataccgagtgatgggatgtatgcctccaccttgggctgcaactcgagcaggatcacggcggatgagattttctaactccatgaatatgcctttgatcgatgagccgagggtgttgcacaccgccgtgacctctgcacggagcgcagcagagtacgggtcggcgaacacaggatcaaggtcagggagaaggtcccgcacagcctcgtacatgtccaccactcggaagaggcgctccggagcgcggctggaggaagagatagcatcgccgaatgatatgagctgcaaggcttgtgtgcgcacggcggcgacaaaggcaaggtccccaaagggggcgaggccgtcgaagacgcggtcacatagccggcgctcactgggaatcagaatacggaacaccatgttgaaggccgggatccagcgggcgatgtcgaattcgagctcctcccaggaggaggcatggacctcttcagcagttcgtgggcggacgccgaggcgagcaacgctctcgtcgacgaagccgcgacgcgcggcggcatagacctcggcgcactcgcggccgaagccggcatccaccatcctccgcgcgatctggtgcacattcgccaccgaccccggcgagagcgcgtcgatcaccacgtcgtagtcggtcaccggcttggcgattgggatcggctcgtcgccgtagccgtcccgccgacgaagtcctcctcgtcgtcgctcccgtccgaccggaacccaccgggcgccgcggggacccgcgtcgtcggggcgctcatgagcgcccggaactcctcctccaggcgcgccatgcacctgctgagcagctcctccgcgcggtcgaacaggccgcggttggtccccgcggcttccagctcctgcacggtgccgatgaggtcgtcgaccgcctcaaggaacgcgtcggcgtccgcggagtccgcccatatcagcctgtccatcgccacgaactgcgagatctggcggtcgagggtgcggacggtccgctccatcgacgtcacgggcggcggcctccccgcggccgccgccgccgacaccgcagccgctggcggcggtggcagcggcagcgtcggagactccggcatcgagtgctcccctcctccccctaagccgccgccgccgccgccgccagcggccgaggccgccgcggcccgcgcggcgtagagcttgtcgagcgagaggcggccgtcgtagttggagaagaccctgaggatgtcctccgtcatggtgtcgctgctccccagcgtctgcacgatgtgctgcaccgtcgcgagcagcttctcctccccgtcctccgccatcgcctcagtaatccgcgccggggaaagaaaaaaaaaacacaagcagacgtcgagctacctcacctccggggctggaacggcatcccacggcgagcggcacagccccgatctgcacgacgccttcacctccacgcggcttcgcttcggggtggtggttgggcgcggcggacaaggggatgaggaggaggagggcttccttccacgcagcaacgcgttgcggcggtggcgtctgggcgagggcgacagcgcgtggaccggacgctttaccgcacagcggcgcgcaagttgtggccgccgcgtcggggttggttcgaggcggccgtcggatgcggcggcacggacggtcggatgcgtggcctcgggggaagcgaaaggcggatcggaggacgcgcgtgacagaagaaaccgcttttctgacgaggtggggccccgggaactagtgtcagtggagcggtgggaccagacgatcggtgggtttgacgcgggagagaagccggggtgtggaggctgaccgtcggcgtggcggacgatgtggcgcgcgtcgcgtccacggtgcgttttgcagtatggagaaaaatacgggtcacacgcctcacacgcgttgcggaatagccgtaggccgtaggcagtgacccggtgtacgccccgtagtttttttttaattttttacaagagactttacgcccagcttttacttgtaagagttcttattaggccagtagttgttgacttgtgacttgtgagtttaggaaattagaagtgtggaaaagccagctcaccaggttgggttggtggatggttcgttctccgtccacatggatgattcgttggctttggtttggtggtgaccaaacgtccaaaccatgagctcgatggtgaactgccacggatcgaggccgtagcaccgcgacattgcacatcgcactctgctgtacttttagagcccgattaatgaacttggagcaagtttaatagcatagcacatcgcactttgctgtcctttgagagcccgataaatgaacttagagcaagtttaatagcatagctaactactggcttcaaattatctatagctaatctaagagtaagtttaatagtacagcccactactagctccaatttatctatagccaatctaatagccaatacatacaataattgcttactatactattaatatatgatcccacatgtcatacacacagtgtgtcttggagtccgtgctgcagctgactatagatctgtagcccgcttcccttctctctcatcgtttatcttattaaaatatgtttatagctggctaatagtctgctattgtacctactctaatagcccattcatactacaacattaatatctacataaataatatctttgagtccgtgttgcaactggctacaaatttatagcccgctttcttctctcttctcttttcttctcgatatgtgggtatagctagcttataatctgctattgtacttgctcttagggtccgttcggttggagtattggactgttcggagaacaaacaaaatacaaactaggtgatgccctacgttttgctgtgggaattactaagtaatttctactccctcagtttcataatgtaagaatttctagctctatatgtattcatatagatggtaatggatgtagacttatataagtctagatccattaacatctatataaatgtggatagtatatatatatatgtgtgtgtgtatgtatatatatatatatgtgtgtgtgtatatatatatatatatatatatatatatatctttcaacaatcgagcaaagagtaagtatgttgttaattattaacagcaaatataaaactaatttgtcaagccatatttgaagagaaataaatttaataaactttgtagagtattatagatgaaatttatgttgttggccaagatttgtatcgcaagaagcagaagaaaaaaaaagaaatgaaaagctagaatttattagtagtaaacatgaaacaaactaaataatatcttcgctttgatacagaatatatggatgaatgtatgttaagtattataaaaaatgatgaatatatttgttgaaatattatggaaataacgagagaggtgatggttggatctatttgcattttgatttgtagaacaaaataaattatggatgatattacatgtttgcatgagctatttaataggtagttattgctattggatgataaggtgacatgtttgcatgttgagctttacgg

SEQ ID NO: 12299 - DNA, 1020 bp, Oryza sativa
ctacagtagtcatgtacagttgtacaccatttgtcttacctcatgatttcttcatggaggacaaaatacaaacaatgaggatgaaaggttaagctatgaaaatcaccaataatgggacgcagatattcaccaggatccatgatagaactccacaaaccctgtagtagaagctgcaggctgcagcacgccagtaccataacgtactgatcaactgatcacttagctgctccttcaaacaagtgctggatgcatgcctcaacatcttctggggtgtatttgatgtacaagtcatgcctggcttcgggggatgatttcaatctagaaatcaaggctgtatatactggcattacagcttccgccactgctgccctaacatccacccgcagctgttcatctgctatcacccattctgattgtacttcatagatctcctgaaagtaggtattaaacatccggagtttctgcttcattgccgtggcagggagtccacctactccaggaccgccagtctgcaatactgttgtgaccttgccccatgttacccgctggtaatccatgctccaacgccgcactctgtttgtcatttgcttgatccactcgtcaccaagcaaaacaccaagttcactatcattcaccttctgaatgatgtacttgccattgttcatcaagaagacgcaagcgagtgatggatctcggtatatcttcgactttatatctaaattcttgtgcaagacatccatgatccatgctatgtgcacagcaagcgacgaggtgggacgatcagggtcaactgcagcagccgctccaccaacagcgccgaagtcaccttccatcacctcttccaatgtctgccgcgacccacaagcagcacggagatagttcatgacataccgagtgatgggatgtatgcctccaccttgggctgcaactcgagcaggatcacggcggatgagattttctaactccatgaatatgcctttgatcgatgagccgagggtgttgcacaccgccgtgacctct

SEQ ID NO: 12300 - DNA, 1585 bp, Oryza sativa
atgcatgcgcgttgacgagtgtgaggtttggtttcgttgcagctcatcggcaagaacacgttcagcatcctgatctgcttgtcggtggcgatcacggcggtgtcggtgccggtggccggttggctgtacgatccggcgcggcgctacgccgtgtaaaagcggcgcacggtgcagcatctcaaggcggacgccgacctgcggatcctcgcgtgcgtccacgaccagtcgcacgtccccggcacgctcgccgtgctcgaggcgtcgaacgcgacgccacagacgccgctcagcctctacctcctccagctcgtcgagatcgccggccgctccgcgccggtgttcatcccgcacaagctccgccacagcgcctcccgagccggcgccgcggcggccagcgcggcgccgcccaccgactccgaccgcatcatcaacgccttcttccagtacgagctgaagcacccggagggcgccgtgtccgtgcaccccttcaccaccatctccccctactcctccatgcacgacgaggtgtgccgcctggccgtcgagaagcgcacgtcgctcatcctcctccactaccacaagcgccacatgctcgccggcggcgtgcgcgccgccgtggggctccgcgtcgtcaaccgcaaggtgctggaggtcgcgccgtgctccgtcgcggtgttcgtcgaccgcaacgccgggagcgtcggcctctgcgccttcatcccgggcccggtgcaagaccaatcgacgtcctccaggagcaggagcggcgggcacgcggccagcggcagcggccaaggcttcaaggcggccgtcgcgtcgctcttcttcggcggcggcgacgaccgcgaggcgctggcctacgcgacgcgcatggcgcgccacgagggcgtggcggtgggcgtgatccggttcttgccggcgcggggcatcaaggacgagccgtccgaccgccggatcgacaaccgcgccatcgaggaggtgaaggcgctcgcggcgaggagcaggaacatcaaggtccaggaggagctcgtcggcgacatggagaggatcgtccaggtgctgcgggggctcgacgaggcgggctacgaccttgtgctcgtcgggatgcggcacaggtggtacccggtgatgccggcgaacgggatgtcggattggagcgagtgcccggagctcggcgtcatcggcgacctcctcgcctcgtcggacttcgacacgccgtactcggtgctcatcatgaagcagcaggaccagggcgggctgaacgccgccgtgccgggcgcccaggacgtgtggcacgtgaacgacggcggcgccgaggacgcgccagcgccgccaagaaacatgtcaaccgccggatcttagcaggttcaggcagtaggcgattgttctgttctagcctctaggacctggttcaatgtagactttcagattccctttttgcgtccaagtatgttgtgatgtatagctatcaggattagcatcaatccttaaactgagatgagatcttaagattatttcaaggaaacagcattgtgtatagcagcaatggaacaaatgcatccaatgttaatttgacaattcagtc

SEQ ID NO: 12301 - DNA, 583 bp, Oryza sativa
atctgagcttcatgctcatcctttggggcaaatgacatggtaatgacgttcctgtcaagcaagtatccaccaaagctggcaacaccacatccaacatccaggacagtttttgtgtgtgttccccattgaatggtgggcattatctgtaaacaaaatttatacatgacattagaaacagcaagttatgacttatgacaaagaactggtggcagcagtcctacattcaaattaccgaaccccaacagagtcaatgcaagcatagcctttgtgtttagccccctcaaagtctaagaataaaaaaaattgacaatattgaaattgccagtatactataaagtagaagaaaagaacaacaggaatacgactaaggagggtcctaattcacaagaccaacaactcatttggacatcaaggtacttcaaagtaatatctacctgttcaataaactgaatgtatcttgtaacgccagttttgaattgagttccacctccagggaagacaagatagtcaccagattttgttaacaggaatacgactaacgagggtcctaattcacaagaccaacaactcatttggacatcaa

SEQ ID NO: 12302 - DNA, 1143 bp, Oryza sativa
ttcaaattgtgagtatatacctagttataagaattcgattcatacctatacctatcaacaaaacaactcaaatttaactttatttcacaatccatgattacatacctaactaattatatgtatggatgctatatacctagaatcaaaatctaacaaaaacaagttcaaattcagttcaaacttgctttcaactagttagtaaagtagttaatattaatacctaaataattgaaaaagtttcatgctcatttgaattgggtatatactcaatttcaacaatggtgcccgggcaccatggagcaccaaacaaatttactatatatatatatatagtaaacctgtgagatgacgcggtggcggacgagcttcgcgcggtcctcggcgtcgtcgcagtcgtcggcggcgtcgttcggcatcgtcgccgacgcgatcacggccgacgacacgccgtgcgcgttcccgcgctcgtggtcgtgcgacgacgacgcgtccccgccgcacgcggcgacggcggcgacggcgccgcggctgtcctgcgcgcgctgcaggaagtagcccgtggcgatcgtgtcgaggaggagcgtggccacggcggcgagcatggcgacgagccccgtgaacgggtacttccgccacggcccgtccacgaggcacggcgagccgagcttgtcgaaggacaccgggaggatgtgcacgaacgccgtggcgaggatgacgccggcggcgaacgccttgagggcgaagaagaggctcgtgtccgggcggagcgccgggaacctccggccgagcgacggaatggcgcaccccgctgagctgcccacgaggatgcagaagatggcgatgaccttgagcgtccgggacttggccgcgtcgtggccttcgtcgctgggctggcactcgcagtcggcggcggcggcgagggagaagacggcgaggaggaggcatgcggttagcttgagatcgaaagccatctttttagcctgtggccaaagattggtgatgatcgaacaaccaatgtggagatagtatccgtacagttatatggatataagggcagtctcaaccctccatctagaatggtgtctatggcattaacttcattaccatgtaatacttttagcttatgtggtactatattaatta

SEQ ID NO: 12303 - DNA, 599 bp, Oryza sativa
caacgtgtacaactttaggatgctaccatcaatcctggataaagcataagcttgtcaaaatctgttaaaggaaatctttgttactgaacaaatgcatttacgacatcaaacatggaatcgctattaggctcgaactaaacatggtctgcattgaaatccaatgtgccgcctatgatattattttattccataaaatgacatatcgagttatcaatgcgtcacaactcacaacatggattcatctacagaaagtaaacaggaaaattttgttctcccaagcaagtgttcggataactgaagtgaaacaacacagaggagagggagaaccttccgtccatgaactggtcgagctgctgctggaggtcgcaggggaacgcctcgagcgcgaccgccacgccccgctcggcctccgcgcaccgggtcgcgagccccttcatgatctcgagctcgagcacgcggtcgtcggggtcgggcacgagctcggcctcgccgaggtacaccaccctcgcggccgtcagcttctcccagacccgccccctcgagtccttccccacagcctccggctccccgatgaccgtggcatcgtacaccctcgacag

SEQ ID NO: 12304 - DNA, 1781 bp, Oryza sativa
gactttttcttcaagagtgcggagaatatctctttcttctttgagggtaagtgaatttcatctcttggagttgtggagttaatattcagtaacattcatcagttatgctatctgaacaaggaactggttggtagttaaaaaaaaacaagaagataatgtgtagttagtagttacagacctattattgtcgaactgttcttctggttctgttgttgatttacaatggcagcatgtggaggtttacttggatttggatagtgatttatattttatatattttcctgtttcaattactcacagaaaaggcatttggagatgatggatgcttgaaacaggcaaaggaactttcaattaataaagttgggcacggtcagtatgccaagtagaaattggttatacatgtgtgtagtttgtagaatgattgattgagtcttgcaagattattgtgttgttcatgttgcatgggttggaaccagatgccacttgctatacaagttgtaaattgtctagcaggatgagttgttgtgagaaacagtcggggattttcttacttaaatatagaagtcgaaaattgtaatagacttctctgattgctcaaacaaatatttacattacatctaggccaaaagataacaaagctacatcctaaacaagattgcattcgatccagaggtgctggtggaatagtcttataaccactcatgtagcacttttgtggataatactgttcttctgaacataaattttattgttcaaccttgctatttctgctgtttgcatttccattaatctgggttaagacaaattttcttgagtttggtttatttttgaatttgcctgtttggttgctattttctagttaacgttagttagtattttccatgctttgaaaagcttatattgtttgtatacttgtatatttataacaatatatcttgaggtattgccattcactgctcagtaatttttgcagcgttacatgaacttgaccctgtgttcaaaaagttctcttttggagagaatgtttccagcctattctcttctttacgctacaaaagacctgcagttattcaatctatgtacatctttaaggtatcttgatcagtctctagtttcttgttggcattgactacaacttttattccttattgggttaatttatccacaactcagcaaccaggcattggtggcgaggtggtgccacaccaggataatacattcctatatacaaaccctccatcatgcacagggttgtggcttgcactcgaagatgcgacaaaaacgaatggttgcctatgggcaattcctggatcacataaaagtagattttcgtaccaaattatttcatgtcaagaatcctcttgtggttatctgagcttctgatttgattatcatttgcaatgctttgcaccagatggtctgaaaaggcgaatgatcagagatgaaaatgatactcattttgatcatccttcgccaacctatgatctgaaagaatttgtgccattagaagtaaagtcaggtgatttggtggttattcatggagatcttgtacaccagaggtgaagttaccctgttatattgcatagcttgcaatcaactgcttcattttttttactaatatgttttaactttttttgacagctttgaaaatctttctctggtgtcaagacatgcactgagcttacatgtaattgataccgaaggatgtgaatggtcccaacaaaactggttagtttattttaacacttttggagaattcaaaagttaaaattcttatttgc

SEQ ID NO: 12305 - DNA, 1691 bp, Oryza sativa
tttgacagctttgaaaatctttctctggtgtcaagacatgcactgagcttacatgtaattgataccgaaggatgtgaatggtccaaacaaaactggttagtttattttaacacttttggagaattcaaaagttaaaattcttatttgctctaggtggtctttgcatcacttactgtccacagtagaaatctagaattgcctagaaacaagctattctacttccaagcttgtcctaaattgctcaaaccaagctacttgctttagactgtataatcttatactgcataatcttgtacttgatactgtatgatagttttggcgtagcctgtaacacaggacacatattggttacctgtacctgtatatgttgaaacaaggtattgtgccgctgtttgtatttttacgaatgggaatgatgttttactttatctttcctgtcaatcacttacgaatgggaatgatgttttgctttatctttcctgtcaatcacttagaaactccgaagacagaaatttattggtgtccttgtttacgtcactgttagcagaaaaattgtcgataacaagaactccatcttaaacttacctgcttgctctcaattttgaagtggatactacaccagtacacctcataaaacatcgtaaaattatagctatcgatgtttcataaacttttccacctttatttaaattttgctaacaggcttttttatgcttgctcaggttacaaaggaaaatcccacctcagccactttatgaaaattagtacaagcagttacctatgtgtcaaataaacgagtgatgacctagaagcaatggtcagacaatgtaaataccttgctactctgttttcatggatgttttttatggcaataaatttggtgtacgatgttgagtagctatgcttttttccccgtcttcagacaccaagtcacacaactacgttgctactctgtttccaggggtggtatttatgcctaataaaatctatctccagttcttaatgttaccaaatggcgacagcaaatcagcaatgctcgtcatattttcaaacagacactgattgtctgattagcccattgttcggtgaatcgtggaagcggagcaacatttctttagatttgtttccactgctgttcttgcctgatttttaccatgtcgtctgtagctgatcctaggagcaagcggtccaactccgggagtatctgccgtatggttgttacagttcaacgggactaataaacagtattgcaagttaggctgttaactaatcacatggtcataacatgtacttcctccgtcaaaaaaaaatgcaaatcctaggttttcgtgtccgtcttgtatgaaatttttttataattcgtatttttattgttgttagatgataaaacatgattaatactttgtgcgtgacttgttttttttaatttttttcataattttttcaaataagacggacggtcaaacgttgggcacggaaaccagggtttgtctttttttttgggtacggatggagtattattgcattctccttaataaacacagctctcaacgactctgtgttaagaaatcatgcatagtttaaatactgtgcatcaggatatcctcaatgtttatgcaaaaataaagagtaaggtgagctcgtgtcagatgctacaggacacttaaaaaatgtgtaattagctggtagac

SEQ ID NO: 12306 - DNA, 1028 bp, Oryza sativa
aggaagttgcgtcattacttccaagcgcatcgggtttccgtagtgatgtcataccctcttggccaaattttgcacaaccgagagggtactggacgggtggtaaaatgggccatcgagctggctaagttcgatctgcacttcgaaccgcggcatgcgatcaacagtcaaatcctggctgacttcatcgcggaatggaccccggtggacgaacctgtcccatccaatgtccccttctcccccgtagaagaagagaatccaaacgccgacattcgcggcaggcacaggattatgcatttcgacggctccctcaaccttcaaggtgcaggtgccggagtcacgttgacctcgccaaacggggatgtcctcaaatacgtcgttcgtctcaacttccgagccacgaacaacatggcagaatatgaagggctccttgcaggattgagggcggcagccggaatggacatccgccgtctcctggtcttaggtgactcccagctggtcgtaaatcaagtatccaaagaatatcagtgcaccgacccacaaatggaagcatacgtctgcgaggtacggcgcatggaacgccacttcgatggacttgagctccagcacgtgccccgacgcgacaacacagttgctgacgagttgtcgcgtgttgcgtcggcacgagccccactccccccggggactttcaaagaaaggctcgcgcaaccatcggcgcgaccgagtcctttgaaggaccccaacgacgcgccctccgacccgacctctggcgacccgcgcccctcggggcccgagggggtcaaccccgacccccctcgtcaggttgtgtagatgaccgacatccgggcgtatctcaacggcaatactcttactgagaaacgcgtggaagctgaaaagctcgcgcgcatctccaagcggtacgtcctcgtagagggggccctctaccggcgtgccgcgaatgggatactcttgcagtgcatttctcgagagcagggcatcgagctcatagccgacgcccatcagggtgagtg

SEQ ID NO: 12307 - DNA, 558 bp, Oryza sativa
ggcgaattcgagctcggtacccgacttgaggaaaatagcattcatcctatatacgcggataaatattgcaccaggaatttgaagaattacctcggaagcgattgtcatctgatatgattccaaaagtctctgcagtatcgcgaatcatgatgccgcatacgccttgataagaagaggctgatttgcattctgccactgcaaaagccacaaaaccataagaaatgatgataaaactaacagaaacaagaaagcaattgaatacgcagctcatcttaagcatataaatcacctattacaagagccccatgaagatctgctgagaggagggtttcagataactgctttttcctgcagaaaaggcagtacacataaatacttttttgtgattaaataactcatatatggcatagaaaggtcacaataaaagggtcataacgaagttctggaaaaaggaggaattgatcccttactctattgttttatctaagctgttgaaatcattattgcatttgttgatttatccaactctttgaatgtgttaataattcagagctaaaa

SEQ ID NO: 12308 - DNA, 569 bp, Oryza sativa
cgcatcgggcaggtgctcctctccgtgggatgccgcgacgcgaacgccgcgcacgcgcaggaggccctgcgccgcgccaagttcaagttccccgcccgccagagggtcatcttcagcgccaagtggtacgttcgtcaggatggacggccaggatgatataaattctttcgtgtcatctgatgatgatgtgtctcggtttttaactttttattggttttcaggggattcaccaggttcaagcgcgacgagtacctcaagcttaagagcgagggacgcatcgtgcccgatggcgttaacgacaaggtacgtacgaaaccgcggtgtatcgctcgaaacgacaaaattataaccaagttgattaatgcatgtatggtgaacagcggctaattattctatatatatatatataatattttttagaaataatactatattaatgggaaattgcaaagtagagactattttgctaaaattgtaagtttagcaccatattgtataagcaaagtttgatagggtgtatatcgatcaaaatttgattgagtgatatgaattttcatggtgccacataa

SEQ ID NO: 12309 - DNA, 1024 bp, Oryza sativa
aaagcccaaaaagtgaagtggggtcccccttatgaagggtaggtaaagcggggcacatgtggtatccctttaagctataaaaggaggaccctgcccactgagatgaggggacgactcccagaaaatctgaactcaagaagagaggaagcaagtgcgctctctggagtgaagaaacccttgtaaaactcatccataatcccaaacacaggagtagggtgttgcgctccatagcggcccgaacctgtataatccgactacgtgcaagcttgccggtaatcttagggacgagcgagtgatttccgagaggcgggcctccgcccccggccaaactcacgaaagcggggtcccatgactccccgctattgaggatcttccctcgacacgaggcaagggtgggcgtgatggagttgggtcggccggggtgtccggttgatcggcttccggattcaccgtggcacgagaggggactgcccgctgccttgcgaggagtgggggtgaaacctgaggtgtggtgcgattggttagatttaatgttactttatttactcaacagttttactgttttgctcaataaaatgttttacaaccgcctttatacaaatagccacaaaccgtccttgtatccccttgcacgtctgcatcgttggtgtggcttgctgagtacggtagttgtactcagtcttgctattgttcccccttttcagaagtgtattgcttctgagctgaagacgaagttagaggaccaaggctcagaccccagttgagttttgcctgtggagtggagctgaagctccgctaagatcgcctttttccgctgctgctgctttcgtttcggtgtgaggactaactgcctattatgtaagtattttacgctttatttacgtttggatctgtatattaatttgtcgttttgtgtgccttggttgatgcctggacatggatttaatacacaaaatagtctagaaatttgggctaaatttctgggcgtgacacccggcatgttgatgccgacgctagccatcac

SEQ ID NO: 12310 - DNA, 930 bp, Oryza sativa
  unsure (1)..(930): unsure at all n locations
aggggatcgtccccacgctagacggaggggcttgcgctcacacctctcgccgaagcttcaaggccatgagacgagagcttctggccgctgttcccacgcatgaggtggtccggaaggcgcgctagtcagaggtgaatctcacattcgaccagagcgaccatccgacggtgctctctcgggggggggggggggagttggccctgttggtctccccgaccatctacaatgtcaagataaagcgtgtgctggtggatggcggggccagtctgagcatcatctccccggctgcctttgacgcgctcaaagccccggggatgaagctccagccgtcgctcccaatcattggcgttactccggggcacacgtggccgcttggccacgtagagcttccggtgaccttcggcgactccaccaacttccgcaccgagcggatcgacttcgatgtggcggatctcaatcatccctacaacgcggttctgggcagacccgcattggtgaagttcatggccgccacccactacgcctacctncagatgaagatgccgggtcctgctggtcccatcaccatttttggtgatgtcaaggtcgccctcgcctgcgcggagcagcgcgcagacaacctggcggtggccacggagccacaggcccccgaggcctctgcgtcccgcgcttccaagaagcgcctcacctcggctgacgaggtgccagtcaaggaaatcccccttggcaacgatccgtccaagaccgccaagattggcggaaccttggacgccaaataggaaggcgcgctcgtcttcttcctgcgggcaaattctgacgttttcgcatggaagccgtcggatatgcccggggtctccagggaggtgatcgagcaccgccttgccgtgcggccggatgcgcgacctgtccggcagaaggtgcggcgtcaag

SEQ ID NO: 12311 - DNA, 3083 bp, Oryza sativa
acatttgtgtgggtagggactgcagcagctcaggcttgacaagcggtttaccgagttcgtacatgtatttcacttccgccttttcgattggtgcgactcctagcaattgatccgtagttagaccggtgtcagtaataaattgttctatcgtcatttctttaacggtcaccaacggctcgatctcctggtttggttgctctccaagctgagggactggtttggactttccagaagatgctttcttcagcattcgctcatagtccgatagcttgatggcctccttgacagatgcagacatacccctgaagaagttcctgacactggggtctataggaatcttcttttctggacttcgaggcttgaattgtctcttgacttctgatgcaacgtaagcgtcaagctcctcttgcgtgcaatcgtaccccgggtccttgttcttggcggcgtcaactttcgccttctttgttgcccttgtgtgggcaagcggtggagctgggggggcccttgactttgaaggtgccggaagaggagcttgctggggagtaggtgtaggagcacgaggaggagtcggtgcaggatcctgaggagtcgatgctggagcctgaggtggagacggtgctggcggagcatgaggaggagacggtgcaggatcctgaggaggagatggcggagccggaggagatggtgcacgagacgctgcttgtcgcccagggaggatgatgtaccgcctgcgccatagaataatggcatggcatgtgtctcgtagatgcgtctcaccgtctcctccagggtaatccagctcgaggtcctcgtatgcgccttcgaccaactcaacttcgaccttggagtatcctgctggaatcggcctgcagtggtaagtacctgaagggtccgttgggatggccatgcccgacgccaccttcatgttgtgagagagtatttattagtaatcaacatatataagcagcaactagcggaatggctaaatcttacctttattgataagttcttgaaaggaatatgcagctcacatggtgtccgctgagtgatgtcatcaacgggacaggtcgattcgtccagtgtttgcatggcgtccatgctctgtgatcctaactgccccgttgaggcgcagctgctacggtttcctgacgggctcaccattgcaggaggaatggtcggctggggatcatgggaccgatgtgcggccatgcgttcatcaaccttccttgccacctcctcttgcatgttgagttcgtagctcgatacccggaactctaggtctgcaatcttcgcctcggtatctctcttgctcctcatccgactcctgtacgtgtggatgtcctccttgaaaccaatcttccaaggaatcacccctttccctcgagttcgtcctggatgctctggagtctgcagggcgagtgtcagctcgtccctatctctgtctggtcgaaacgtgccctgagaggaggcttccactgcatctgttagtcgtcgcgcagcctcttgtatctgatagccgaagaccagtgagccatcagctaggttgagcgttccaccgtgagcatagtaccagaacttcgatcgttccggccaattggctgttgccggttcgatacccctctcaatcaagctagcctccatctgctcccacttcggcatcgcgacgctatagcctcctgaccccaagtggtgatggtacttcttcttggcggcattttctttgtttctttccatcatcgcctgcccttgttcacctgtcttatatgcaacgaactcgtcccagtgatcccttagctttgggaatgtgtcgaagttcggtgtctgccccttcagtatatacttctggtacagatctcccttgaagctctgaaactgttctgccattttcttcagagtccaccttttcactttgtcctctgtacccgcaggaagggtgaatgtctcgagcattgtggtccacagcatctctttctccgaatctgggacaaagctctcatgatctccgcgtgcccttgttcttcgccagtacaccgtactgacaggcacgttatcccgcacaacccaaccgctgtgacgtacatagttcttggcggcttcggccggggcactaggacgtccatcttcttccacttccgttatgatgtgccgaccctcaagcttcttcgctgcacctcgttgcccgcgtgccctcttctgtccaacggagggttgactaccactagcctcctcctcctggttcccctccacatccctttccacgtgcccctgctggttcccctccgcatccctctccacgttcccttcctcgtttaagtactggtttggatcctcgttcccctcttcttcattccagtactggctgcttccctccgcgattgtatcgtacaatatctgttccttatcgcggtcagccatctgttgatacaagaaacatctgctaagtcacgagacatttatgttttaacaatctaagtcatgtatgctaagtgtaattgtcgtacattagaaccctacacaaccttacgtgctaagtctaattacaaatcgtgatataagctaagtctaggtgacgtatattatacaaccctagctagtaaataattatatactaaatctaattacaaataaaataatcttatattaaaactcaaataatattacatgctaagactaaaatagtcatgtatatgctaagtgtttcgtgcgtatatgctaagtctaattaagactacaatagtcaattgctacttgtcgcaccaattccgtagtcaataattacataccaagtctatttacaaataaagtaatattatattaaaactcaaataatattacatgctaagactaaaatagtaatgtatgctaagtgtttcgtgcgtatatgctaagtctaattaagactacaatagtcaattgttaggagtcgcaccaattccgtagtcaataatgtcatactaagtctaatttgcaataaaataatcttatattaaaactcaaataatattagaacactacacaatcttatatgataagtctaattacaggtctaataatcttaattaattgcattacaaatataacaa

SEQ ID NO: 12312 - DNA, 1929 bp, Oryza sativa
atgtgcagagtgagcagcaggatggggtattttcttagtagtgaggttagcatcgagatctacaaatgtatagctgagcagtagacctgagcattgcacgggtggcacctgagatctctaaataaaatgtctgaaactctcaaagtcttaggggaagaagtgtatatatatacacacaaagtcagacgattatgataatatgatattagatcgcgacagtggagcatacatacatatacaggtggattaattgtttaactatatatatatatatatatatatatatatatatatatatatatatatatatatatatatatatatatatatatatatatatattatatgtatatacatgcataatatatatgtatttatacatatatatgttatgcaaatgcatatgtatatagatatatatatgaacaaaatatatttacattatagaaaatgtgtacacatgcatatagaaacatatgtagtcatgtattaattacaatccattatatgtcctagctagctacgatttcgacgtagtagtactcgctgctagctcagaagctaaggaccggtgaattgtgtttccgtcgtagtagaattcacccttgggatcaaggatttcttcgttgatgaatcccatgagttgttcttgaaccgccgcgataaattccttgtgtgtggtcaggttatccctcatgcgaataaactatatgaatgtatgaaattgattagtaattaaacaagaaatcgctacgtaatgaaattttgaatttatttgtacgtacatcgagctctcttgtggtgatgatttggtctgcaaggcagtggcaatactcgcacacgtaatagccgcacaagttagttccctgcttttgctttgcgcactacaaataaatgacaaacaacaagagatctaattaatatacacttgtatgtatttgaatcggagaaatataaatgtagagcatgtgtactcacaggaaatttgaacttccgcctaagtcattctctccatttgccgcggaccaaatgacggaaccgataccaagccctacatggagtttaaagctatgattcgtagtagcaattaacataacaagattttcttaattaacaaaggaacttatgacggtacctgtctataagttcgaaaaccttgtcaaacgtagactcttttttatccattgagtcatatacgttgacggtgcaggcctccaggtcgatgagtaaaagcacccagtggaatctgcaatgtgcgtgggatgcattacatatgaaacacttagcaagttcgtacgggaatgaaatttggtatgtaggaagacagtaaaattaaactaactctgtgttgtatggcaacagtatgaacgtcttgtaatgctgcgccttcaggagatggacgagattgtcctctgtttcttgtggatattggtcgagcattgcgacgtttactttccgagggtcgatgaatccagtatcgaaaaccctccgccgtcgagccctttgaatctccattctacaacgataaaagggagtatattattttctatggtctacttatatacaaggacctaattaattaaaggagacgtatagtaagaaatctaactgaacgatatacttacaaaatccagcaactcataatagagacgtcgagggcgtccagctggtatagttcgtagattcccctgaaattgatccagagaatgtcatctccttgcaagaagtctgtgtccctgatcctcgctccgatcatctctctaccggtggcgctcatctccatgtacagccgatggaacttgtacatttgtgtgggtagggactgcagcagctcaggcttgacaagcggtttaccgagttcgtacatgtatttcacttccgccttttcgattggtgcgactcctagcaattgatccgtagttagaccgt

SEQ ID NO: 12313 - DNA, 2572 bp, Oryza sativa
  unsure (1)..(2572): unsure at all n locations
ataacagagaatgttcttagagtgtaatgaacactaaggaatattatatacgaaaaatggaaaagagtatcaacagccagagccactttccctccctcaccgacggaggcaagcgcggaggtcctcaccatgtcacggctgcgcggccacggcacgggcgaccggtacccggagggcacccgcaccaggcacctgggccgcggcgccacggggcagtggcgctcccggtgctccatgtggcgcctcgagcgcagcgccttgatcgccctcatgttgtcgaggcacgggatgtagtccgccgacgacacccctctccccggcctgcaagtctcccacctcaccttcgccgccggctcgtccccgccaccgccgccgtcgtcatccgccactccctccgtggcggcggcgcccttatccgcatcgagccgtggcgactcgctacttccaccaccttcccctgctgcagcgtcggcgttgacggcggcggcggtgtcgtctggtcgcgatgcggtctcttcggctttttcggttgcgtcggcgctctccccggcttcggcgccgccggcgacgaccgcgggaggcgcgagcgtcctagtagggcggtgaggcgggaggagaggacggagagggattgcgcggaggggtcgaggaagagaaaggcgagggcgaggagcgcggatacgaggaggaagagcgacagcgagaggaggaagggccgccgcttgcgctggtcggaggtgggcacggccatcgtcgctgctccctcctcctccgccgccgtgaagagatgccggagaggcggagagagatcgaagacggtggtgccgatggtggtggtggtggtggttggtcacttgttcactcggttggtcggtcggttggttgggcgggtgggaggacggagtcaggggggaagtggagcgtcgcggccacggcgggttgcgtggttggccttggccggccgncgncggcggcggcggtgacggtgacggtgggtgcaggtcgttttcgacggtggtgatgagccttcttccccttcgattttggtatagttcgttgttgcagagctagtgcgatatctgattttgttatgatttgttgcagctagtgcgatatgccggtatcccgtcgagtccttggcgggttatctgactctgacgaaacgtgattattccattctggttatcggtaatgacgcactgaggaaagcggtaatgcaactatacccgttttgccagaactcattcaaccctctcgtctacgccaatcaccgagtcaaaaaacattcacctggatttcagttacagactagtaaaaacattcacggacttcagtaacagacgtacggagaagtatacaccctccgtctaaaaaaaccgtatatatattataggacaataaatctgaacagatgtatattcagattcatgtattaagatgtgtcacacccagtactagattagttttttatgggatagtaatagaatgtgtcacatccagttctaaattagttttttatgggacggagagagtagggcttacagctacatggtattgcaccagaaaacgaaaaaaatgtagcctctccgaatcgatggagggcacatgccgatcgatgtgagagcatcgccaacaatttttcttaagtcctcctcatcttaaaattaaggaatttcattttacaaagtaattccaacagttctcctaatcgtctactcaagaattagaatttcctttcctgtaaaaatcgctatttcacaatttaagcatcacatctactcaagaagttccctttcccgtgaaaatcgctcacaagttgggcgtcacgctcgctcctaatcgatcgtgcaccggggaggatgaggcgatcgtgcgacacatcaggatgcaacaaagatttatgttagtagtttagggtgtcccatatttttatttcagggagtcaagttttaggttatgagaaccataattttaagtcctaaatgcccatcaaagaatcctgcaataagattattgaattggaatttaggggaactgtgggccatgctctgaatgcagtgataaggtagagccgtagttgtattcaagtgatacttgcttaaggtgtgaagagggagattaccattaaacttcagtaacaacacctaaacaactaaaccctgtacatgtttctgggggagaaaaaacaaccaaaattacaacagacaaaggatgaaaaactctatctgatctgtgcctgcactcgctgctgacgctggttctccttcagcttctccctgggtgacagtttgtcaccgatcagcgtgaccttccaacagtctgcttggaggatgaaaactgacccagcttttggcacaactgcaggttcaaactttgtaattaagccacaaagatatgcagataatatctatagaatcgaatgtctccatgcaaacagagattgataacaccagccgatggactgactgacaagagtatttcaggtgtctcgagcaagaagcgttcaggttgctggatggaaatttcaagtgcgtagccctcagagcaatacataagctttcataacagagca

SEQ ID NO: 12314 - DNA, 880 bp, Oryza sativa
aaaaaaaattgacaatattgaaattgccagtatactataaagtagaagaaaagaacaacaggaatacgactaaggagggtcctaattcacaagaccaacaactcatttggacatcaaggtacttcaaagtaatatctacctgttcaataaactgaatgtatcttgtaacgccagttttgaattgagttccacctccagggaagacaagatagtcaccagattttgttacccagttttggtccttcttatactccaccaatttagggtgaggaacattgttgtaccaaatctggatttggaaatgaaatgagatggcttcaaatagtcagttaatggcatcttaaccataagatattcatgtaactatcataaatacacacactgcactcactgccttgaaagttgaaagcctataaaacgatactagtggttaaaatagtatatgcacaaaaggaaatttagccacattaaaggatcactaagcacaatctgcttgacacccaacattacagctcttatctggcattctctattctgcctcacgacagtagcttcctaaaacagaagataacagagaatgttcttagagtgtaatgaacactaaggaatattatatacgaaaaatggaaaagagtatcaacagccagagccactttccctccctcaccgacggaggcaagcgcgcgaggtcctcaccatgtcacggctgcgcggccacggcacgggcgaccggtacccggagggcacccgcaccaggcacctgggccgcggcgccacggggcagtggcgctcccggtgctccatgtggcgcctcgagcgcagcgccttgatcgccctcatgttgtcgaggcacgggatgtagtccgccgacgacacccct

SEQ ID NO: 12315 - DNA, 575 bp, Oryza sativa
atttacccccaccccgtccgggaagtgggaattccagcaagaaccgaggtcctcgtcaccgtcgccatggttctccaactcctccccgctgcgaaaccttcgccgaggaaggatcccactcgttcgggtggttcggctctctctccgccccctggcggagggagcccgcaatgcgtcggggcacgacgccgtctcgactatgaagacgccggttcgccccaaggcacgcttcaggcagcaggcgcccttctacggcatcccccggtaaacccggagccggagactcctgtttagcgctggctggacgacgtggccaacttggtcattgctgcccagcgacagttgcccacgggtgcccgatccactgccgctggtacatcgtgtacctcggtcaccccctcctcgtcggcgagaagaagggctcgtcgatcggccacgatctcgaggcggtccacggttccaacatcgtcaggggcctcgggaagctgaaggcatcatgacggcctctacgggacgcaggacgctcgagtcaacatcgagcgacgccgggacgagcgctgagctgcccgtatggg

SEQ ID NO: 12316 - DNA, 578 bp, Oryza sativa
ccgcactccgcttttgtgggatcaaacgggagaacgtcaggttttcgggacggatatcttgagggaagcagaagaaaaggtgaaaatcattcaagaaagattgcgtgtggcccagtctcgccataagagttatgccgacaatcgtcggagagatctaagttttgacgcaggagattatgtgtaccttcatgtcacgcctcttcgaggggttcatcgttttcataccaaaggaaaattggcaccgcgttttgtgggaccttataagattgtcagtagaagaggagaggttgcttatcagttggaattacctcaatttggcaggcgtccataatgtgttccatgtgtcgcaattgaaaaagtgtttaagggtacctaccgaagaagctaatcttgaacagatagaagtccaagaggatctgacctatgttgagaaaccaatccgtatcttggaaatagatgagagaagaaccaggaatcgagttatccgtttttggtaagtccagtggagtaatcactcggaagaagaatcaacttgggaacgagaagatgaattgagtcagctcatccgcatctgttcg

SEQ ID NO: 12317 - DNA, 654 bp, Oryza sativa
caggtcgactctagaggatccccactctccgcttttgacagatctgcatatcctcgggccaacttatccagtactccgtagtttgccgatttattcacccgccagaacaccgcctcacctgcatcggcaagccggggggaaaactgataccccagtagccagaacagaccgaaaataatatcgctgctacccgcagtgtctgtcatgatttcaactggattcagccctgtctgctgctcaagaagtccttccagtacaaaaatcgaatcccgtaatgtaccgggtaccacaatgccatggaacccagagtactgatcagatacgaagttataccaggtgatgcctcgtccagaaccaaaatattttctgttagatcctgagttgatggtcttcactggtgtgacaaagcgcatgccgtcagctgatgccacttctccacctccccaacgaccagcaagctccagtgtggactgaaaatcaaccaggcgggcattggcgctgaccagcgtttctgcacgaaggtaattctgtttcacccaactgagccgatggcgggtcagtgctggtatattgtgctttatcagcggttccagtccgatattacaggcttcagccatcaataccgcacataaactgatgtgcaaatcttgcgct

SEQ ID NO: 12318 - DNA, 1356 bp, Oryza sativa
agataatcacaaccatcacggggaaaaaaccaagcaattagtaggttaggcgagctactaaaaaaaatccaatacattattgctcggaaaaaaaaaagctgataagatgggatgacaccgaatacaaagcaatctggatccagacacttcaattatctacgcagctgttagtacaccatcaatgaatatccagatacggcactagtacagtacaacagttcaacacctatattatagatacacaattgtaagacaagaagacaaggaaaacaaggttcgttggtgtatgtgcatgagcacgacagatgcaacaatcggcatctagcatggtcaaaatatagcagcataaaagctttctagaatcatcgacccaacacctctaattcaatgccacatgctaacatctttgcacacagcgattttgccaaaatggactcaacctagctctgccaacaatcgagtatgatgaacaatattatacaagacaataagtgcagctcagcagctgttgtgttggggctccgaccgaacacatgattaagataacaaaaaagggagtgtggatcatgcgtatcactctctcatacagtatcattcgttgggtcaatagcagtggtatggtatattacaatacatgccgataagcttataggcactacatcagggagaaaacacagggaaagacagaaccatctaatttgaaacaattatctgacttccgatccataattcaagagaacataagggcaaactcatgaacatatgctgaatgaatagattatgcctgcagggtaacaaaccgagacattgttacctcaccgtcccttggggttcatgatctgcgagaagacagcactaggcgtcagcccatccgagtcaatacttgcaacactctgctcacccatgcttatcgaggtagttgtcgttgtcgtggtgcttgactcgatagatggatcattgggatccttctttccaactatcacaaggggagtgctgtcgtctgacatcccacatccaaggcttccgctctcctctgcactttcttgcatttgaagggcaaattccaagttccacagcacatctcccatcgaaggacggtcaatgccctgatcagaaacacacttctcagctgtttctgcaaacttcttgaaacattgtggagcaatctttcccttcaggtggggatcaacaatctgatcaagaatacccttcttctggcagtgtaatgcccactcagccaagctaacttcttcctttgcaagagtgggattcaaggcaggccgagcacataggacctcaaacagtacaacaccaaaagaatagacatcagatttgtcagtaagctgctgcctgcgg

SEQ ID NO: 12319 - DNA, 651 bp, Oryza sativa
ccaagttttacaggcatgaaaaagaagaagaagattcatgtgagtttagttggttacaaattacaaatgcctgttgcaatgtttgttggattaatatttccttctgtactattctatttactaattttgcaaatttcaggtggagcatgatacatctcttactgaagctggagatggtgaagatgctataggtaattgtggcttgctcatatttgccctggttgcgttgttttgctttgtctgatcatatattgttcagatgatcaaatcggagaggatgaagaaggagaagggattgtgcttggaggtgcaactcgatacccttgggaaggaactgacagagattataaatatgaagaggttaatactccttgcctgttcaaatttttgtgattctatatccttgtcatgttcttgacagatcatgacttgtaaattccatataagatatacatatcaaaatagaaagctgtggagttttcatattatgtcacctgcaattatatttttaagttaaactcccttcggttccataattcttgacgttttcgacaaagttgaggtcaaacttttataactttaactatcaataactttggaatattagtttaaaggtctagacaacatatagatttgtcttacaaatactat

SEQ ID NO: 12320 - DNA, 558 bp, Oryza sativa
actatagggcgaattcgagctcggtaccctgtagcatgaccaataccttctcatgttttagcagccttaactgttgaatggctgcatgtgtcttcttctcactgggctgcataaggacagggaccctgttctccactggtgtttttctatgcttgggcgtatccttcggtttagatttaaaaggaagtagatgctgcagttttgcagggatctctataggattaaacttccgcactttccgctcaatgggctgccatttggagataacatgatatgagcatgatattaagaaaaataaacacaaaagatttcgacgctcagagaaccttataaactgaatctgtgttgtgcggtataggaatattatgtgccctccgcagctcagcagtagttctcatgccttgccaagtctcatcttggggttgaagagcagttgtcacaaggttacagtaggtgggaacttcaacattgacccatgcacgcatgaagacaatgtcactcataagaattctgtcttcaaatgtgcaccttgcaatcccgtctatactttcccctttt

SEQ ID NO: 12321 - DNA, 846 bp, Oryza sativa
agcgccacgctcctcttcacgaggcggccctcctcccacactcacccctggggggggggggggcgggttgtagggcctacatagcgagtctccggaatgtccagaaaaccccgaagtttcgccccaaccttacgaagaagtatgatggtagcatcaatccctccgagttcctccagatctacaccacggttatcgtggcggcagggggtgacgaccgggtcatggcgaattactttcccatggccctcaagggtcaggcgcgtggctggttgatgacccagccccccgactccattcactcctgggaggacctgtgccagcagtaaatcacgaacttccagggcacgtatcctcgcccgggggaagagacggacctacacgctgtacggcggaaggatgatgagtccctccgttcgtacatacagcgcttctgtcaggtccgcaacactattccgtgcattccagcccacgcggttgtatatgcattccggaacggcgtgcgacataatcgcatgctggagaaaatcgcctccaaggagcccaagaccactgccaagctcttcgagctggcggacaaggtggcccggaaggaggaggcgtgggcctggaactctcccggcaccggtgcggcggccgcggctacccccgagtctgtcccccgctctaagcggcctgataggagaggcaaaaggaaaccagcccgctccgatgacgagggccatgtccttgcagcagacaggcccacgcgggccccgtgcaaaggaaaggcccccggcgataagccgagccccactgttccctctggcgagggccagtcggcggacaagtggtgctcggtacacaaca

SEQ ID NO: 12322 - DNA, 741 bp, Oryza sativa
acgcgcatgcatggctccattatcgattcgaatatcttgccgccattgggaagattaaaattcaccttgttggtcaagaagaagttgaaggtgatgacctcgacgatgcccttggagttcatgaagaggctgagcgagacagcgtcgcggagtgggatctcaaggtacagcgacgacaccatgacgccgacgagcttcccgacccaggcgaggaacatgacgacctgcagcctgccccagtgcatgcgccacacgtcggtgctgagcccggtcatggcgtagtagagcggcaggatcaggccggacaccatcgcctcgatcttctcgccgagcgccgtgccgagcggcgggccgtcggggatggccagccccagcatcagcgcgccgtggaacgagttcgtcccgatgacgtcgctgtagaagccgacgaggaggacgacgaggaggaagacgaacacgtaggtctcctccaccggcttgcccggcggcgtgcgctcgatcacccgcagcgcgacggggcgcaccacgaacagtatgaacgcggcgagcaccgccagcgagaggaacgcccagatcgacgtggcgggcgacacgaggaacgcctcggcgaggatgtacaccaccatgatgatccacgcgatgccgtccgtggtcatcgacgccgacatggcgatgcggccgaggtccgagttgaggaggctcagctccgacaggatcggcgacagcaccgcgaacgacgtg

SEQ ID NO: 12323 - DNA, 696 bp, Oryza sativa
attggaacacaaaaacttcctttccctgatgaggcatttgatgttgtccactgtgcaaggtgcagggtccattggtatgcgaatggcaagtattctattacttcaccaaatttataagaagctaccacagtgtctatattattttctcagaaaactgtccgttttggtttcttgcaaatttcttttttaactattatttgctactgggaatttgcaggtggaaaaccattgttggagcttaacagagttctcaggcctggaggatattacatttggtctgcaacccctgtctaccgtcaagaaaaaagagatcaagatgactggaatggtttgtgtggtgtcatgttctattatctgccaagcattcagcttagaatatcacccaagaaaacttttgcttagtactttcctaatgaaaatagcctagtacttttgcttcttcccaaaacaatgtttacttagcaagttaacatttgtcgtttatttggtgggttatatctgtgttcactgaaatatccatttcacatgtggcagcaatggttaaacttaccaaatcaatctgttggagaacagtggtaaaatctgaagatagtaatggaattggtgttggcgtatatcataaaccagcatcaaactcttgctacctgcagagaaggacaaatgaaccccctatgtgttctaaaaaagatgggcccc

SEQ ID NO: 12324 - DNA, 1799 bp, Oryza sativa
tctgcaaattaatattgacattgcaaaagttagtggcctgaacatttgcacttgatgtactgaatttttcaagatgctgttaattatcaaaccaggtggcaactaggtacgtcatatggtatcagggagtcatctttgaatgaggggagatgatcctctgggttccactggtcatcaccagctgttgcaaacatctacagcgccatattgtgttaaaacacaccatatttaagaattaaaatagtctagagtaattggaagcacttactgcaaaatcttgatttaagaaatgtctccagcctacaaaatcagttcctccaaatctctgtatctcatccgctgctaatacttgaactgcaacattgaatgtttcttcttgcatttgagtgtctagccgaatagcctgttgtatgtcatgtaggcttaatgacatagggacaggttgggagatgtgaacccagattttcctgttaaatgtgatatctttacaattagtggtgaaagaaaggaacatttcaggtaggtggcttacattagagcttctgcataagcgattgaagttgtatatgtgtataaatcatcaagtgtttcagataggtggcttacttaagagcttctgcatcagtgattgaaattgcatatgtgtataaatcatcaagtgccttctggtcatgcctgacgaaagagtgttgcttgctcagaaatggtgatttcaccgaatggcttggtttaatcgacctctttggccgatcgaataggatatcagaaggaccgccgataattctcctcttggatttaggtgggagctttgtacatgcgtactcctcacgcatgaaaattctcgccccactcgtctctttcaacatagagtccggagagagttaactaagtgtagtttgttggtaacctatatcagacagaacagtaagagtgacacatattatgtgcatgtggttggttatgaatgaaaatcaaaaactgacacaggcttgtgggtatcattacctccattcgaagagggagttttgtgcactgcattaccttctccggatttgtcagaggcatctactgactttgagattggctgatctggggtacgtgatagaaagttgagttcgtgttctttgtcagagtcttcagccacattggagatgtcatgacctggggtacatgccaccatgtttgcttctgcgatatcttgtgttattcctagattaaagcttgggggctcgatgtcagacctggcatcgtaggtacgatccacatggatagcctgtgtacagatatatcaacaattcttatggaaaaatggattctttttatattgaatagattgacaaactacatgagattgcacctctattgcacccgtatgatggccaagattgtatttttcatcatgtttgtttcgcagctgaaacccaaaaaaaatgtcaatagtctgaagtttctgcacaagggaaatttcaacaagaatactctaccggcaggagagttgattttaccttcatctttccatacgcggggaaaggattccggttcttgagaattacatccctctcaatgaattctgctatcatggagtcattgtacacgccaatccttggaatgttttcctgctcgggagtgtccgtcccgaaatccagattgtccagataaaaaagctgagcagtataaattatagcatgtgaaaagatgttgcgggtatattagaaagtaaaaggcaaataattcgaacgaataataggataatctcacctgaggtagtataatgcagccattgatgtaaccaatgcttt

SEQ ID NO: 12325 - DNA, 1704 bp, Oryza sativa
acttaaataatgatattaaagatcttaatatggctagatgctgatctacataatatatgttatcaaacaaaaacacgacttcatttcttgttttggatgttaatcaatcttattttgttgaaccagttttgcagcagcacttgttgataaaccattatgggtaatgaatgttgttccggtcggtcagcccgatactttgccagttattttcaacagaggccttattggggtatatcatgattggtgtgaatctttcaacacgtacccacggacctatgatctccttcacatgagctatcttcttggaagtcttacaaataggtatgcagcgaggccttgaaatatttactacttttgctccattacctcataatcatctagggtgatctttgcatctttattttaggtgtgacatcatggaggtagcagctgaaatagacaggatattgagacctgacagatggtttgtgttgagagacaccacagaaatgataaaaaagatgcggccagttctcaagtccctgcactacgaaactgtagttgtcaaacagcaatttcttgttgctaaaaagggtttctggcgttctggcaagtgagcctcctgatcagaatgacgctcaaatgttttcagggtagtcatcaacagcaaacaattcaattgattctttacatccctattgattagttctttatacagaagacagagtttgatcaaaccaaggattaggcatgttgattctacaaaatacttatacagaacagttagttcgacaaaaatacatatacacatcttgtttatggggggccattacagtaataggcttaggctagtccactagtgctcacaagtttgtaatcatattattattcttttacattcagaaacagatacttttcaggaaaacattatgctctttcacgaatacatcctctgtccaaaaaaaatcaaactttggctatgaatctgaacaagaaaatcaaactttggctatgaatctgaacaagattcatagctagagttcaattctttttggtacggagagagtatatgtgatctgcttgcttcgatccgtgatgcaatgtaagctttgggccatttctgtctcgctgaatggaggctagtgtacccctggtgtaacgtaccactgcttaaaactctgaagcgcgtgtggtactttttacctcgcacgcgtacacgcggcagggcgtgtcggtcgctgagtgcccggctcagcacctggtcaaagatcgccggccgggacccctccggcccacgttttccgccggcgggaagagacatcagttaaagcagtgcgcacgcacgcacgtaaggagtacgtacttacgatggtacgaacgtacgcctgccgcccgcccgtacatgcatgcacataggaacccaaaacaaaaattatcgaaagtttaatacatattagttaacatgctataattcagctagaattaaataatccacccagggtactataaagcctagcactagtacaaatccgagcataccaatcgatttatatgtgacggaggtggcccgttacaataaagttattcatctttgtcaggttgtaaaaagccccatcgcaaagacactgagttagggctaggccagtcaccgatgactctcatcggttacggggattggttgcagctcattcaaggtaatcggtgaatgatcgatacgatacccta

SEQ ID NO: 12326 - DNA, 1144 bp, Oryza sativa
aattttattatagcatatagttcttattgaaaaacttgagttcaaaagggtagaatcaaattagtaaacctatcagctaattctatcaaagaaagcacaagcagccaaaggtcagtgaggttagaagctaacatcgagagactggtagcagcagaacccaacatttgtgcacttaatgttttttcgcttttactgcagttttagtatataacagaataaactttatgccccaagcaataagtaaagaaccagaaggtgagaacagtaataacataaccaaaaagatggtggaatccatacggtgtgcttttggtaagctctgtgatatactctttccacatctcatgcattggcttgtagaggtcaaacctgcaagggcaagccacatatgtaaaaagtacataatgtccaaaggtactatattatgtgaagattcaatcaaacatgtaaagtgtagtttaatcattaccctaaagggattccattttatcaaaagaaaaccatgataaggaaattatgactgaggacaagaaaaggagtcaatctatgcacttattcggaacaagacttacttgcggagtgtctcaggtaaatcaaatgacccacatttcttatgttgcttaagtgacatgtgcctttttgatcgctttgaatgaattaacaaagattttgcctgtgcatcaactaatctaggacccctgtgaacatagttatccagcagaatccctttttccagctttaactttttggctcccttggtaatttttccagcatctccacctttctgaattatgtcataaacaacattgtgcacaacatccatactgtccaaatcctacaacaatgaagtacactacaataaatatcataagttatttcctcatgcctaaatttaatttttgaaacccacacacggagaataggtaccgaaatgcttctttggagcaaattatcatgtggagcaaatgaaagttcagagtatacaggattggtttctccacctacaaagttaaatgtacatgtcaaacagccacacacagaactcacagatctatgtatgttagagcctaagaaggcacctgaggaagcagaagaactggagattgctagacctgagatcagaagcagtgttagaaaaaatggc

SEQ ID NO: 12327 - DNA, 797 bp, Oryza sativa
atgaccaagttggccacgtcgtccagccagcgctaaacaggagtctccggctccgggtttaccgggggatgccgtagaagggcgcctgctgcctgaagcgtgccttggggcgaaccgccgtctccatagtcgagacggcgtcgtgccccgacgcatcgcggcctccctccgccagggggcggagagagagccgaaccacccgaacgagtgggatcctccctcggcgaaggttcgcagcggggaggagttggagaaccatggcgacggtgacgaggacctcggttctcgctggaatccccactcccggacggggtgggggtaaatgccaccgcctcctcctctacttccaggacctcgaccatggtcggctaaggcctggagaaacttgggacggaagaaagcgacttcctctcggaacgcccaaccgccccctacctggcgcgccagctgtcgagggaagatcctcaatagcggggagtcatgggaccccccccccctttcgtgagttcggccgggggcggaggcctgcctctcggaaatcactcgctcgtccctaagattaccggcaagcttgcacgtagtcggattatacaggttcgggctgttatggagcataacaccctactcctgtgtttgggattatggatgagttttacaagggtttcttcactccagagagcgcacttgcttcctctcttcttgagttcagattttctgggagtcgtcccctcatctcagtgggaagggtcctccttttatagcttaaggggggtaccgagctcgaattcgccctatag

SEQ ID NO: 12328 - DNA, 1444 bp, Oryza sativa
cggcataaagcattttctgggcctgcggataccgggttttcacatctcgaagtgcctcgctgacgaagtagacaggccgctgcacctttcgggggggccggttcgtgctgtcaagggctggtaactcggggcgcacctgttcggaggtcctggggggatcccagactgcctcgggatcatcaagctcagggccacctgccaaagcctccgctcctcccttgggggcctcggggccctcctgggggctagaagctttgggcgctagaccttcgggggacgaggggccatcgcaagccggagggccctctcgttcgccttcctcatgctcaactactagggcggcactcaccacatggggggtcgcggccaagtagagtagcaatggttcctccggtcccgaggctaccaagatgagggggaagtgaggtaagctttcagctgattgagagcttgctcagcttcctccgtccatacaaacggcccggagcgcttgaggagcttgaataggggcagcgccctctcacccagcctcgatataaaccgactcagggcagccatgcatccagtgacgcactgcacatccctaagcttgctggggggcgcatcctctctatcgcacgtattttctcaggatttgcttctatgcctcgggaagagactagaaaaccgagaagtttgcctgccggcacaccgaacacacacttatcggggttcagctttacgcgcgtggacctaagactatcgaaagttttggctaggtcctatagcaacgtgtcctggtggcgcgtctttaccaccagatcatcgacatacgcctctacattgcgccctatctgattacttaaagtaatacgagtcatgcgctgaaaagtagggcctgcattcttcaacccaaaaggcatagttgtataacaaaaggtgcccacaggagtaataaaggcggtttttttcctcatcttccctagccatacgaatctgatggtacccagagtatgcatctagaaaacacaaaaggtcgcaccccgcagtggagtcgactatttgatctatgcgtggcagagggaagggatctttggggcatgccttgttgaggtcggtgtagtcgatgcacatccgtagcttgccattggccttcgggaccaccaccgggtttgccagccactccggatggatttcctcgcgaatgaaatcagcctccaggagccgcgccacttcctccttgatgaaggcctgccgctccggggcttgacgccgcaccttctgccggacaggtcgcgcatccggccgcacggcaaggcggtgctcgatcacctccctggagaccccgggcatatccgacggcttccatgcgaaaacgtcagaatttgcccgcaggaagaagacgagcgcgccttcctatttggcgtccaaggttccgccaatcttggcggtcttggacggatcg

SEQ ID NO: 12329 - DNA, 1112 bp, Oryza sativa
tccaaacagtcccgcagtcttgggtttttcctctgtcgtgtacttgtgtcaatgacggtgggcacaatgtaaacaccgggtccacatgtcataggtagacccctcttcttcatgttctgttgatgaggccccgggtttgttgggatgaacgcttctttgctggtggaccgtggaactggtccatatgtagctgtccgtgacggccatgtgaacatttgttgggtcggcccggcccagcctggcctgaattttcctaagcttgggccttgacttttttgtgtaaggaataacttgtcaacgaatctaattctcatcctttaacagaaaaaccagatacaactagatacaacaagtccctcaactattaaaaaccagtgcaaatgaggtccctcgctgatttggacagcggttttgactgacgtggtgactacgtagctaatttgactcggtcttcatctaacgtggcattgacgtggcaattcgatccagaaaaataataaagccgtgggaccccatatcaatttcacatgcaaattaataaaaaaatggtgggggtccacgtgggccccaccgtctatccgcagggtggcgttacttgtcgcgccgaagtcacattggccaagggagagtagctgcatcatgttgcagctgccgaagagaccagcaatcgcgtcctcctcgaagccgaaggttttgcaaggtgaggctggtgaggcacctgaacggggccgggtaagcgtcgaagagtgactggaagcgttgtccgaagaggcgcctctgttcgagggtcgcggcgccggcagcgacccgatcggtccacatgtccatctcaaggctctccaggctgctgttgctgccgtcaaggaggaggtcgtcgacggcgcgggcgacggcgtgcagcaggtaaggctccgcgatgaggaagctgagggacacgctcttgatggctctctccgcgcttggagccaacaaccaccttgtcgcgttagcatacgccgacatgatccggtgtctgtcgtccgacgaggaggagtcgccatggtcatgcggcatgaagtctgcgacatcgatgtcaagcctatgggagagcagatgagggacgcgcctctacc

SEQ ID NO: 12330 - DNA, 571 bp, Oryza sativa
tactatactgaacatttatgccttccttcccttagtcatttaagccatctgcattcttctaaatcactgcaacaacaatatttatatagataggcaacacagcaagttgagctgttaaaatgccagagtaagacaataatgagtatcatatcatacttttcattcgttctccagaatgccccagcattgtcgataaccatcttgagcaactcaagagacaacaccttcccgcgcagcaggacctgatcttcgggattatccggcgtcgagaacttcatggacagcttgcacaggttcttgaacagtgtcaacccatcctccctgatcttgctcatgacaacatcctccttcccatccgtctcggccggctcaaccggggaccccggctcagggacatcgcttccctccatcgtctcgtttatgaagctctgcgccgcatggacaatgctggagtcattcaggttgcggtcagacatgtccatcatgtcggtgatcgacaccgtgcgcacgcgcacatccatggagtccacctccacgcgcgcgaacacgatcaccagcacctgcgccagcg

SEQ ID NO: 12331 - DNA, 711 bp, Oryza sativa
acgtgcaccgcgtccgcgagcgcccggagacgacgctctacggctcccgcacggtgttcttcctcaccggcgccggcacgctgtcgccgctcgccatcgagctggcgcggccgcagtcgccaacgaggccgcagtgaggccgccttcgtccacgggcccgacgccacggcgtcgtggctgtggaagctcgccaaggcgcacgtcctctcccacgacaccggctaccaccagctcgtcagccactggctccgcacccactgctgcgtcgagccgtacatcatcgccgccaaccggcagctcagccggatgcacccggtgcaccgcctcctccacccacacttccgctacaccatggagatcaatgccctggccagggagagcctcatcaatgccgacggcatcatcgaggagtccttctggcccgggaggtacgccatggagctcagctccgtcgcctacgccgccacgtggcgcttcgacgccgaggccctgcccgaggacctggtgcgccgcgggctcgccgttcgacaggaggacggcgagctcgagctcaccatcaaggactacccgtacgccaacgacgggctgctggtctggaacccatcacagtgggcgtcggattacatcgacttctactacaagtccgacgaggaggtcgcctgcgacgaggaggtgcgggcgtggtgggaggaggtgcgcaccaaggggcac

SEQ ID NO: 12332 - DNA, 1303 bp, Oryza sativa
tgaacatgtgctccaagtgccacaaggagatgatcatgaaggaggagcagcccaagcttgctgcctcctccatcgatagcattgtcaatggttgtgacggtgggaaggagcatattgttgctgccagtggtagcacggcggtggcggtggctcaggtcgaggcgaagacgctcgttgtgcagcctaccgatgtcgcgggcaccagcgaggaggttgctgtagtccccaaggtcaaggaagggccgaaccggtgcgctacctgtaggaagagggttggctgacgggattcaactgccggtgcggtaacatgtactgtgcgttgcaccgctactccgacaagcatgaatgccagttcgactaccggactgcggctagggatgccatcgccaaggccaacccagtggtgaaggctgagaagctcgacaagatctaaggcggctaggggcgtggaatggattgcaacctacaagatttcaacatccacctttgctgctctatcctccacttttcttgtcggctgctacatttcttaaattgttcaactttgtgatgcacactgcatcctggcagccgaaagaattcatcctctcagtcaagtcaagtggtttgcgtgttgggtatgttgtgtaatctttattcttggtggctttcggtcagtattgtggtgtctcatttagctagctctgtgatgtactatgtcccatgcttgctacatttcaatcagtaatagttatcagcaatggtccatcatattgccaacatgtccattattcatttttccttaaagattatttatgtatgcacctttatctggtgcgcattcaaattcatgtatgttcaaagaagtttgccggattgtgcttggttggctgggtctactctagattgaaaatcggatctgagaggaaattgtgacaaatgaaagttagttctcaggttattactctatccccaaatggtcattctttaatgctactgagaatagttgggattagatctgcaacatgtaacactgaaagttcagcatgtgaagctgttctgtttcagtaatctgggatgtagttaataatctgccttaaagttcaaacatctattaacttgtgatctgaaccagcatacatattgttgtcacgaagataaccattttgtcgattatttcctggtgcaaggcagctgcagttctgattcgattgataatttcacagattctgacatctgctaccaaattctgccccccttatattatccaattgaaatccttaggtggataatttcacagatgcttacattttgttatatcact

SEQ ID NO: 12333 - DNA, 757 bp, Oryza sativa
ccacgccatcctggtaacttttctttcagctgctaaaatttacatttttgtgatatttgatgatattctgaatccagtagtattcatgtaggaccataagacatgttggaggtgccatgagaggtgctggtgcagagcaaatctcagtccttgtgcggtcaattgtagagagcaaagccagcaacaatgtattgcgttacttctacggtatagggtacaagttagatcatgaagttctgaagggaggatttgcatttcgtttccaccgaggtgcccagataactgtgaccgttacctctgttagcaagatgacaaaactccatgctaccaacgaagctgtgccaatcactcctgcaatacagctagtggaaatcacggcccctgctgctgctgacaattacaacgatgtcgtttcagccgtcacttcgttctgtgaatatctagcaccgtaagtaactaagtgttccttagctatctcaagattattactagactggcataaacgaattttctcacttttgactgcaaaacacactgcaggcttctgcatctctctaaaccaggcaattcgactggaatcgtcccgactgcaggcgctgctgccgcctcactcatgtcaagtggtggtggtggtggtggtaaaacgttgtgatcggtcatatgtgttggctgcaatgccatgatgatctccattgaccatcccacttaaaacattgttgccatctttagttctgtaacttttagtcagtagcaccat

SEQ ID NO: 12334 - DNA, 1082 bp, Oryza sativa
  unsure (1)..(1082): unsure at all n locations
ccaccaggcgccggtgcataccntgctcttgtattatatttgtgctgggctctaggcacacactgttcttcgggagctcaaaaaaaacgagctccacccggtcgttgaacgggtcggtgaagacgatgtaccatgtcagatcgagccacccaagctatccaacgaactccaccgcctcgatgtacatgtttatctgccatggaaccggaagcggggatggtttcaaaaaggaaccgccgcatgttgaaggctccactgttactgtcctcgcagagcacggtgacgacatagctgtcagccggcccgtggccggcatcggagcaggtgaagaggctagtgttgcggcacccggggaacatggtgctccgcttggtgccttcgatgtccgggaggcggaacagctcgccggtgagcgggttgcagacggattgcatgtattctggttctgggtcaccgaggtggcttccgcgagtggcgccggtggcggcgacatgcttggagaggccgctttcccaagtagcacgggctatgaggtcggagacgacagaggccgggacgcgggcatccatgtagatgaggtggaggccattgccgcttgtgcgtagaccttgccgcttacgaaccccatggtgtcgcttgttggtggcctagctcacaagatcacgcactcacttattgtttacacactatagaaagagtctaacagatgaacataagaactctcacgcacaagcgctagatgtacgcacaagcaatattttgtggcgctgcgcaccagcgcgcagctaatgcactgtctattctccacaaacaatataactaaacggaatgcttacatgcttaattagccacacaataataaaacaataacttagccacgattggccgcacgacgcggccgagcattctcgtggctaagtacccactcactaacttatcgacatgcaagccacaattgcttgcatgcagatcaccactaacatatgcatgcatgctagctgatccacacttcacgccataactctcacttcacttgacttggccactcctccaaggcaacttgcactagctgcatgtaatca

SEQ ID NO: 12335 - DNA, 7545 bp, Oryza sativa
atggcttacagatcgacattagcacatcatccaagtatcctagcccactcctaagcaacttgggactaatacaccactaagaatgtcatcttcttgcttcaccttgagggttgtcaacgtcaacaccattttgctattgggactattctcacctacactcattaagcatattagtcccaaatcaattatacctttgctttgatcaatgcccactttggattttgacttgatgttcatcgaagaaccacatcctcttgatcctcggcattccatcttgcggtcttcttataattgatacggattactcatagcttcaaatggcctcacatggtccatcatgaccatcatgacaaagccttcactcgcccttcaccaccggattcggtccatcggcgccaagcctcttgcttgcccttcaccccacgcatggtctattgtagccgagccttgcttgcccttcaccgttttgccataaatagtcacttcatactccgcatcatcaatgccttcacttactcctcattaaggtataatgtctgtcacgcccagaaattcaatagcaatttccgaacttatttgtgcattaaatcctcgtgcaggaatcagccgaggtacacaaactaacaatttaatatacagattcatcaatataataatgttacatacttacaaaagaaaagaaaactgcagcggaattacggtctagcgaagctccggctccactcccacaggtagctcaactggggtataagccaaacgtcttctccttcgcaacttgtcttcaactgaggtttgattgattattgcaaggtgagcatatgacatactcagcaagccacacagcaatatgcaagtgcacaaggataccaaaggatggcataatatagggctcatttgcaaaagcagaatttagcaaacatttgagaattgtaaaacagtagagtaattaatcatcaatattaatcaacactgaacagcacacccatgctgcacaggcccaaccatcctgaataaccatacccggctgcacagatctatctccaaaccaggaatataccattccaaaccaggagctaaattaaattattaccagttatagcatcatttattatggtgagaagtgtgagactaatcacgaaagacattgttagacccgcccatgaccgcgggcacggctattcgaatagttttattctggccagaggtgtaccactgtacccacaagacacaacccaccagcatgttaccgtgtccgcgcagacacgtcaccatgttgagtgattgtgacaagacccctcgcataactcaactcaaagcagtgcaccgttcccggatcatagtcacccccttataaacaaggcatggactccccagcgacccccgtgggcttattttcgccacttctcagtctggtgctccgcaatgagtcttgttatacaaagtgtccagccgttgcccattatggcttgtggttggcacggttaatgtttcacaaccgaaaatcgtgaaccggtccttaattgtcatgagcacgaccatcaaaaccatgtgctcacaacccaccattatcaagttttagttggcacattaattaattaaccaatcacgattgaccatcatgagctatcattaaatatccatcattaagtaatagtgaaacattagttatcccaattgtgtgctaatgtttctaagcatggctaagcaattatgtctaacatctagctgaaccaatatatataaagctcaactagtcaaattataatatcccaaggtatcaaggaatagagtaatcaatgcaaacaggccataacaaaggaatagattcacaccacccagtgacattcgaaaataaatgcacagttgaaataaatagagaatttaaatataggatcaacatgctcaaaggaactgtgtttgggatctgtgtgacttgccttgcaataaagggtcttcaattaatcttcttaacacttccagcgcactcacgaaccttcgaaacgacggaaacgacaagctaacacacaaaacgaggaaaaagactaataaaaaccaaatagacaatacataaaaagtaaacaaacatgtagatcataattttagatgaattatgagacttgaacggcctcattcggacttcatatgaatttattacgaattttacaagattaaatctaattaaagcctatttaaaaaggattaaataaatttaattcaatttatggataattttaatatgtagatctttattttatacaacttttgcaacttgaaccacattaaactgagttacaaagaattagttatgaatttttaaagattaaaccggattaaagcatttttatggattttaattgaattatgacgaaataatgaattatttttaaaaaggaaaagggaattattgcgtcatcggctagggtttgcggaggaccgggtgcatggcgacggttcacgaaaacgaacgaccgagattcatccatccaaaagggatggccaagatccattggtccacgaccggaccacggcggacggcaacgatgacgtcggcgatgacgtcatcaccggcgacggctcggcctcgcgtgctcgccggcgaacgatggcgcggcggcgcaaacggaggacacctacgcgtagcggacggcacggcgaactcaccggtgaccaaaacgacggcggaagatcaacggacgacgacggcgacgaggaagagtggcggcgacgatcgggtcaacggcggcgacgatgctccggcggctgacagtgacggcgaaaaggcggacgaggacggcgacgcgacggcgaccacggcggtgacctccccgagcgacgatgacgactggagcgacgccggcgcacggctggagcggcggcgacaacggcggcgcgaggcggcacggcgctagagctctaccggctacgagagactaaggcgagggtggcggcgggtagaggggagctcgggggtcaatttatagggggtagggagcggcagcgaaggcccacggcgaccggcgacgggaaggaaggtttagggttcggaggagagaaatcgatccgaatcgaactcaaatccggcgatttccaaagcgatttagacgatgtttccaaaagggaaaaggtagagtggatcacggggatcctttcccctcaatcaatttcaccggaaacggaaagggacgaccggatttggaatggcggcggcggcgcagctcggctagggtttcagcgagaggaagacgacgactgacgggtgggacctacctgtcagcggcggtcgcacgcgcgcgcgcgggcggctcggcttgggccgacttgggctgagggagagagagagcggtttgggccggcttttggcccaaaaccaaaagggacttttaaaaacctttttccctttaaattattcatgaaatgcaattccatttattaaaaatacttccttggctcaaataaatcccagaaaaatctaggaactatagaaacaagagaagtatttaacaaaattttatctagcctacttttatattgagatttaacaaattaaaattagatcttctcttctaggcttttaaaatcatttctaataattcccttttagacaacaatttataaattaaggatttttaaacaagaaaagcacttaacataattataattagatcattaatgattaaataattactgaactgttctttgtatcatttaggaattgagctccgaaaaatccgagaaaatttcagagagtataattaatcatggagaatttaataaaaattaaatccatccatgctttaaatttaggaaattttatttcccacatttaacttcacttgtaaattaatgaacatttaatataaattctattaataatttattagataatttataaatcctaaaacaaaaatctggttgtgacaatgtccatcttctagccgagccttgctttctcttcaccggtttgccatagatagccatttcataccccgcatcatcaatgtcttcacttgctcctcatcaaggtataatgtccatcttctagcttcaatcttttaacttgatgccggaacttaacctaatctcaccaactcatggaaatagttagttccaacaatgggttgtcattaatcaccaaaacaatcaccgcactcttaggatcatagatattccaatctccccttacaaggcaattctagtgcatagatctttcaatctccccctttttggtgattgatgacaacactaccacaaaataggaatttaaagagaatactctagtatatgttaccatgagcatgaaacatatactagagggttggtttcatcaacatatgaaacgagtatacactttcccctctatctatctctctttatacttctccccctttggcatcaaacaccaaaagattgaatgtttgggtgggagcataaagaaaaagaaatcatatcaagtatataagaactacacaagtcctatacacttgaaggagaaaaggtttaacatacctttggtgttccaaagaggctacaacaagatgaaactctatcaaaagcgttagtttcaaaatagcaaagtacaaatagcctcgaggtacacacaagaagatatacaagaaaaacatgtgcaccaacaccgaataaagcaattgaactcatcgaaattccaatagaaagagttggagtccaaagaaacaccaatccaaatcaagctctttttggttttgtgcatatgaaccacaccaattgatagaagaataccaatcaaaagagatagacctagataatagtcacaattggtaagaacccatatgcacatatagcaaatacattgattagttaaactcgcttaatttggagcaaggcacaaaagcatgattccaaaaaaaaaatattttatctttaatgcatctcccaaaactcacttaaaggagggcaaaaagtatgttgggcatatgatgctatagacaagtcatgtatgcccgaaagaaatgtctcataagccaaaacccaataagtagtgatgatgaagagacatatcaagacttatgaaacatcacaacataggatgaactccttctaaatacgtgcataccaaagagtgaaaagaaatcttatgcactttcacaaaagaaatgaaggaacacaagaatccatcctatattatgaaatcaaggttgcaaagaaaattcatagaagcaataatgaaatctaccttaggagtcgtccacttccgacatgagactaaaaggataaactcaatttaaaccattagtcttccaaggtatagaataaatttcccctcaaggtgtgcatataaggataaatttaatgcatacatatgcactttactcaaatgagaataggggagtagtttacactatattttgggtcaaggaggcaaatatcaccaaaagaaataaatttaaggactagaattgtaaagcacactttcataaacctcacatctcaagatgatggtacttaaccaatctcatccttcgttatccattcctttggttatcataaatcaatctccccttgatccatcattttctcttttctctatttgaatcaatagaaaagagaaagcaccaaaagcacaagagtttcacaaataatgatcctttagatgtggaggaaaattggatcacttattcgtgaaactcataatataaattaaattctcccaaaagtaatgcacacatactgtggaaggcaaatttatgtgcactatttgacatttaaatcaagcaagggaatttaatctatattatgaaaggtagctaggtaaaatataagatgaaaaggtaattgaattaccacttgtaaatagcatacatttgagaatgtttcacttcccatgagactaaacataaaatacacttaacaagaagttagtctcaaaaatacaaaacataggacatgctccccctaaatatgtgcatgcaagcatttgaattacttgatagaagcatgcacttgtctaatgaaaagaaatgaggagtacaccctataatttgaacaatttgcacataaatgatttgcaagaatatacatgtgccaaacattgggtagtaaaaatgcatgtaaattgccacaagataatagatgaatgcatggcaatctaccataagaaagaatattcatgacacttgaagcttgtatatgtagagatgatgtaaaagatttaccattggagcatacaagtccttagtagaccgggacttccggttgacacatgaaggtaatccaatccatgggctgaaaaatctacaacaaacctttgagatagatcacacgataatgcacaaatttcattgtgggagcattgcacctttctcaaccaacatgcatgtacaaggatcacaataattaagaaagctgaaaatttgaagatgttcaaatcttggaaactcaaaaaataacttagaaggagcattgaaatgacattcaaatgacctttgataatttagacaaaatttggcaatgaagtccaactatagagaatcgaaagtcacaatgtaagctctttccaaatcacaacaacacaacccattttgagatataaagatcacgaattagctcaaagtcagttttttctgaaaatttctacaagttgagaaaagagagaaaaagtccgaaataattcaagcttgcaaaaaatatctttgaacttgagagaaacttctccaaaattaatttcactaaatgaattttctatcaagtgtatgacttttaaaacaatgaatttcaaccaaaggatttttttaagaagtttgacatttggaaagacttagatgggttagaaataccaaattaggccaatgttcacaaagaacattagtcaaattgcttaaacccaccatatgcatgtttggaccaaatatgattaaagcaacatgttggagaaatgacattttgttccaaaaacaaaaatttcactccaaaagctttttagaacacttgagataaaacttgaaacgctttgaaacatttttcacaaactttggaccgtcaaataagagttttgaatttttaccagagggactcttttagaaaacatttcatgtaagcttttgaacttttgaattttggaagcttgagctaaaagtatttgggtcaaaacaaacttttcggttaagccaagattttaaaactatgttttgaggcaagttggaccggaagttccggaaaaattggtaggaagttcctatcaatttttccggaacttcctatcggccctctttgtctcaacagagactgctgaccggaacttccaagcattttggccggaacttcctagccgacaaaatcagtacccgagagtacccgagaacttttaagattttgctccaaatcacccgaacaaactcggaatttcacgaaatttgaaccacaagctcacaacaacatgggaaatcagatgaaacaagaaattaccaaaatatttaatatttcatcaccaaatttaaagaacttggaaaaccaaaggtaaaaaccaagtttttgggaaaccatcaaaaaccatggtgctcgtgcgaaggg

SEQ ID NO: 12336 - DNA, 3354 bp, Oryza sativa
  unsure (1)..(3354): unsure at all n locations
ttaattcattgctcaaaaaacgataaaatgttgaagttccaacaaaatgacccaaaaggcaattttgagcgaatgagttgttttggagacgttttggtttttatgagtttgaaatacctccatgaaccaatatacatcacaatatatggttctagtggctaaactcactcgatgccataataggaccaaatatggtcaatataagttttcatgtgaattttgagatcaaataatttcaaatcgtttatcatataaaatatatttaaataccaaaaacatttgaaatgaccaactctagtggcttgacaaaaggattatttgcaaaaaccttttaggacatattttgacataaacacattttaaaagcaaaaacaagatcctagcatctacatttagaggctaaaaacattttctttccaaaacttatttttgttttgaatcaacttttgaaatacttctcaaattggtgtaggaacctttttgaacaaacaaaaccaagttttcacaactaattttatagagtttgactttttaactaaaatagaattttgaagactattatagcatcaatttaatcaaaacacatttgagggatgcaaatgatttgagaagttataacactctccctaaatgtgataaccaaaacattactcgaaattaaatttgaaaaatgaatcaagcaacattaaaggatagacattatacacaagcgaaaacctacacaaggttaggacatagatatttcaatgtaaatacttgttaccgagatggcattggttcttaatgtagagcaattattcacatccttgattccatatttggctcatggtacaaacttagttcttcaaggatgaattgagcctccaatgcacctccaagtacctaattgacaatctaagcatattttggtacccaaatcacgttgggtccatggatgttagtcacaagagatttaggcacccaaatggcctttgtgctagcatgtagtgaactaatcaccctagtagcacaagtgccatttatggccttcctaagcaaattgtgatgaaatgagaggtttggcttaggaatgttaccaatgggacaatttttaccaatatgtcccttagcctggcaattgtagcaaagttgagttttgcttttatcttgctttttgacttgtttgttgccggtttgcctcttgcttgatcggttgcaatgatcatccttcttgtgaggacaaaatccaatttcatgccccttctcatttcaaccatagcacttccttttgttgattctagatgtctttgttggaagtgtgatttcatcatcaatcttgcgaggacaacttgaggcaaagtgtccctctttggtggacttgaagaacttgtgagcaagatcctcattcttgttcaacttcttctctttcttccaaggacaatctctcacatgatgtcccattttcttgcacttgaagcaagtaatggaagttttgttcttcctttgatcttgccccttgatcttgttgttggacttgatatcttcttgatagaacttgttgcaagctacggttgttcccttctcaagcttcttcaccatgctctcacggttatcttgagaaggttgagcattgccaacaagtccatgatcgatgcgcttatcctttttctctacataatccaggtcacatatagtgctcggaaaaatatttgcttgagagcaataagagttagcacaagtaaagtcaacttgaatatgaggcacataggattttaccgttgttatgatcacctcatgagttacttctagcatggcatgtgaatctacaatatttccatgagagcacaaaagttcatcatacttttcttgtaggtccacatgcttgctagtgagctctacaagttgagctttaagctctagattttctttctccaaagatgatttctccatgatgcaagaatattcatcggagcgtggagatgagcatcttggagatgtaaattcttcacttggccatttttttccacatacttcttccttcaaaagattagtttcacaagcactgtaggaggtagaagtatccacattgacgctactcaccatttcattaccttcaatgaagacatgtgtctatgaggaggtgaatgtggtgaggcaatcttgaccattggatagaatcacttgaggctctttacaaattgtcgatgaatttgagtactccacaagtggttcttctatagcgagctttacctcatcacactcggacttgtcatatctctccttgagtgtgttccaaatgagatgagcatcctcaagtggcatgatggattcaaacacatcttcactcaaagcactaaacaaaacattagtagcttgagcattgagatgtatgcatttctcttcctcttcaaatgatagcatttgatcactaggaggagaaatgctcacaactataacttgctctatttgaggacccatggccctaaacacataaagaatgcgagtactccaagacatgtaatttgaaccatttagcatgagaagttcaaggaaattttcacctcttgttgacattgtagcatcttgagtatcaaccatattaccccttcacacttttctcgccatcccccgacatcttctctccaagcggttaagccaatccagagattaggctttgataccaattgaaagggccttgatgtcgcctagaggggggggtgaataggcgttcctaaaatttacttcaaatcgcagcggttaaaatcagagcccggaactttctggcaaaaggtccggaacttccttgcagctttttctcacaagcagagaaagctgcccggaacttccggagttcttcctaggaacttcctagcagttgtgaattgctatttcaagcacctcacaacaagtaaattaaatcacaaggaagcctaaaccatagagaggtacaacatgtctcaaacaagagtaatacacatgaaaatacacaagatatcacaagtgatcgtacaatgggagacatgatagcacaactaggcaaataaggagataagcatcccaatcacaaagataaagagagtgggaggagacaaaagatttgttttccgaagttcggattctccactgagaatcctacgtctccgttgaggagctccaaagaaccgagtcttgattaactccttgcctcaccaagcaaaggcctaggaagaggtctccggtattcaagccaacacccctaggtacttctctttggtttcaagtgaccactaagatccctaacttgaacaccaagagaacaccacaagtgaggattgctctaccaagacgacctcctaaacctgatgngctncttacagagaagtccatcaatcgccg

SEQ ID NO: 12337 - DNA, 2618 bp, Oryza sativa
ccgattgatgaaatagatgcagcttccattcaccccaccatctgtcaaagtttttgcttctaaatcctgccaactcaatattatcaatgctacccagagggggtcctggtaggttaagtagtcgatccatcattagagtggatgtgatttgtcctcggcactgaatcttgtcggcaaagaataagccgattgggagttggcccaatccaagttgtctggccgagctcattgggtgataaaactcgtaggagacttggatgtttctcccttgatgaatgccgacaggaaggatgcatgggctgattgcagctataagaacttctctggatttttggaatttttcatgattaatgtcttcaaatctaaagtctgatggaagttcaaggtctgctgagtcttcataaggaaaccagattcgtgcatctttcttaaaaccttcgtagaatctgcagaaccagtccttgagcagctcagccgatagcttcgctccagcatcggttggtgtggatgcatattctccatatgacatgcatctgcgatgggtgcgctcttctccgtcatcttccacaattggctctggcaatgggaattcagcttctattacagagggccgattgacaaccttcatgactatcaggtttaaccaagtttgcaacagccaccatggttcacctgctccaactattgagccgacggctattttagccgatgcattgttcaacatttggtacagatagccgagaaggatttggcccaaaggaaattctttctttgattctaaggcttcggctacaaactgccagttggttgtagggccacaactggatccacagaagaggaacttttccaaccacatgagcaagaaagctacatgctctcgaggagtaacagatccttggcccatatatgccgccacatagccagaccagccacctatacttttggtcttgaagtcaaattggttcttggtgttcatactcatagggttagccgatgaagttacatctaatctagtaatcatggtaatgccgattaaagttggagtcatcagcccttggttgaataagaaagcattgatggtgttggaccagaagtagatggcggcagtcatcagaggttcatccttagcagaattggctatggtgagagcaagcgcttggccgattccaatcttatcccagtgaactttcttactagccgatacgcattggtaccaggtgatccagctcttatcaggagtaggtttttcaagagatggccaagacttgaaggtattcttccagtgacccaggttagggttggctagtctaaaggggatccggttggtttcaccgatgatgaaatcagtggggtcgagattgccgattgggccaagaaaatagtggtttttgtgcgaaaggctgggaatcgcgactaggttggagagatgctacaaatccaaaacaaccgaggaaaagagagcgatataagataagagaaaatcgatctgctgctaagaaaggggatctagccgacgaagacttacctcagcgtactcagctgatggcgcatcagatgggttggtggaggacgacatcgctgcgggcggaaatctcgccgaagatgaagtcgcctggaattcgcttttgcatcggaggagtcgccggagagagagaggacaaagtttcgcttgagcggtgaaaacggaagtcacggtgtgagatttctcgagggtgatggttaatatttaaagcacggcagtaacggtcggaaaacagcaaagtgcgaaacttgcttggagtcgatttacagcaaatccgaaacattaccaaatattccggacttgggggccatgtgttaacaaccaaatttggtaacatcggcgtcaagaaagaagattagatcgaagcgaagtcggaggcggagatcgagttcgaaaacagagcaggaatcggctggagtccagatcggctacgattaggatcggctgggtctgagtcggactaggtaagccgatgtagccgattccgacaatgcaacttgatgtatgatatcgggttgaattgaggcatttcaaggtgattgccgcacatggatagagtcctgagaaggcaattgtatctattaattaggatgttttatgtaatctccttagagatacgcttgggcaaaagtctgccgcaaagacttatggtatcttagagtttgttagagatagtagtcgtgtccgttatggacatatcttgtaattctcgggtataaatagacccgagccctatgtaacttttaacacacacgttcaatacaatttcggtgcatcgccacccttttgctttagttttgtttcgacgagttcttgctttcgggttgagctgcatcggtttcgatcttcagcaagaggtaaaacttattatgacggcttgtattctcgggattagtgcttctatctttatgacactctaatcttgtttatgtaattcgtcgagttatcatatatcttacataatctctggcaatatcgctatctaatctacaatcggctaacatctatcgaagagggcagccgattaggttagattttgacgttgattcagattatataagatatctaccactctatgaaacttccagtggcttga

SEQ ID NO: 12338 - DNA, 603 bp, Oryza sativa
tcatgttgcctttaaattttgtatatagatccttcaagtcctttttttcagaatctgaccctctgtacttagcttcaaattcttcaatatcagcctcagtaacctgcagaagtgtaggtcatcaccgatcattgtataggtgaacagatagcacaagtttttttgttgatatggaccaaaaagatacctttttgtaaacagctctgaagtactcttgaagattgctgcagcttctccaaccagtgcctacaggaaaagacaaaacttcagaaaatctactgggagtgaaaggttggaaatcacactacttggaatcaggtgctcacatcatcatcagcaattccagtctcatcatataatgcccttttctcctcatcccaagaatagatatcaccttctgaagctgctgaaatttctccttggcttcctgacatcacataacagctcaattgagacaaatggcacttaatccatggaaaaaatttggaaacaagatcctacctcatctccaggattcttgtctggatgaagacgtaaggccaacttgtgataagccttctttatttcctgctgtgaagctgtcctctcaacccctaagatctt

SEQ ID NO: 12339 - DNA, 3297 bp, Oryza sativa
aaggtttgtcagttcttacatagtcctacaatgcaacattggatggcagtaaagagaattttgagatatgtaaagtcttctgtagatttgggtctgaagcttaatagttcatcttctactattataagcgctttttcagatgctgattgggctggatcagttgatgacagaagatcaactggtggtttcgctatctttcttgggtccaatttggtttcttggagtgcacgaagcagagtacgaagcagagtataagctacagtatcctgttctatacagaagcagagtacaaagcagtagctaatgctacagctgaggttatatggattcaaactttattgaaggaaatagatgttcaaacaccgcaagaagcatgtttgtggtgtgataatttggaagccatgtatctttcagttaatccggtttttcatgcaaggacaaagcacattgaagttgattatcattttgttagagaaagagtggctcaaaagcaattggttattaagtttattgcttctggagatcagattgcagatggatttactaagtctctttcagctcaacaattcaagaattttgtatacaatcttaacttagataagttatgattgaggggggctgttagagataaagtatggtttagatttgcataggcttagagataagtctagagtttgtttctcacatgaaacaatgttttatctcttgtaatcggatccaaactgattcaatcttgtaagccacgttgagggttcttctcaacaacatataaatattcatacgcggcctcgagacgaggtgagaacgcttacgcacttttacagtgttcgtgcgtgccggtcgacctcgcactgttggatatggagctcgaggagaagatggctgctagggcattgggcaagggcatcagcagcagcaacaatggctgcgaaggcggcggcgacgagcccaaggcggcgtgggagatcgacctctcgaggctgcgtatccgccagggcgctcccgtcaagcacggcttccgcggctcgctgttccgcgcggactacgatggccgcgacgtcgccgtgaagctcctcgactgggggaaggaggggttctcgacgcccgagcagatcgcccacctgcgcgcgtcgctcaggggcgtggccgaagcctggcacaagatcgaccaccccaacatcaccaagttcgtcggcgcatccatggccaccgccgacctcaacatcccacaaggccagagcaccgcgccgccgctgccgccgccgccaccggacacaccatgctgcgtcgtggtcgagtacctcaccggagggactctgaagagctatctcatcaagcacatggagcgcaagctcgcctacaaggacgcgtccgcttcgcgctgtcaatggcgagagggctgagctacctgcactcgaggaagatcgtgcaccgcgacgtcaagaccgacaacatgctcctcgacggcgagctcaacctcaagatagccgacttcggggtggcgcgcatcgaggcgtcggacccgagggagatgaccggggtgatgtggacgctgggctacatggccccgaggtgctcgtcggggagccgtacaaccgcaagtgcgacgtgtacagcttcgggatctgcctgtgggagatctactgctgcgagatgccgttcatggacctcagcctggccgacgtctcgtcggcggtcgtccacaaggacctgcggccggagatcccgcggtgctgcccgcgcgacatggcgctcatcatgcggcgttgctggcacgccaacccggcggcgcggccggagatggaggaggtggtggggatgctggaggcgctggacatgaagaaaggccgtggcatggtgccattaggggagaccgccggttgcttctgcatctccctcaggcgccgtggatcatatatcactggtggagaaaccctttgtagtcccggttcgtaacccccctttagtcccggtttccaaaccgggagtaccaatcagggactaaagatcgagctgaccttttttttttttgcatggccctgttgctgcatggtttatatatatatatatatatataaaccatgcatatatatgtttcaatacatatatatgcatacatatatatatgtatatatatattatattatattatatgtatatacatgcataatatatatgtatttatacatatatatgttatgcaaatgcatatgtatatagatatatatatgaccaaaatatatttacattatagaaaatgtgtacacatgcatatagaaacatatgtagtcatgtattaattacaatccattatatgtcctagctagctacgatttcgacgtagtagtactcgctgctagctcagaagctaaggaccggtgaattgtgtttccgtcgtagtagaattcacccttgggatcaaggatttcttcgttgatgaatcccatgagttgttcttgaaccgccccgataaattccttgtgtgtggtcaggttatccctcatgcgaataaactatatgaatgtatgaaattgattagtaattaaacaagaaatcgctacgtaatgaaattttgaatttatttgtacgtacatcgagctctcttgtggtgatgatttggtctgcaaggcagtggcaatactcgcacacgtaatagccgcacaagttagttccctgcttttgctttgcgcactacaaataaatgacaaacaacgagagatctaattaatatacacttgtatgtatttgaatcggagaaatataaatgtagagcatgtgtattcacaggaaatttgaacttccgcctaagtctttctctccatttgccgcggaccaaatgacggaaccgataccaagccctacatagagtttaaagctatgattcgtagtagcaattaacataacaagattttcttaattaacaaaggaacttatgacggtacctgtctataagttcgaaaaccttgtcaaacgtagactcttttttatccattgagtcatatacgttgacggtgcaggcctccaggtcgaagagtaaaagcacccagtggaatctgcaatgtgcgtgggatgcattacatatgaaacacttagcaagttcgtacgggaatgaaatttggtatgtaggaagacagtaaaattaaactaactctgtgttgtatggcaacaatatgaacgtcttgtaatgctgcgccttcaggagatggacgagattgtcctctgtttcttgtggatattggtcgagcattgcgacgtttactttccgagggtcgatgaatccagtatcgaaaaccctcc

SEQ ID NO: 12340 - DNA, 9842 bp, Oryza sativa
cggctcgatctcctggtttggttgctctccaagctgagggactggtttggactttccagaagatgctttcttcagcgttcgctcatagtccgatagcttgatggcctccttgacagatgcagacatacccctgaagaagttcgtgacactagggtctatacgaatcttcttttctggacttcgaggcttgaattgtctcttgacttctgatgcaacgtaagcgtcaagctcctcttgcgtgcaatcgtaccccgggtccttgttcttggcggcgtcaactttcgccttcttcgttgcccttgtgtgggcaggcggtggagctgggggggcccttgactttgaaggtgccggaagaggagcttgcgggggagtaggtgtaggagcacgaggaggagtcggtgcaggatcctgaggaggagttgatgctggagcctgaggtggagacggtgctggcggagcatgaggaggaaacggtgcaggatcctgaggaggagatggcggagccggaggagatggtgcacgagacgccgcttgtcgcccagggaggatgatgtaccgcctgcgccatagaataatggcatggcttgtgtctcgtagatgcgtctcaccgtctcctccagggtaatccagctcgaggtcctcgtatgcgccttcgaccaactcaacttcgaccttcgagtatcctgctggaatcggcctgcagtggtaagtacctgaagggtccgttgggatggccatgcccgacaccaccttcatgttgtgagagattatttattagtaatcaacatatataagcagcaactagcggaatggctaaatcttacctttattgataagttcttgaaaggaatatgcagctcacatggtatccgctaagtgatgtcatcaacgggacaggtcgattcgtcctgtgtttgcatggcgtccatgctctgtgatcctacctgccccgttgaggcgcagctgctacggtttcctgacgggctcaccattgcaggaggaatggtcggctggggatcatgggaccgatgtgcggccatgcgttcatcaaccttccttgcccctcctcttgcatgttgagttcgtagctcgatacccggaactctaggtctgcaatcttcgcctcggtatctctcttgctcctcatccgactcctgtacgtgtggatgtcctccttgaaaccaatcttccaaggaatcacccctttccctcgtgttcgtcctggatgctctggagtctgcagggcgagtgtcagctcgtccctatctctgtctggtcggaacgtgccctgagaggaggcttccactgcatctgttagtcgtcgcgcagcctctcgtatctgatcgccgaagaccagtgagccatcagctgggttgagcgttccaccgtgagcatagtaccagaacttcgatcgttccggccaattggctgttgccggttcgatacccctctcaatcaagctagcctccatctgctcccacttcggcatcgcgacgctatagcctcctgaccccaagtggtgatggtacttcttcttggcggcattttctttgtttcttttcatcatcgcctgcccttgttcacctgtcttatatgcaacgaactcgtcccagtgatcccttagctttgggaatgtgtcgaagttcggtgtctgccccttcagtatatacttctggtacagatctcccttgaagctctaaaactgttctgccattttcttcagagtccaccttttcactttgtcctctgtacccgcaggaagggtgaatgtctcgagcattgtggtccacagcatctctttctccgaatctgggacaaagctctcatgatctccgcgtgcccttgttcttcgccagtacaccctactgacaggcacgttatcccgcacaacccaaccgctgtgacgtacatagttcttggcggcttcggccggggcactaggacgtccatcttcttgcacttccgttatgatgtgccgaccctcaagcttcttcgctgcacctcgttgcccgcgtgccctcttctgtccaacggagggttgactaccactagcctcctcctcctggttcccctccacatccctttccacgtgcccctgctggttcccctccgcatctgtcacgaccggaaatcacccaacgggcgttccttacgtgcgtgcattaatccttgtcccaggaggcaaggtacaccaaaagttgatacaattcagagtttaacaagcggaagcgtaaatagttaatttattacatgggcagcgaaggccgagcacacacagagacaaacgagaaacagcggaagactagggcgacgaccacaggcacttgacggcaggcacgagctagacaccaaagccttcatcctccaggaactcctcttctgggtttgggaaaaattgagcaagactgagtacaaccaccgtactcaacaagacacacccacaagtgcaggataaatgcaagggagtacaaaggagttacactataaagggttagggttgcagtaaacagcatttaaagacattagttgctcaaagctattttgtaaacgcgattctagaactaaacaatattatttatcaaggccggtgaacccacacgaacctgccttaacccaaggcgtacgatgattcagaccgaactggcaacccgaccgtgggtcccagctcgtcccaagccaactcaggccaaccattccacattttagttgttaagcaggttttaagaattaaaacactacttgggtacattgctcggcttgcccataaccgagggcgcggctattcgaatagattatactctgatcagaggtgtacatctttacccacaagacacatcttcctcacgtgtaaccacgtgccacataccaccacggtatacagacggaagacgtgacatagtttccaacccatcctagccatagacaagagtaccaacccaatcccacctacggccggaacacccgggacaggcaggcaggactgagcccctagcagcaggacaccggccctgtgccatgacatctcgactaccgggccgcagctcgtgtagccttcatttgccctggagaatgtccatcgacccccgacttcatccacctccatccgtgtacttttgtttataaccagactgagccacaaactaagccttacccactagacatgtggaagtacggtagtgctttgcaacagaggcccgaagaccggtccttatatggccgaggtgctactatcaaaaccatgcaccccgagcccagcctaaaaccatttttggggattttgaatagagggggcggtgtgaatccaattccacaataaccaaaccattccatggtgtccaggtgatatgaatattcccaaagtctagagttgtaaaaccgcctaatgttacctaattaaaagcgaagcatctacctaaaatcatactagtgggaccatgagtagagtgtccactagttggggttttgtttatgctagggtgaacaaggaaataataacaataacaataataaggtcataacaaaggtaaatgggcatggctaaataaaacagtgataacgcgggaatttaaataaagcgataatgcaataatttgaatcaacataattttataaactgggattcaatatgttcaaagatgatgtgacttgccttgctcgctttcccaaacgccggcttcaacttccacgaagagcggatcttccgaagctgcagcgtctacacgaccaacggaaaagaaaaggcttttactctaataaactccatataacaagcagaaacaaagcacaaaaatgggttcttgacttcttaaggaaaaattagagacttgaacggtccaattccgagttcaaatggccaagttatggccatttgaagtttatatgctctttaaatggatatttgcgaatttcttcatttaaattttaatttaaaatcggatttattgtgtcagccgggagagaggagcgcgcggaccgggtccacgggagtggggcccactcggcagcctctcggtccacggtggaccgggtgcacgcggcttacgccggccggcgccgtgggtcccacgcgtcaaccgtaccgagggcgcggccggctgacggccgggccccacatggcagccgcggggcgcgcccgaaggcggcctcgccggcacggccgacggggaggcggcgcgcccgcgccccgatggtcgccggcggcgaccaccagcgcggcggagcggcgcccgagagaggggagggaagggggaagtgaaacggcggtccacggctcaccccgggtcgacggcgacgacggaaacggcgaccggagtggaggaaggcggcggcgcggctcgggtagacgaggacggcggcgttccggcggtcggtgagcgaaacggaggggtggacgaggtcggcgaggtcgcggcgaacccgaagaaggcgatgccgaagcgggagaaggtccggggcgacgacggcggcgaaccggagctcggcggcgacggcggagagggaggacgacggcgcgagctcgattccgacggggagagagagcggcgagtggcggaaaaggaggagggaggcacggggagtgtttaaatagcgttgggagggggagagagcggccggatgagggggaatcggccgcggaagatccggccgccattgatgcgccggcgaagtttgcgggagtgtttccaaacgaatccgagggagagtgtcacgcccgaaaattcacaagtaatttccgaacttatttgtgcataaaatcctcgtccaggaatcagccgaggtacacaaactgacaatttaatatacagattcatcaaattaactaaaacgataaatacttacttatgaggcacttagtcctcatcaagaagaaaactgcagcggaaaataaaatctagcgaagctccagctccactcccacaggcagctcaactggggtataagccaaacgtcttctccttctggatcatttttcttcaactgaggttgattgattattgcaaggtgagcatatgacatactcagcaagccacacagcaaatatgcaagtgcacaaggataccaaaggatggcataatataggctcatttgcaaaagcagcatttagcaaaacatttaagagaagtaaaacagtggagtaattaatcaggaattttaatcaacactgaacagcacacccatgctgcacaggcccgaccatcctgaacaaccatacccggctgtacagatctaatctccaaaccaggaattatccattccaaaccaggagctaagcaaattattaccagttataacatccataattattgtgagaggtgtgggactaatcacgaaaaacattgctcaactcgcccataaccgcgggcacggctattcgaatagttttactctggccagaggtgtaccactgtacccacaagacacagcctcaacatcatgtctaccatgcgtcgcgatactggaaagtacccgaatagaggctgtgacaataccctctgcataatacaactcaccacagtgcaccattcctggatcataatcacccccttataaaacaaggcatggactccccagcgacccccgtgggcttatctccgccacttctcagtctggtgccccgcaatgaaccatgctatacaaaagataaagccgttgcccacgctggcttgtggttggcacggttaatgtttcacaacagtagctcgcgaaccggtccttaattgtcatgagcacgactctcaaaaccatgtgctcacaacccaccattatcaagttttagttggcaagtaattaattaaccaatcacgattgaccatcgtgagctaccattaaatataaccttaagtgatagtgaaacattagttatcccaattgtgtgctaatgtttctaagcatagctaagcaataatatctaatatctagttgaaccaatatatataaagctcaactagtcaaattataatatcccaaggtatcaaggaatagagtaatcaatgcaaacaggccataacaaaggaataggttcacaccacccggtgacattcgaaaataaatgcacagttgaaataaatagagaatttaaatataggatcaacatgctcaaaggattgtgtttaggatctgtgtgacttgccttgcaataatcggtcttcaattaatcttctgaatacttccggcgcactcgcgaaccttcgcaacgacggaaacgacaagctaacacgcaaaacgaggaaaaagactaataaaaaccaaataaacaatacataaaaagtaaacaaacatgtagatcataattttagatgaattatgagacttgaacggcctcattctgatttcatatgaatttattatgaattttacaagatttaattccaattaaacctattaaacgaagactattcccaattaattaaatcatttacaaatgatttataacggagagaaaagattaaagcaacctccggaaaagattagattatattggtagatgacatatgataaaaagaaaaaggactaatatgccattgaaaagatagaacgaatttatattgattttggacggctgagattaaccttgaccgagtcgactaagatcggatggcttggattgatctggcaagcaagcctcacgagataccgactcaacgagtcaactccacgtgacatgagatcacctaaatgatcaaccgaaaccggcgaacagaaccggcggctctgtacggctctaaactaaaggacgactcaacacggacgaatgaacgaagcacggggaacacctcgttcgaacgaacgagcgaacgactcaacaacggttgtggttaaaccggtcggctagacacgattcacggtaaagccctggtacgacaaacgataggccggtaggaacctagggatgcacctacggctagacaacttggctaccgagcaacggctaaagcggcggctaggtttaaacggcacacagctgcgacacggcggcactaagacaacttgactcggctaggtggcggctaggcggaaacacgcagctagggttagggtgacggcacagccagtagcgaccatgcacggctagagcagcagggctgcgagcaaaaacgcaaccggcacggctgcggctgtggcaaagcggcaagcagctgcagctaagcggctcagccggcacacgcgcagcagcggcacggcaagcagctacgacacaacgacgacgacacacacggagacgatgatgacgctagggccaaacaagattagattagatcggattaaggccctagggaaaacctcacaggtgaacggcaaaggagcggcggttgccggcgaaccacggcacaaacgcaaacggagggcaccgggagcgagaggggatcaaagtgacccttaccaccacttatgcgacgacagacggcgagggagatggcaggcgacgagctccaaaggcggcgaccttgggttgacgatggcgacggctttccggcgacgagaggcaacaaccgaggggcggacggtcttcacctcgctcctgcgatcccgagggtggtgacggtgaatgaaggcggcgatggacggcgacgaacggcgcggctgaagatggaacggatcggcttcacggtgacgacgggcttcccggggtcttcgacgacggggaagtggaggccggtcttcttctcctcctcgcgaacccaacggcggcagcggcgaccgaaggcgacgaccacagcgacggcgcggggctgctggagcggcggccggaggtggagagaaagggagagcgtggggagagggtttcgggcggcggcagaagaaggaggaggtggcggccgaaagaggagaggctgggggctctatatatagccatgggaggccgggatcgagcccacatcgacgggaaaaactcggaaagtttatcttcgccggaaaaaggaaaggatttgatccgcgaaattggaaaggatttccatagaaacttttggggatttcttggggaaaaggaagaggagattgagaggattccattcccgcaaccaatttggaaagaggagcaacggggaggtcggattttggaagggaatcggcggcactgtgcacgagcacggctggctcggctctgactggaggaggaagatggagtactgtagcaccagggaggttaaacagactttggctgggctgacaggaagggagagaggagaggagggaatgggctggattcggcccaagactaggaaggaggatttttattacttttccaaataaattaaccaatgagatgatctttcaattgttaaaaatacttcaatgctcaaataattccaagaaaaatcttgaacatacttggacactcaaagtatttaatataataatatccagatcatttaatgattaatttattttttaaataattgctaaactgttctttgtatcatttaggaattgagctctgaaaaatccgagaaaatttcagagagttgacttaatcatggagaatttaataaaaaattaaatccatccatgctttatatttaggacattttatttcccacatttaacttcacttgtagattaaagatcatgtaatatccattctattaatgattgactaaatagatttatacatcctgaagcgaaaatcaggatgtgacagagagagagagaaaagtggggggaaagggagagggaatcacggggagtgatttccccctctttattgcgtgcgggggcggcgggatgcggcggaatccgcggcggcggcggcgctagggcacgggcgaggcggcgggtgcggcgcgaggtaggggatgacgggtgggccccacccgtcagcgagggtggcgggcgggcccgcccgtcagcggcgcgcgcgcggggaggaggccgatgggccgcgggggagaggagagagagggagggaggtgggccgagccggcccaagagggaaagggggggaaaggacttttttgaaacctttttaactttgtttatttcttcttaattattatttgtgctctgaaaattccactaaaatttatttacgcattttaggcttttaggaaatatacaaaaatcctccaagccttatttgacttttaaatttgcacattttaattgttggaggctttcacatggattttaattattctatgcataattttgaggatgtattttagagtcgttttgggacgcgacagcatccctctccacgttcccttcctcgttcaagtactggtttggatcctcgttcccctcttcttcattccagtactggctgcttccctccgcgattgtatcgtacaatatctgttcctcatcgcggtcagccatctgttgatacaagaaacatctgctaagtcacgagacatttatgttttaacaatctaagtcatgtatgctaagtgtaaatgtcgtacattagaaccctacacaaccttacgtgctaagtctaattacaaatcgtgatataagctaagtctaggtgacgtatattatacaaccctagctagtaaataattatatactaagtctaattacaaataaaataatcttatattaaaactcaaataatattacatgctaagactacaatagtcatgtatatgctaagtgtttcgtgcgtatatgctaagtctaattaagactacaatagtcaattgctacttgtcgcaccaattccgtagtcaataattacatactaagtctaattacaaataaagtaatcttatattaaaactcaaataatattacatgctaagactaaaatagtcatgtatatgctaagtctaattaagactacaatagtcaattgctacttgtcgcaccaattccgtagtcaataattacatactaag

SEQ ID NO: 12341 - DNA, 1651 bp, Oryza sativa
tttcctttgctagacatgtccttcacgaaaaagacttgcgttacatcattggcaaggacaaaaggttcgtccgagtatccaaccttgttaaggtcaacagttgtcatcccactatcatcaatcattacgcctccaccagtcaacctaacccattggcaccggaacagaggaaccttgagaggaccatagtcaagttcccatatgtcctcgatggcatcgtaatacgtggcagttgttccatcgtgtcccatggcatcgacacgaatagcgctgttttggttcgtgctcttcatgtcttgggctctcgtgtagaatgtgtacccattgatctcatatccctggaatgtcgtgatcgacccagacggtcccctcgccaggaaggcaagttgttggttgatcgactcgttacccatgagatgttgtcgtagccacgcggggaaagtatcaatgtgatgccgtgtaatccatgcatcggacttaccgatgttcctggcgcgaactagagccaagtgctcctcgatgtaaggagctaccaatgaagagtgttgcagaacagtgaaatgggctttacggaataaattgttgtctaccgtcattattgctttccttccgagagttccctttccccgtagtctcccttcatggcgtgattcaggtaccccgattgggcgaaggtctttgataaattctacgcaaaattcgatgactcctctgttccataacccttggcgatgcttgcctctggacgagcacggttacgaacatacttcttcagaacgcccatgtacctcttgaaaggaaacatgttgtgtaggtacataggcccgagaatacggatctctttcacaaggtgacaaagcagatgcgtcattatattgaaaaatgaaggtggaaatatcaactcaaaactgacgagacattgcaccacttcattctgaagggcttctaatatatccggatcgatgaccttctgcgaaattgcgttcatgaatgcacatagctttgttattgttgtccggacattgtctggaatgataccccttattacaactggtagcagttgtgtcatcaacacgtgacagtcatgagactttaggtttgtgaacttcttctccttcgtgcttattattcgcttgatattcgtggagtatccagacggtacctttatgctctccaagcattcaaacatactttccttctctgccttgctaagagtgtagctggctggactcaagtaatggcttcctttctcctttggttccgggtgaaggtcgccgcgttgttccatatgcttcagatcattacgtgcttccagtgtatctttcgactttccgtatacacctaggaagccaagaaggtttacgcaaaggttcttagtgaggtgcatcacgtcgattgcgtggcgtacgtccaagaattcccaatatggtaactcccaaaatatagagttctttttccacatcgccgcgtgaccatcttcgctctctatatgctggcttccaggtccctttccgaacactactttaagatctttaaccatagcaaacactgttttcccgctgcgatgtttaggcttcgtacgatggtcgaccttatgttcgaagtgcttgcctttcttccgtaccgggtagtttgctgcaaggaatcgacg

SEQ ID NO: 12342 - DNA, 5140 bp, Oryza sativa
atccatcaactttcagccacgaaaaatatgaaaagattgatatcttttaagaatccagcgggtagtctacggttctagaatctagagcagggcagaacgagtgagcgacccagctggctcgtcgttgtctcggacctgctaggccgcgttgcgaagcagaggtccagaggcgcaagccggggtgaaaatggaaaggaaaaagttcacttaaggtcccttaacttatcaacgaatccgatttcatccttgaaccctcaactatcaaaattaatgcaatatagatcccatgatggtttggactcaaaaccaatacaatatagatcccatgacggtttggacggcggttttagttgatgtggtggctagtttgactcggtctttatctcacgtggcattgacgtggcgattatgttgcaatttgatctggaaaaatgaataaaaatcgtgggcctacatgtcagttaaaataaaaataattaaaaatattagggcccacatgtcattctcagtccctcctcttctgcttcctctctctcgggcgatcttcttcccccggctacaagtccggctattagtcgctgcacccaaaactgatcagagttgaatgtgatcaacagtacatatgaaatctcaagcaaaaattgaagcatcccatcaagctcatcgattcagcgcctgcacgacttccgtgctagtatccggagaaggggcgacggtgacacgctggaggacgcggcggtgctcggacatagatcttgctgtatggaggtttattaggtgagctcagattgtacaggtcgtaataccagagcttgcatccatattcacttgagtatgcaatgcagtagcatttgttcaggcaagcttctctgcaatcttcatcggtgtcacctggttcgtcctgagcgttgtaagggagcccttcgagattgtcaagaatagcgaaggagtcgccgtgctcgttctggccgttggcgtcgcaggctcgcagctcagtgggagagacctcgagcagccggtgacaaagtagccgagccgccccactccttcgtacgtgtccgacagcttgaaccctttgacgcaccggcattcgccaccggtcgacgtgcaggtactagaaaaatcatttttcccaatgtaggtgtcttattttcgcaggcggacataagcttgggagtcaaatgaccgcctacaaaaatataaatcgaggtgaagttcgttgtccgcctgcgaaaagatttccgcaggcggactacttaagcggcgcctgtgaaaatcattttcgcaggcggaccacctaagccacgcctgcgaggcgcatcttatgtggtccacctgcaaaaatcgtatctaccaaaaaaaaaacttcaatccttatccagtactccaacccctccctaccactcatttctatcttctcaactctctctctccctccaccaccggcttcttagctcccccatcccctcctctaccatcccctcccctcccctgcgaggcgcatcttatgtggtccaccggcggcggagcgcgctgcggcggcggcggcggctccccgacctcccctcccagatccggccagagggatgccgggggagggcagcggcggtgcgcgcggacaccgtggcggcggcggcgcgcggacgcggtggcagcggcagcgcacggacacggcagcgacccgttgcggcggcggcggcgacgtggttccccggcctcccctcccagatccgaccggagggaggccgggggagggcagcggcggcgcgcgcggacgcggaggcggcggcgcacggacgctgcggcgacccggtgcggcgacggcggctccccggcctcccctcccagatccggtcggagggaggccgggggaggacggcgggcgacgtggttccccggcctcccctccaagatccggccggagggaggccgggggagggcagcggcggcgcgcgcggacacggtggcggcggcggtgcgcggacgcggcggccgcggctaccccggcctcccctcccagattcggccggagagaggccgggggagggcagcggcagcggctcctgttgctgcggcagcggcggcggctaccccggcctcccctcctagattcggccggagggaggccgggggagggcggcggcggcggctcccggtgctgcggcagcggcggcgtggaggcgattttttttttgttttttattggattttcgcacgcgggccatttgcccgcttgcgaaaatggatgattttcaccgtcgttcgtctgcaggcggtcctcccctccgcctgcgaaaataggttttggccacttacaaaaatgcttttcctagtagtgggcgccgaagtcgccgcagaagaaaccgctggaggaagaaaaatgtccaggagtgagaatgacatgtgggggcccatgtgggccccaccatttttaatttttattattttactgtaactgatgtgtgggcccatggtttttatttttttctagataaaattgccacgtaagcgtcacgtcaattccacgtgggataaagaccgagttaaatcagccatgtaggtgccacgtcagctaaaactgttgtcttaccatgggatctatattgtaccggttttgacagccgtatctggttttccggttcaacgacggaattcggattcgtcgaaaatttaagagaccaaaagttaacttattccaaatggaaaatgaggcctgtgcttcggccctcctaggctgcgcggtgtgtgtgggtccatgatgtggtcagggccgatttggatatctatgcatctttcgaaagatttttataatcatatcacacagatttttaattcttggattaaaatccaatagacacagtaaaatacaaaaaacaactaagaaacaccataatggatactatattaccatatcttcagaaaaaaaagaccaaatccaatataaatttcaaaacttatatgcgaagattcaaaaattacactgtaacttacaaaagttacagtgcaaatttcataaattatattgtaacttacaagaaaacacactgtaaatttgagtgagaaaatcgagtaagagataagaaaaaatctttcgagtgagatatagcaaaatcgttctttgatcagtaaatgtttccgaatttccaagacaagatagctactcccttcgttccagaatatattaacctaaaaccggattggatgtactatgaatctggacatacctctgtctagattcgtagtactaggatatatcacatccggtggttttaggttgctatattctaagatgtagggagtagactatttggattgacctatcatttttagagtgggctcatggataggtagcctttggtgcctggtgtaagattttcacattttgatcataattgattggattgaccatattatttgtgacataaaacaagctttgaaagagactttcttggtcctgtaaacaagtatcgaggaccttttttttttaaaaaaaaaagaaacacagtggttcatacacgcaagtacactcatcctataaacacagcatacccttccccaacaaaaacttcgagagagtgagacggtatatcaagattgataaaatcatcaaaggtgctatgctatagacaggtacctcgcttatcactggaataataattaatcgtacgtacgagtgctgccatgtcaagtttttgagttgaatttgtgttggttaaaaaaaaatataaccagctgatttaccctcaatttacttgaaatatagtaggtctcaaaaattttacatttgttatccatgtacacaaatttcatgatcgtgttttcattttgaaggcgttgttgaatttcacacactttatagaaaaaaagtaaaaacttgtgttcaatccttataattagcctggtattaaatttgattaaaaatgattccgtagttggttatttcaatttaacgtggatgccttagcaatgtttgaatttggaaaattctaatttctattgttttttatgtactatgtgggatttttatttgcatcccaaactccacgaaagaataaaaactctagagaaaactaacatagtactccctttttcacagctgaacatgtgttttactttaaatatttaaatttgaggtatatcattgcaacgaacctataaaaaacagcctttccaatgcattctccaaactaaaattaggtaagttcgatgaaaaaatatcctccaatagacctgccaacaaaccctccaagccatctggctcacaaaattaactctctagctagctaaacatgggcatcctacctagcgggccaagccatgttgccaaccaggggatccagtcgtcagatacccttctccccttctctctcttttcccgcacccatgcagaggagcgctgccggccaccatcgtcatcaaggtcgccatcatcatccgttgttgctaccgaggtcactgtcgccagggttaatcctatcggttatgctgatttgatcgggcctcaccaaaatgccgaaatttcggtccgaaattttgaacaaaatttagttgaatttgaacaaatattaccaaaattcatgaaaaaatgaaaaatttcggccgaagtaatatcgtatcggaggggaccgaaatgatcgaaatttcggaaatttcagtccgaaatttccaaccatgactatcgccagccaccgccactgtcgtttgtgccatcactagccgttgccatccacctcgaggttactatccgttgtcgctgttgtattcgccatagtctggaagcctccgccacctgtgcccctactggattcgactggcgtggcgcggattcgcgagggcttgtgtcggattcgggcaacacggtgtggattcgagggctacacgacacccgctctagcgcaaattcgactagcgggttggatttgcagcttcgtggccttcaccgcctccgtctccccaagctgagttctgggttgcggctgacgttgtcatcgccgccgttaaaaggccgggagaggaggaagaggggagaaagaggagtaggaagaaggggtagtactagaggctggtgtatgggtcctaatgtcatatgctcggaaagaagagagtacatgaaaagactattgaagtgagtaataataag

SEQ ID NO: 12343 - DNA, 877 bp, Oryza sativa
tgtctttgatgagaatgtttttccttttgcatccctccactctaatgccggtgcaagactacggtctgagattttattgctgccacctacacttctgaacccggatgatagtactggtaggggtacaacaataggagatgaccatatgcttgataatcctgaacatactaatacttttgctgaagaaaatgcagagaatacagatcatatagagctggatttcaacacagccacacaagatccggagttcacagaagatcatgatgatacgggcggagattctcccgctctgtcgtcgccctcgggatcgggagctgctgtcacgtcgccgtcatcgttgcctgtgattcctaaggctccggtgtctcctactgccagccattcagcgtcggccacgactccagatgctcccgaggcacatgattcagctacgtccgctgctgctggattttctacaccggtgcccacacggccggtcacacggctacagagaggaatacgcaaggaataactttatactgatggtacggtacgctattcgtttttagcagtaaatggtgaacctcaaaatctagatgaagcctgtctaacaaaaattgggaaagtgctatggatactgagttttctgccttgatgaataataaaacttggcatttagttccaccagaaaaagggaggaatattattgactgtaagtgggtgtataaaattaaaaggaagtctgatggcagtttggatagatacaaggctcgtttagttgcaaaggggtttgagcagagatatggaattgattacgaggatacttttagtccagttgtaaaggcagctacaattaggactatattgtctgttgcagtgtctagaggttggtctctta

SEQ ID NO: 12344 - DNA, 3123 bp, Oryza sativa
ctgttctttcgtctctgcgtttttacccaaaagaaaatcaaatttgactaaaacttgtaataattgagcaaatcacaattgcatgcaagaacatggtgtaccgtacccggacaatccggccggacgaacgtgctcccatgtgcttgtaaatgtatgattatttaattttgatttaattactgtattaatcaattttgattatgtgtgatgcagggcttggacccgaagtcgacggccgacctgttctcgagcgcggcgtgggtgggcgagaggtgcgtcgacggcgacgactgcttcgtgctccgcgtcgacgccgaccacgccgcgctgcgcgcccggagcagcggcgacgtcgaggtggtccggcacgccgtgctcggctacttcagccagaggacggggctgctcgtccgcctcgaggacagccacctgctgcgcatcggcctcgcccacgccgccgccgagagcgcctactgggagaccaccatggagtcctccatcggcgactaccgcgccgtcgacggcatcaacatcgcgcacgccggccgcaccgccgtgtcgctgtcccggttcgagagcgccgacgacgccgccgccgccgcgcgcggtagtaataagcggtcgtggggcaccaccaccatggaggagacgtggagcatcgaggaggtggacttcaacgtcgtggggctctccatggattgcttcctgcctccccgggacctagtgctcaacgactgcagcaagcagcagcagaaagaggacgccgccgccgccgtcgtcgtcaaggacgccgccgccgccgtcgacgtcaaggacgccgccggtgccgccgcgaacgccaagggcggtagtgacgacggcaagaccaacggcggtgacgtcggccgcggcgtggtggtgaagaaggcgcttgttccggcggtgaccggactgggttggttcggtccggccaaggtggttgccgtcgacgacacggtggacgacggcgtcgccgccgcagccgacgacgacaagtaaatgtagatatctctcggctactcgctagatcaggtggtgctcgcttctgcgcccctcaagagtaaatattaattcgtatagtttaagttaatttctactacttaggaacatgcaagcttgatcatgttatatgttagatctagcaactgcattccattgtagatgttgggggaggagactaagtttatgttcttctccattcgagtttgaggacattttgcgtagtgtccggccggtgcttcattcatgatgtaatttaatactttggaaacaaacatccaaaggaaactttgtgtatccattttgttaagaacgacatgggggcttcagttccaggtccattcatcagaaactaaagttattaccgccaacgacgaaaagctccaaaattttgacaaattgacttgtttataaaaaattattttaaaaataaaacgtaaaaaaataatttcagaaatagatcatgacctcaacgacaattttgtgctgagctaaatgtctcaactccaccactattgatgttgagatctcatgatcttgtccgacgtgacataaatctgcaaggacacgggagctcagcataagtgtgctggcggcatcgatcgatgtatggttcagcatcctccactatcctccgaatgcatatttacattttttgagttgatattaagatgcaagaaataatttgaaccacgtcaaaatgtgatcaccatcatggatctcaaaaggtacaatctggaacacatacacatacgcacacatccccctccaaacaaaaatatttacgtaccagattaaatcttagcctctacatctaaattagatgaatacaacaccaacccaaaaaatataaactatttcttagcttccaatgttccaatacaaacaacaagatatattacttcgctcaaccatgcgcaatcataagagtggagtgcattttccgtacaataaaataaattgagtgcctaaacttcaggcaccatttttcttgttctagctaggtgacaatccaataattctcaacacttctctattgctaatttaaaaaagtctattcgatttaaataaaaggtcaaaacaataaattattatgacataaaatgcaaagttatatgaaatgaacttacaattaataaaaataaaaaatacattaaaataggcttagataaagaaaaaattaaaccatatatttcaaaaaatgctaaaaaattatacattttaggtgcattaagtgtgaatcttttttggatgggtcaactagggtgtgtttggttgcctgtatgaggcctggcccacatctgtagatgcaattttcggtttttggttacctgcgtggccttcccagcctgccccgctcatgcaaaaaggcctccgtagccaggctgagtggaaacagtcaattcgagcttcacaactcagcttggcccgatggatgtaactggctgtatccgcgcgtgcaacggtaaagatggggtcagtttgcccctcctcatttctccccccaaatccaaaagctagggtttggtgccagcgtgccaccctcctccttgacactactcgtggacacatggcctagaaaagagagacgtacatgggctgatacaagtgcatatagatgtattttgtcgttctccatcatccgcacgatatataaaagttagagtaaaatgcttggagagggtcatctaacttatttagacgtgtcacataggtcactcttctaattttaaattgcacatctgaatcacgttagtgagtcaactgagtcatttagtcaactaactatcacatgaggacgccttgtatatatgacatgtcacctagaattgacaaaaatacatcatccgcagccgctgcctcttaggaattcgactccatttctgtttacatccatagtttatcattgccgtcgggtttgatggcaagtgagagaggactgagaactagcagaaaaactcatcaaaacagacacaagtgaaatgatttggttcctttcatttcttgttagtgttgtgacaaaaggggaaaagaacacacatgtggtttcctgcatgtccaaaagcaatttttccaataagggcacccacaatggttatctatagg

SEQ ID NO: 12345 - DNA, 671 bp, Oryza sativa
ccctactggcctcgtccactgccggccacgcctcttcgcgccaggtcggtctcccgccaccggccgcacgaccggtggctacgcctccttgcgccgtgccgacctccgctgccaccggcggaacctctatgcaccaagctagcctctgagcactcctcccgccgctgccgcgccggccaaatgctgtcatctgccacgccaccctggctagccgcccgaggccgtccttgcctcctctcacaatcgtcgtagcccgtttccagacgtcgacaccgcatccacaccttcctcgcctctacatgctgccaccggcaaccgacgccgcattcacagccgttgccgccgtcagccaccgccgtcgccagccacaaccgccgccagcagcgcctccagccgctactaccaacggccggccggccgctgtcgccgtaggcctcacgccgccatcgacctgccgcgatgggcgctcctactgagagctcgcccgctatcgccgacccatcgccgcgagctccgctgcccccgctgcgagctcgcccaatctgaccgccgggtggccagatccgcctccggggggccggatccggcgcgccgtttacatccctgcctccgtcgacccaaccatgcctctaccgtcgtcgtcgccatccccgccgacagccacccccccc

SEQ ID NO: 12346 - DNA, 529 bp, Oryza sativa
taacgccgcttcggtcggcgagcgtaattaacgcgcgcacgatacaatccatttcgattgccacaaccgcatatccacttcatgcgccgtaagcgggcgaatgggattagtggaagcgtgggcacgggaaacgagggagcgagatagcgagatacgagggagcgaggtagtgggcgcgagaaacgaggagccaggcccagcgatggcaagggtataaaagcatcgagaaaaggatttgcttccttcctttcgccattggtcctcttgccttcgccgcctgagctctaactctttctctgctaccccctactttcgccacacgcgctcgttctcaatcatctcttcctccaccgccatggcacggggctctgctctgctcgacggcagtgtactaccgccttcccgcatcgtgagcgagaggcacgccggactgccgcgccgcttcatgccggagtccgccaccggtcgggagatagtgatgctgggcgaggggcgcccggcaccagactacccggggcggtccatcttc

SEQ ID NO: 12347 - DNA, 707 bp, Oryza sativa
tactgagcaaagtccggaatattgtcgtcttccacttcatcttcttccatttcaacaccttgctctctgtgggatgtccaacaattatagcttggcatgaaccccgactcaaacaagtggaaatgaatagtcctggatgcagaatactccttctgattcttacacttattgcatggacaacaaataaaacccctttgcctgtagcttcggccactctcaaaaaatagtgcacaccgtcaataaactctttggaccgccggtcagcgtacatccattgccgatccatctacatgagtcaaaaaaaccgtacacaaataatattcttacaataatgacagtcatacaataattataattataagatatctttattcatacaaaaatcataaaatattacaccaaataattcttaaaaactatttgtaaagttttaaactaattttaatgtgttttacttcttttaattttcattttagtttgttttctattatttaagattaactttcactagagttttccttctcaactattttataaaaccttgtttagcaaatgaactaaatttctatatattctttcttccccacacacattttctctctcatcaacttacaactaaattttggagacaaaaaaagtgtgcaaaacataggtgcaaatgtagtatgacaaaaaaaaacattggaggatgaagttgcaaacctttt

SEQ ID NO: 12348 - DNA, 611 bp, Oryza sativa
atccgggactaaagatcgagctgacctttttttttttcatggctctgttgctgcatggtttatatatatatatatatatatatataaaccatgcatatatatgtttcaatacatatatatgcatacatatatatatgtatttatacatatatatgttatgcaaatgcatatgtatatagatatatatatgaccaaaatatatttacattatagaaaatgtgtacacatgcatatagaaacatatgtagtcatgtattaattacaatccattatatgtcctagctagctacgatttcgacgtagtagtactcgctgctagctcagaagctaaggaccggtgaattgtgtttccgtcgtagtagaattcacccttgggatcaaggatttcttcgttgatgaatcccatgagttgttcttgaaccgccgcgataaattccttgtgtgtggtcaggttatccctcatgcgaataaactatatgaatgtatgaaattgattagtaataaaacaagaaatcgctacgtactgaaattttgaatttatttgtacgtacatcgagctctcttgtggtgatgatttggtttgcaaggcagtggcaatactcgcacacgta

SEQ ID NO: 12349 - DNA, 1090 bp, Oryza sativa
cttttttataaccatgtttggtacacaacaaatttggtcatttatatacaataattaattaaatatttacattgtgatctccacaaggcaataggtatatactaaatcaagtctgaaaccaaatgaagttgctagattttttttagataatgaaatgaagttgctagatgtaatgcagcatctgtaatcaatagaacgcaataatttgtaaagaagtgcaggtagatttcattacatggcaacctccttatgctggtcggccttatggcttcatgcgcttcttgagcatttttcaccttcttgaagtattttctaatgccctctgaagcatattcctcaccataccttaaaaagaagaagaatgaagattgcaaatgacatgatggaacacataaagttgattaaaaaggtaaactatcaaaataatgattgcatgagactagcccgtttagcattcaccatccagtgatgtccagttcaaattaaagaacttttgttcgcttatgtactaccaaaagggcacaaaatttagaaagataccactctctcacatttagttgaaaacttaggctgtgttcggcagccaatgatcccaactctcctccctcgttttttgtgcgcacgcttcccaaactgctaacagtgtgttttttgcaaaaaaaaaagatctatagaacagttgttttaaaaaatcatattaatccatttaaaaaatagctaatacttaattaaccatgcgctaataagtcgcgccgttttgcatgtgcatgggattagttcccaacctaaacagcagaatacagccttaattgtgacccttaagcccctacctcacatgcatcaattctccattttgtaataataaccatcaattccacatggtgcatcccactgcttcctccatgcccatggtacattgatttctcactagctaacatcagctaatctcatcccccattctataattcctctagtaggcttatccatctcaggcatttctactcatcagtcatttcacttggttgagcgtggttgcagtggtaacagcatggaaatttcctatagaacgtgggagtggcatgagggttcc

SEQ ID NO: 12350 - DNA, 17286 bp, Oryza sativa
catgctactagtattcctcgtaacaagcgattcattaatatttacatttctcgatgcccatgtagccatccttgtgtggaagaatggagagtcacgcattaaatccgagaaagtcattaagaggataggtggttgtattgaaatatgcctatcaaaggtaaatttttcagatttggaaatatgcctatcaaaagtagatggagtatctagtttgagaattgttccttttaagcttcaattccctctccatatcccaatggtacaatcagctaatacatagtgatagatcggtgtttttctagagaatgtaacatttcaatgataaataactgaaacaaaaatatgccatggtatttttcctctgatggtatgaattatgcaaccaaaagttgtgaaactacaaatcagcaagcagagaacaataacttttctgactatataatcaaatgtatctttgcaacaaccaaataggtaaacattaatttatttgatttgaattgaaataaagtggttcgtaatatacccatcacataagtcctaaactacaatgttcccagcaaaaaaagaaacttgttgccattaaaacaacgatgaataaccacgagaaatgagcacattcccactcatgaattgagaagctaggaattcaaattattaagtactacaacaactaatatgttagaagtggaactgtagatattagcacacctaaacaacaaacaaaaaaaaaacacttgactagatgttccagtagagcatacctttgcttcactaatgaaagaatatcttctgcagctccatcagatatcttcaaaggaaaacatgaatcatacaagtaagacaacaattccagactatcggagtacagcatcatacaaaccagatcctcaagaaattattgaatcggtaattgactgaaatttctgaattctgatatgaagggatagtgaatagtgcatataatacattcatgaaccattgcatcagataattataattgaatagatatatttcatatgattgaattctagttagaattgctactgtacatactcacgcatccatgaatcaaaatggcgatgagtagcgctaatttgaaggcagtactaggatgaaatagtttgccccagagaggagttagaactcattagagctaccatttacagactgggaattagatgttgcggatatggtggatttttcattaaggaaattgcaaatgtatccccctgctagcatgctttgatcgtaggatcaaacttgatcctctacatgaaaaacaaaagtaaaaaagacaatttatctactcactgcctgaagtgcaaaaactaatgaagacctcattatacttcttctcaatggcatcacctttttttcatgagtgtaccacacttacaaatatagaatttgccacaatcctgttatcatgagcagcgattattgtagcctgtgcagcgctgagctgctcacatgccaggcaggctatgcattcatcatttcatgtcagacaataattccaacatcgacatgccattgatgcatatgttaggactttgatattttgcacccaacagaaattaacctacttttgaacaaggctgtcacaggatagctacataggcaacaaccctatctccacaaacctagagcctcctcaatgccacctctcactcttgagcacagaaatacgcactgccctctagcactttgataccactgacaatgaagacagaacaacgtccctacgctcttagagaataaacactgcctcctatctcctagactccctcagtctcattgtcaggattctttcaatggcattaactgttacaataacacaagtatttcggcatggcatgccaaaatgatctgctgcaccaatggaagagtcttttaggcactggaaaattagtttcgtggcagaaagtatttggtataagtatagaagagcagcatggcgtaatgctttatagtttataccttataatctcaaaaggtaatcacgcgtgcttttatatatagtgggaggaaattgatattttaatgtggatgaccattttaacccataaccatggatatgggaccagattaatatttatgctatcgatactagacaatgctgatttgatcgtaaaggaaaggtaggatgacacctacatgaaaaccatctgttcggatgtatgtaattaacccagttgcttcctcagaggaaaggttaatcccctcatagagcttttgggctacctgcaatcacattgaactatgtgagcgaacagatagctatatctaaattgcattactataataggtcagtaggaaatctcatatacgcatttaagatttaactaacaaccttcatggtatacccagcactaaaatgtagtttgtttgctgcgtcctgctgaaggctggatgttatatatggcataggaggattcttgttaattttacttctcttaattcctgttacttcaaattgggatgaataaatcctcttttctatattgtgtgcttcttcttgagagcgtatagaaagctgatccaacttttttgaattaagatgctttatccgggattgaaggttaaggccatttgaagggccagaatgttgggttttgaagtccgtatcaacagtccagtactcctgcggatcaaactgttctatttcagcctctcgatcacacacaagagccaatgccgcagattggactcgtccagctgactggcaaccaggtagcttcctccataacagtggtgatatgccaaacccaatcaaataatcaagggaacggcgtgctagataggcattcactaggtccatatcaatatatcttggagatattaaagcctttttaacagcatcctctgttatttcatgaaagacaactcttgcaacagtaacttttgaacccaatgcgtcttgctgttcgagcatttctttgatgtgccaagcaattgcttcaccttcacggtcaggatcagacgcaagaatcaaattttctgccctgaagaaggaaaaggacaaagcaattataacaacaaaaaaaaagagagagatgcacttaatagtgcagtggcaaggggggtgtggtttcaaccccgaggtcccgtgttcaatccccaatacactcacaagttattcttaaaataatgtttggagggacgtctctccctccaaatctttttttttacaacaaaaaaaaaccattagtttgctaatatcgcatagcaaaagaagtcaatcttgctctagacatattgaactaataagaaaatgtacattttatactgttatctatagtataagcataagacatatataaagagaaaaggtaaagttaagtatggtgatattggtatttggtatttcacgataaaagacattttggagccaaacttctaatataacttatgaagcatacatgcaactgatgttacccgaaaagtatgtgattgcgtgtttctttacctttataacaaggcttagtcaacatctaataattgtgtcccttaatgtgcttcgtgtttgtgaaaatgagtatgtatgaagacattttgagcatggtgactagaacctgaccaactgggtcaaggaacaggaaagcaggacaagggtggtggaaatgtggtgactgaaaatgtggattgtgggggtaagttttattcaggacaattgtttacccggcaagtactgcctgtgtaccaccaatattggcagctactattgattaatgatgtcaattcaagatttcaaggtcacagaacatgacaatgatagacaaccgtagcgacaatggtttggaagcaccttattattaaaagaggcaaacaagcatgtatttcatgttaaaaactgaaaatgctaaccatactgcattatcatacccttttaacgccgttcttatgctcttaagatgtgtccaggcagcagcaggaacctcccacaccatactgaagtcatcatcaggacgaacagattttgatcttccagctaaatctctcacatggccataactaggtaacacttcatacatgtccccgaggtatttttgaattacttttgcttttgttactgattcaacaacaagaactgatttagctgtgggagggtaaagaggaacaagtggcttctgctcactaacagaggtcatcgtacaaatctcagctttagctgtcgcgttagaagcagcagattccttcgcttttgaagatttcttcgacctgcttgatgtcttcttctctttagaactatcggcagccttttttgatttggaaatgtcagacttgctttcttcttggttgaccccaattttcctgctctttgttgctgctgtactagttttaacagatttcctctgtttcttagtagatgccttctcttctttcatatcttcactagcttccttttttctgcttgttggacttttcctccgggtagtagtctttttagtaccagtaccactcttactgcgtttgctagttgatgttgaagcctcatcagtgatggtgccacaagcagccaatgtgcttttccttttctcagatctatgaaacatactgtgtgcaacactcccatcttcctttcgcatatttggattaccaaataagcacttgtttctgatgggaaaagttacctttgtgttgcgcagggtcaaaaaggaccgtgaattacgaatattgttcgccctcaaagaaatcccatgcctatatgcagctctcagacttacaaaattaggattgcccatgagcccagtagtaaaaaaggcaccacttttgagctgcaggggaagacgggagccgattgaagacagctgccttgatgaattattacttaatgaataaggcataaagttgtaagaacatctctgagatacaccaaattgaagctgaaaaggtagcacgtagccaacatttagagaacaagcaaaactctgaatggcataggcataatcacaagtgcgacacagaagcagaattctttgatacgttccaaatagttttatgacaccgatataccgcaactttagtaatataccatggaggaagattccagtgtagctagatgctacctttgttttttaacatatgccgccattaacattttatttcatatttgaccactcgtcttattcaaaaaattcaactagatatatattttgttttgttttgttgtggcttgatttaagcaatacttacattcttaagatttctaaccaaaaaaatttgaataagatgaatggttaaagggtataacataagtcaacggcgtcatcatatatatattaaaaaaacaaaaaaaagggtgtaccattgaacgttgggaaggtctagatatttagcattacatcaattcctgtccttacagccaaaaaatcaaaggggtagaagaggatgggggcacttaccatggccgtaggcgcccccggcggcggcggcagggcgagggaggcggcgtggccggcgtagcggtgcgggatgaggcggcggagctggagcgccatcgggaggggaggagagagcgagaggcggaggcgcggccgcgggcgcacgcactcaggcgaggggggtggcttgggctaatcgactaatggctgtgatttagctagggttttggaggagggggatgaggccgcgcggcctcgcttgggatgggatgggatggacatgggagcccgtcttggggtacaaggtaggcatcagtgggccgggccgagaggatgggcttcggtcggaagccacaggcgtgttgggctgtgggggcaggaattgggctgagaattgggggtttggatttttatttttttcctgctgtttggatattcgtttggaattggagtattatgggctttgtctcccactgaattgagatagagatagggatttaagtgggcagacccgtaaacttaattatagtacaaataattaggttactcgataggctatccgcttgtttgtactattatatataggtttacgggttatccgtttgcacccttagatagacttgtttaactttcgagccaagcctgacatttttgtccacctatctattgtaggacaacccctgatgataactaaaaaaaatcatagttcaccagcttctttcatctatgcactctacctgaggtcctcccatcaaaaccaatcagctagctctctcaaccgccaccctctcacacaagaaacgtactgcatctgccatcaccctctttatctgagtattcttagttccaaaatttcatgatctgaagttgtgattacattaatactatttcagatggatcattttgttctttataggatataaaatgtaaaatttaaaaccactgtaatttaacttacaaacttcaaatccagcacagatttataatttggagtggtacatattactctcatatttcttatagaagccggcctcctccccacctgtcggccagcctgtctagacaagaggagtgagagacagaggaggaaggaagactccaacctcggcgtggcggcctcctttcccgcatcgcggccatcgtagctgccgccgattcctcctctcccgcctcggcatctgttgtccctgcaagtgagcccagcgccgctgctgcaggagaagctcatggcgacattgtacccgtcaatcactgacaggtcgtaaaagtcctggctgccaccgatggtgaactccgccggcgtcatcggtggccgccccggagaggctgcatgacagcgagccaccgtagtcaccggtggcgcaactgcccatgctggcaccgttgaagttgttgccgttgtcgtgtcgccgaccgccagacctcctctcccctctcgccccaatgacctcctccccacctgccggccgccttgcccagagaggagaaaagtgagagagagagagagagattgagagagagagaggaggaggaagagggaggagggggaagaatgagggtgctgacgtggcatcctaacatgtgggtcccacgctgactcagccaccacgtcggacaaaaccgaagtcaaaaccaccaaaggacctaaagtgaataattttgtaagttgagggatgtcatatatctggttttgcggttggggatgattttgtaattcgatgacaagttaagagaccttcagtgtactttttccttttggatattcgtggaatttggaattggagtattatgggctttgtttcccactgaattgggatagaagtgtaagcgggcagacccgcaaactcacttatagtacaaataatcgggttaaccaatgggctacccgcttatttatattataagtaggtttacgggcctaccagtttgcatccttagatctctactattataaaaattgaagatgttttcgtggtccgtcatctgtgtttgagtcggttataaaaattgaagatgtttccgtggtccgtcatccgtttttgagtcggttttaattttatgttttggttttaatctatatctcttctcttctctactattataaaaatgagtaaaatacatggtcggtccttaaagttgagcgcgggtgtcacttaggtctataatcttgtaaattgcacatctaggtccaccatcttgtttaataagtgactcattaaggtccaaacccggtttgaccaaagctgaccatctacattgcattccacgtagacagctcatttgcaaatagccccttcgcgcttcagtagagccctgggcaccaaaaaaatccccaaatccctcagctgcctccgtcgtcacatcgcccaccaccgccgcacgtcatcctcatcgtcagccccttcgccggtcacgtcataccaatggctgagctgatgcggcgcctagtcgcacaccatggttgcgccgcctcgcttgtcacgttctccggcctcgcctcgccaacatcagtgtcctccgtcgctgctatcatggacctcgatgaagcgacacatgattgccaacgacgcagtattagaggggacgaagcgagcggcggacgagctcgaagatcaggacgccgcgctgtcgtggacctcaaatccttcttgacgaatggccggcgggcagaacggtggagggcaagcgcggcggcgggatgcgagcggagcggcgacgagcgaatgcggcagcagttggcgggtggtgcagggaactagaggagagcttgcggagcgccgtcaccgtctttgtagctagcgtgccgatggcactcgtgcctcactgatggccagatcaaccggtctcccttcctgctgatcgttggtgctagaggcgtcggtgagcttggcgcgcgcgggggaggtgtcgccggccacgccctggggaggggtcgcctaccgcggccgcgcgtgcgggggaggcgtcggcgagctcggcgtgagctgggcgggtgcgagctccatggcggcagcggggcggcaaggcgagcttgacttgagcagctgccgcagccacttgccgcatgcacccacggctggctagagcaggggccttccccttcccctgctccttctccttcccatcgacgacggcgagcggctgccggaggggtatgaggcgcgtcaccaggcgcagcgtggttgagacaggtgggtgccgcaggtgtgcatgctggcgcacgtcgccgtcgacgcgttcctgcgtgcgccacgcaaagaagggattggatcagacacggggaatcaaaaaggggggcaaaatgcaaatatgttgtcacgctggaccgccacgtaagccaatcaacccggtcagagatcctttggacctcaatgagtcacttaaacaagatggtggatcgagatgtgcaatttacaaggttatggacctaagtgacacccgcgctcaactttaaggaccggccgtgtattttactctataaaaatggaagatgtttccgcggtccttcatccttgtttgaatcggttataaaaattgaagatgtttttgtggttcgtcatccgtgtttgagttggttttaattttatgttttggttttaatctatatctcttctctgctattataaaaattgaagatgtttttgccggtattttgatacgtcatccatgtataagtcggtttttaagttcgtttgcttttggaaatgcatgtccgtatttgagtcggtttttaagatcattcacttttgataatacagaaggaatcatataagaaatatgtttaaaaatactcgcatgctaacttgagacgatcggacacctaactagctcatgattttctaaaagagcatatatatacatatatatatatatatatatacatatacatacatacatatatatatatatatgtatatatatatatatattcaagcgaactcccacagtgaatttcatcttaactaaaccatataacaataataagattaaaatagacttctcccgttgcaatgcataggtattttttctagttgaattgttaagctttcgagccaggcctaacatttttgtccatccgtccgtctccatagtatggaaacccctgatgataataactaaaaataaataaaaaaagttgtcatcatagttcagcagcttccttcatctactgtccatgaggtcctcccatcaaaaccaatcagctagctctctcaaccgccaacctctcacacaagaaaggtacatcgaccagatcaccctatttgcaactggttcatattttttttcttcatctaagtattcttagaattgtagttccagaattccatgatctgaagctgtgattatattaatactatttcagataaaatataaaattttgaatcactatgatttaacctacaaatttcagatctagcacagatttataatttggagcggtacgtattactctcgtatttcttatagaagcatttacgcttttgtgtggctatcctacctaccatgtgtctccttttgactactccctctgtccaggattataagggagtattccctttttagcactaagtaaagaagataaagaagtacatgtgtggaaataggagtatggaagtagagtagtaggcatcgagctagttaggacagatgcgggtggatgggtggtggggaaacttttcaatgcataggacagagtcagacacatggataaaatggatggctactggtgtactttactcctcgaaaactcaaagtacactacattggaggagaaactgtactacatattcaccaaggctatctagatagaagttggatgtgagagaccaatggctgagagaactcatcaccaaatcaacctcacctcatccacacccaacccatcaatcaaaagatggttcccctttcatgatatatatatcctcaaaccttgcataacatagtatacaatagagtacatttttccttcatgtagaaacaagcaacatacatatatagagcaagtacaaggcagaacagaactatgaacagagcagtggaaggcatgcatagtactacgcaagcaccggtacgtacatatgtaccagctttatttaatacaaacacttgtgatgagtgcatgcttggtgcttcgcctctactcggcaattgagacttgttcatctccatgtgttatcacagcagctacaggtgcccagatcacgctgtccctgctaacgaagtggcacaccgacgcatctcccggcctgagattgtgctcgacgaacaatggagtcttggggtcaaatcgtgacgtgtccaggtggcacacggcgagcgcctccatcttctccggtgtgccgctgccgctgccgctgccatcctcctcgctctccagcaccactgcgtacactcgggtagggttgatcgcgtggcagtagaacacagcgaatgggaacctcatggtgtggcacgtcacggtgtccccccttaagcccgcgactgttcttaccgctaccaccttgtacatgtttcctggcatgatcccctctggggggacatcgggggagaaggcacggaggtcacgtgttccgagcacagacatagcgaactcaaccaccgactcgatagacgtggcacacgcacgttcttctcccttgatcgggcggtggtgctcacaagtgtccaacgccgattgtataccgtcggccatgacgagggatataggcgaaaacattgccagaatgtcggcaaagttctttgtactcactgggattgaatccgcaatgtcccggcgaagaaagggagcacgcgtggctatccccgtgatgtagggagtgattatggatcccggtttcaaggcatcctctaggaaatggaggtttgccttgtgaaaatagccattggaatagccattactgtaggaatgactatatccattaatgtagccgccgtcatatccgttgccataaacttgatcatagccattgccatgaacaccttgattaacatctgcaatgaataatataagcatgtgaatttacccgaaccattaatgtaaaatccactggtatggctggaaaaaaattcatgccattggattatattacagggtaaaatcccataattaatctggcatgagatgatggatttctattgaactccatagttttctctctcccataattaatcttgtactagttttttctctccctaaatcacaacttgtggctgtgaactttgcttgcgtccatactaaatggtctatggagttcaacaaatttatgcatacttattatccatcattaagcttgtttaggctcgatctagaaaatccggtttgtacgtaagtagcatcagggagagagagagagagagagagagagagagagagataccagtaggagggttcaaaagctcgagtatagctgttggcattggagagtggggaagcatcttctgccagtatgctgttaccatagatgcaggatttggcagctctacccgttccactcccaccaaatttctagcctctatcgcaacctgtgcaaatcatccattgctataacagattgtgatatggaacaccctatctgtggaatataatattgcgataattaattttcgcacctcaatgctgtttgtgtactcgcacacatgcacttcaatatattcaattaatgttaggtttaacgaaactaatttagtgttatgagagttactatatttgataagattaaagttacaaaagtttgagttagaaaaaaaagtcaaagcatataggggagggaatggtatgtacagtatatagctagctttgattgacatgatacactcaccagaaggatgaagatcaaaagtgacaaaaaggctgtcatgttgcttagcttcattgtgctatgagctaagctagcttagctaactcaactgaatgtgctggctagctagctgctccgttgcttgctttgctcttggctgccaaggctggtcctatttataagctcggaaacataccttcatttctcaatcttattaattaccatccgatgcaataattgcacttggcatcgatcaaattatcattttgtggcggcatatatatctgcttgtagattccaaattatcagttgtgtaggagaagaagtaactggtctggccattgataaattcaagtcattctatatatatgtcgcaaccttaagggtatgtttgaggagaagggccatcgagatgattgggaagatacgcaaaacgaggtgagctattagctcatgattaattgagtattaactattttaaatttcaaaaatggattaatatgattttttaaagcaactttcctataaaaaatttttacaaaaaacgaaccgtttagtagtttggtagtttaggaaacgtgtgcgcggaaaacgaaacaaacaaactcactctctcaccctctcgaacgctgcctaagtcatcactaagattgttatctattcattcgcgtgtataggttgccaaccgaataaacgccaaaacataaggcgctgtaactctgcatatatagctgaaaaatgtgctgcttcagtatatgcatatctgtagcttatttattttagttcaaatatttattttagcttttttattttaggacccagcaccgcccctccaacctccacttccttctgcccccccccctcccggccacctcccccacctcaccgtagaggagagggggggggggttcaggaggaagcgtcagatcttcctcggcgcggttcagcggtggccgcctcatcccttccccgacacggcggatgtatgatttttgatttttttttattcaatttctgtgactcaatttcttgatttgtggatttgtggtgctatgtgatttgtgtggcagatcgatgatggatgtgtgatctgtgattcaagctctttgatttattttttgtgatgtgggatggatgggtttgaatttctgtgatgtgggactcgtgagctactcaatttaagccgatgcatccaagcctcttttttttattcatggaatctcaaatgtgttggttcctaaaccggcaccggcacctgaaccggtacctatttctcctccacatcagtgttgcctgctggatgctggttgaaaaatctagcaaagaagagggtttcccaccggcaccaatacctttttctatactactgactagatttacttgagtttagctgaatacattgcttgctgctaattaactcaatccttacatgctttctccattgaagaaacgactcctcagggtgtgtttggttcacagtcatatatatatgggatatgttcattcatattttgttggatatggcaatccaattttttgtttggtttgtatgaccaaatttttttgtttggttggagggatatagcatgtatgagtaaagccaaaagttagtgggacccatttgtcatatatttttttctatcaaaatataatcatccaagatcttgttttaaagatttaattgtaacaaatataatggtgtaatcaaatcataaattagataaacggtttaagattatttggagcttgcttaacagaaaatcaaaccaaccacacccaatcagaataggacacattattcagaccaaaactggatggcttcttccagccaaatctgccggatacactcatccaacatattaagagaatattctatattccgggcggccccaaccaccctgccctccaaccaaacggcaccaaaaatcgggcggccatctcccatctaggctcatccacccagccaaacacaccctaaatccacaaagcatgcacacgtctccttgctctctctcccatggaatagagtagggccccgtttggggagcttaagattctgaagccctctttgtttaggcttaggtttattggcctagacttttaagtcagcttattggcttatatgatttataagccggtagatttaatgtcctaagtttagtggttgagtcatacatctacctcacataagccaaaaaagcttctccaacctagcttttggcttaatagtgttagagtggcttatggcttcaaaaaaagccaaacggaaaagctgattgtttgtttaggcttagacttttcgacttataagttggcttataagcctaaacaaagagggcatgagaatctgctggttggtagccagcttctaagaatctggagaagctgggttttccagcttctgggttttgattcatttcctggattctacaactacaaattgtgaactggttgggggagttggagattctgggagaaactgcagcagctaaaaactcctcaaacaggccctagatccttaacaatgtccgcaaggtacggtcattccggctcaccgcaagatgttggcaacccatttctcaaaacattaacactaacactttaattgtgcatgaacgccaaattatctagattgttttgccggccagccaattacacttcaaattagcagttgtgtaagtgaggaagaaactaactacgacattgataaataccagaagtcaaccatacatgacgctccagcagagtggaggaggaaatatatatattccattcccactgattccatatgattttgaaatatctgtatagaaagacctgtaatataaatagccatgaggttatttggaccgtttcatagtatagtggttagagggacccaatgtccaaggggtcaaacagtcttttcccggtaatttgtgagtgaaataaattaaataatgtgagcataataagcttaattggtagttgctctcccatggagttcattggagaactattgaatatttgaatgtatatagaactgacctgacaatgcacagtagagtagttagcattataggaaaatcatttttcttataacatgtagtacaattaaattccattgtccaagagaaccgttgacttctagactgaaccatcaaggagtactagctaaagagcacaataacatgtcaagttagccaagtctttctgaattgagcgtgagatcactctttttcttttcatttttatagtgctcctctggtgcgcgttattgtgttctaggacgtgtttggttgatctagctagatgtggtccaaaatacttaaaaaatgatctttatatacctctcatttattttttcaagtggtaaaaaaaatatgtttgtcaaaagtattagaggtgccttgtaaaggcttgcttgtaaaaattaattttcgtaggttagcctcttaagagagccgaagtgggcctcttaattgcctgcctgtcggtgcacacactacatggcccatgtgatgggagggatgggagggacggatctgcaacctccggtcataggagtggtgacttcgagcgtggcggcctccaaggcgtggatctgccgccaccaagcacgggagtgacaacaacgagtgcggtagcctgaggggtgtgaatctgtctcaatcgggcacatgagcagcgatgaggagcccgatggttccaagagcattgatctatcactgcctaccccgagagcgggtggatttctggccaccgggcacgggagtgggcaactgatgatcgcattggccttgggagtgacaacgaccgctgtggcatcggtggcgtggatttgccgttgcgggccatgggagtagtagacgacgagcaagcatcctcgatagcgccaatctactgccgctggccctgggaagggctaatctgtggccatcatcatgggagcggcgactgacgattgtcggggcctttggagcagcaatgacgatgatcaccgggcacgggagcggcacccacttcatgcggatggcataacgcacccgcttgcaaaaaaaaaaaaaccgtttttgcgtgcagtgggactgcctacctatgaaatttttaatttttacacacctgatagctggcgttgctacaccaccaacgaaaatatatttttgccgtttgtaataaacactgttatgtaacagtggcctagcgtgactttgtatcaccaaacttggcttttgtcctacttcctccgtttcacaatgtaaatcattctaacatttcccacattaatattgatgttaatgaatctagatagatatatatgtctagattcattaacatcaatataaatgtggaaaatactagaatgacctagaattacttacattgtgaaacggagggagcactttgcatgtgattagctattgtgtgtttgactacatgcgtttgcataagcctgctgaagatgatatatgtttgggagcacggtaaaatgtggtttgggagggaaaccacgcaaggaagggaagcaacatcatcgcgttttcgtcacccacgcgcgaggtagacctgcggggaacaaaaactatgaaagggggaacggacgatggagttgtttgtttattctcaattcaacatagttgtgtcctgttttaataggcctgattgacaagcttctaaatttaactccaaagagtagtctgaactctgaagcggagcggcccaaaaacctctctagttcatgttttcaaaatcattatagcatgtttaacttcccttttggataaatcggaaagtggagttaactagtgagatatcagcattttagctagaagaacgtgcaaatttttaagaaattaacgtactcctaggacgtcctagccaaggacaaattgcctgaataggatcttacaactgagtcgtgtggatggcaatataacacgcgcatttgtaaactgtagaagtagcttaaagtaaaaaaaaaaaaaaaactgtacaagtagcaggcctaaatttcattttggatggtgcacacgcgcaaattcatgaaatcgaagtttaatggccgaagctatgtcaagttaacgaactcacttcacttgcatatatagaataagttcactttaact

SEQ ID NO: 12351 - DNA, 14065 bp, Oryza sativa
agagcagttttcgctgacgtggttcattgacctagtctaaccagctgagttagtacggcccatatgttagtgactcctcttctctcctctatcctcttcaactctgaggaggagctcgcccccaattttgccaccgcctgggtctaaggacgccgacaacggaagctggaagccgagccattgctaggtcgtcgccaccttgctacataacacggccacaaacgcgtcttctgcatttgtgatcgtgcgatgtagcggggcggcggcgacctaccctcgccctagctcaaccaagggcggagctagaacgaaatggagggtggtgccacttgcttaatttactttactttagaacaagtttaagcagatagaggtgcctaagtttgtatcgagggaggtgcatacatggtgaagatagatgatgtataactaaaaaattttctttgaccaggttcctgggcgccctcctagtatactctacctctgcccctgagctcaacggcgcacatctctctatgggcaatggtggtgccctgccttgccgatgtctccaaccgttgtccctccgctcaagcatcattggcgttgacgtggtgtcccgtatgttgcaaaaagaaggttgggggcgaaactcccagttggcgattgatcgccaggattgatcggtttcccccctctcctccacgtggtttccttttcttggcaccgcattactttcctattttagtaaatttatacacctaaagtttatacacctcaagtttacacatctaaagtttacacacccaaggtttataaattaaaagtttatatatccgattcaaatttgaatttgaattcaaatatttttttatatatagtatttctatacatctaaagtttatacacctaaagtttatagacccaaagtttataagtcaaaagtttacatacccgattcaaatttgaatttgaattatatttgattcaaatttgaatttgaattcaaatattttttatatatagtatttctatacatctaaagtttatacacctaaagtttatagacccaaagtttataagtcaaaagtttacatacccgattcaaatttgaatttgaattatatccgattcaaatttgaatttgaattcaaatattttatttatatagtatttttatacatctaaagtttatacacctaaagtttatagacccaaagtttaaaagtcaaaagtttacattcacgattcaaatttgaatttgaattcaaatattagtttatagacccaaagtttaaaagtcaaaagtttacatacacgattcaaatttaaatttgaattcaaatatttttatatatagtatttctatacataaatttttccaacttttttttaaaaaatttatagtgtagtaggaagagaagaaggggacgagaggagaggtgtgtacagggggcatggggatcgatcgctcggagcgagcgatcgcccattagccacacccggttgggggtttgggggggggggggtggagaggtaagcaagagaggagaaagagaaggaggtgctgaaatgcaggtttcacatgctgactcagccaatagatcatatcaacgaaccatgtcagtaaaattcaccttcaaaaccactgagaaaaccattatgtatggttttaataattagagataaaaatatattgtattatggttaaatgatacgaatccaattggagactcaaagtagacttatttccatattgacctcaacataattcacttttgggcacatttcagcaagtatttttatcggtccattatttccaacaaaatttaagtccaaacccacgaaatttagttgcagaaaagaatggaaaagtccaagagaatccacgtcgcatcaaagccattgccacagacttctactatcccccgagctcgcgcagctcccgcgccagctcgtccacctcccgccacgagctcccgccttcccgcgtcgccgccgcagcctccccggcgagctccttcacccgcgcgcccacctcgctccactcgctagccgccgccgccgccgcagaggtcgcctcgaacacgcgcgccacctcgtcggcgctcggcggcaccgcgatgccgccccaggagaccggcacggcggcgcggtgctcgtcgacgagcagccgcgcgttcacgaactggtcggccgtcatcggccacgtcagcatggccaccccggcggccaccgcctccagcacggagttccacccgcagtgggtcacgaaccgtcccaccgcccggtgccgcagcacgggcacctgcggcgtccacccgcggatcaccttgcccctgccgcccgccgccgcgcgctcctcgaacccctccgggagcgccgccgccgcgtgcgacccggcggcccagacgaacgccgtacccgtccgctccagcgccgccgccagcgccgccgcgtgaggcggctgcaggaccgccatgctcccgaagctgacgtacacgacggcgccgtcggcgaactggttgagccaggcgcagaggtccgacgcggccacggcggtctcgccgccgcggttgccggacgcgtcgggctccggcgccagcggcccgacggcgcgcacgcgcatgaagcccaggtcggcgagaggcctctcgaggtaccgcccctcgagctgccggaaggtgttcgacacgatgcaggagctccccatgttcgagaggaagttgttcttgacaccctcggacacctcgtcgccggccttgtagaaccggtaaagcaaggacagctgcctccacggatacgacggagagcccgggatatcggggaagctaccgggcactcgtcgtcgtgctcgtcctcgcgcttgggcatcaggcggaacatagagtggagcacggcggtgccgtacacggcggacgaagagaacacgacgcgcggcacgccgagctcgtccgcgagcgcctgcgtccacccgcagaagaagtcggatagcacggcgacgacgcggtcgggggtgtcggccctggcgcgcgcccacgtccccagcgggccgcgcagccccgcgaacgcgacgatgagcttggcgaacagcgccggcccggaccccttggcgttctccacgccggcggggagagccgggtgcgacgggaacggcagggtgagcgcggacacggcgccctggtgcgtggcggcgaggagtggcacgagcagcggcgccgtggccggcgtgcagacgacggtgaggcggagccccctggaggcgaggaggccggcgaggtcgaggagcgggatgaggtggccctgcgccgggaacggcacgaccaggacgtgcgccgcggcggcaccgccgttggccgccggcgccatggcgggcgcggttggtggctactgctctctcgctctagtctgccgcgtggtagcaagtgacgctcgtttgcaagtagcatgtgcacagggatgtagaaaaccactgggcgagggctgcaagatgcaggtagtggactagtggtgcagatgacaagttgagctagaattttgctctataggctccaaaattgaccatccttattttcgtgtggcacccacaatataagtcgataacccaatatataccaaattaaggaagagtaaaaaatacatctgactcatctggtagtgtgaaaagacactcattaacagaagggactgaataaagtgtagaatatactcactccgtcacaaaatataatcacttttaaaatggttctaagtcaaacattttcgactttgaccattaatagtaaaaagttaaaaaagataaattatgtaaaactgatgttactagatttatcatcaaacaaactatcataatatgcaactctttttatttagatcatctcacctttatagatattgttggttaaagtagtatctcgaagactgtgttgaggtcaaaagatacttatattttcggacggagggagtacacatttagaaataaactacatatgtttggcagattgggagctatagagtagtaccactgtacttttctctatatatatataggcccccatcggttggcttttttttctaataagccaaaaaggcttattagggaataaaaataaatttgtaggtaaaacttttatatatgtgttctttgtaacttaaaagccaatgttgaaaaaaaactacgttgaaaatatctcaaaatcaacctcaaaattaactttgaaaattcaaaatttggcttattctttggcttattggatcatgcgatgggagccatattttttacgacagggatggatggtagtactcaatttctgactgctgctagacttcttgtcttgggataacaaatatcatttatattcttggacaaacttagagagcataatactctatattcatagatagagggagtataaaatcttgatagattatttgatagtagacaaaatatttttttaataatgattaatcaagcaaatgtggatactaatggaagatgacaagaaaccctttcaagactacaccaaccaaaaagaaagaaacattagaccaattaaaaaaaatcctttgatgtctacaccaaccaaaaagaaagaaacattagaccaattaaaagctagatttggttctgtgtctgtcacttcgcatggaaaactttggttcccatgggggaagagaacctgcaaactggcaacctgaaaaaaaaaagagagtaaaatacatcgatgatcctcgttatatatatcaactaggtctataactctaaaagtatgatagtatgattctagaatctctaaattgcagacctagttgatgtttaatatgctactatttgatggtaccatcttattcttcatcgaaatagagttgttcctttcttcaccggttgttagcaaactttccaattcactcgctagccctaaccaccaacacgtccagctagacttcctaccgcatttaatttgtttctcgactaatgcattctctttgtcctataaaaaccaagctagtactggatatgatacatcctagtactacgaatttggatatacatatgtccagattactagaatatgtcacatctaattttagattgtcttttttatgtcacattcagttttaggttatcttttttggacgaagggagtatgatggtgaggcgatgcacattgacaaggataggaaaggcaactaataccttcctatagctcactcttcccttcctatgttacatcatccattcatcctgcccagcaagtcagatttttaagctttaagggcgcgacgagcagatccagttaggtagaggagaaagagaaagcttaagtgacggcaagatccagttagatcaaggtttagttcgataaggtttgattaattaagtatgacggagctcgtggctcctcaccgggagaccgcacaggcccccctttgccagttcggccgggggcttagggtgaaatctcaagctctctcggtatgtggaaggatcgcgagccaggaagaaacgcgagacacgggcgatgtatacaggttcgggccgctgggaagcgtaataccctactcctgtgttttggtggatctgtgtatgaacaagtgacaaagtgtcaaccgccccccaatcgctctgggatcggatctggaaaaggcctcgagtcccaaaagtcctctccaaggaaaaagatcaaaaaatcctcctctccctcagtgggcaaggtcctccttttatatctcaaggggataccacatgcacctctccccttccaaactggactgttcttctcttcataaatggacggagaccggtacggttgctgtccgagtgcccttctgacgggacggctcatacctacccccacttccaccggaaacaagtgcgacgtgggattatggctgtctgttgatgatgcgaccagtgtcagaccggtcattcttgtcctccacgcgtcagttcaacaatctgcatgttcgcccttcttcatacaacatataggctgtaatggttgggatgaagcctggcatatatctgaccggggctaacgtgccatctctaagaggtaacacgctaactccggctagagacgagtgcctagaggctttcgtcttgacaggatggggcaaggcgtgcgtcagaccgccagtcgccacctaacccgtgatctgaccggtctgtgactggtcacagaccggataaaggaacgcgctgcactacgctgcatgcggcgtgacacgttcgaccagaccacaataaatgcggttaggtgaggcttaccgtgttcacctaaccccttcatgtggtgctaactccacgaggggtcggggcgcctcggccctcggggccggggcaggggtcaccccccctcggggaaatcaggaggagggcggacacctcaccctcgggcccgacgtcaacgaaggtgccaggccacgtgggcgattgtgtctgcctcaagcctctggtcatgatactcccggtcccatatcaccgacagtagcccccggcattatgccagggcgatcgccctcctcaagggaagcggtcgggcgtgacgccactcctaaagcctggtgacaggtgggaccggtctccatggttgggcagaaacccaacggtttcaaaccatgcacatcggtaatggtaacttggctgtccataatgggcggtctcttcaagactgccacatcacttgagcagcgcacgaatctgggtgagccgatttgcttcgcctggagatatggtaacgtcgcttcggtcggcgagcgtaattaacgcgcgcacgatacgatctatctcgactgccacaaccgcatatccacctcatgcgccgcaagcgggcgaatgggattagtagaagcgtgggcacgagaaacgagggagcgagatagtgggaaacgagggagcgagatagtgggcgcgagaaacgaggagccgggcacagcgatggcaagggtataaagatgccgaggaaaggatttgctcccttcctttcgccattattccccttgccttcgctgcttgagccctaactctttctctgctacgccttaccttcgccacacgcgctcgttctcaatcatcctttcctccggcgccatggcacggggctccgctctgctcgacggtagcgtactaccgccttctcgcatcgtgagcgagaggcatgccgggctgccgcgccgcttcatgccggaatctgccaccggccgggagatagtgatgctgggcgagggacgcccggcaccagactacccggggcggtccgtcttcttcctccccttcgcaatggcagggctggttccgccattttcttctttctttatggacgttctggagttctacgatctccagatggcgcacctcacccccaacgcggtgatgacattggccatcttcgcgcacctgtgcgagatgttcattggggtgcgcccaactcttcggttgttccggtggttcttcaccgtgcagtcggtgtcgccgccgtcggtggttggtggctgctatttccagccgcgggggccggtgttgaaccgctacatcccctgcgccctccgcaagaagtgggacgactggaaaagcgactggtgctacacccccctcgccaacgaagcgcgcctccgacttccaagccagcccccggcgcaagtctccagctggcgggcgccggtagatctgggggatggctatgacgccgtccttgatcgcctggcgggcctgcgatcccaggggctcactggggccatggtgtacggcgactacctccgtcgccggattgcgccgctccagcgacgagcccggggcgcctgggagtacttcgggtccgaagactacatgcggacccatcagggagccagatgggattgggctcctgaggacttcaagattgtagtccaacgggtgctgaatctcagctccgtggaggcgtctctcattcctcaaggaatcctccccctctgcagcgatcccgaccgcgcctccattctgaccattatgatgggggtcggggcctcagaggaggaaactcctaagggccacgacggcgcgggcgagagccgccggggggatcaatctaccccaggagggggtcgtgcttctgggccccgcgtcgggggctcggggagcagccgccctgccgacgcccaggggaagaggaagctgggaggaacacctcccccatctcctccccgagggggcggggcggtgcgtgccagcagtcggcgcccggagggggccgcgccgacatcgcagcccgagggggagcgcaagaagaagcggctccgcaagatgggggagacggaaccatcccggggaaacctgatttcccctcccaagtggtcatttaaccgaccccctcgcaggttcgtcccactcttattgcgaccgtctttcttctatcccaaaagcaagttttctcttacccatcttgtttgtcttctgttttttcttctgcttcagcgatgtcccgtcgcgttcctcccgccatcccaagtccggccagtccgaggccgaagatccagcggccgcagaggcgcggaggcgagaatctgaccggcgagaagccgcagatcgccttcgggaagctgaagaggccgcccgggaggccgcccgggctcgtcaagcggaggataccgctcgggaggaggccgcccgggctcgccaagccgaagaagctgctaaggaggaggccgcccgggttcgccaggctgaggcgatggcgtcttccgaggcagctcacgacaaagctgctggcgcgtcgcttgggcccactccctcgggcgacgctcaggcgacagcctccggggcggctcgcgacgaggccgcgggcgcatcgcctgggcccacttccccgggcgatgcccaggaccaaacgggtccgggggacatccccgagcccagcgcgtcctccggcgggccgagccgcgtcgcattctctccaaggcggctcttctcctcgtcttctgtcgccccgctgagcgccgagccccttctgcaggccttggccgccgcaaatactgcggtgctagatgggttcaacgcccaagtggaggccctgcgagcggagcgagcggagctcgaggccgcatgggcgcgtgtcgaggaggggcggcgctcggtggacgtcatggtggaggtgggccgtaaggctcatcgccgtcacgtctcggagcttgaagcccgcaaagcggcgctggcggagatcgcccgagaggtggaggaggagcggggggccgccctcatcgccaccaccgtgatgatcgaggcgcaggacaccctccgtcttcaacacgggagctgggaggcggagctgaagaaaaagctcgacgccgcccagggggtccttgacgccgccgccgcccgagagcggttggcaacggagatcgaagcggcgtcacggcggcgcgaggaggcccttgaggcccgagccatggcgctgaaagaacacgccggcgccgtggagaagggcttgacggtccgcgaggccgccgctgctatccgggaggcaacgctggcggtgcacgaggccgcctgcgccgaagaggagtccgcactccgcctccacgaggacgcactcgctgagcgggagcgagctctcgaggaggccgaggccgcggcgcaacggctggcggacagcctgtccctccgcgaggcggcgcaggaggagcaggcgcgccgcaatctggaatgcgtccgcgccgagagagccgcactggagcagcgggctgctgacctcgaggcgcgggaaaaagagttggacgcgagggcgcgcatcggtggggcggctgcgggcgaaagcgacttagccgcccgcctcgcagctgccgaacacaccgtcgccgacatgcagcgcgccctagactcatccgccggggaggccgaggccctccgtttggcgggcgagatagggcccggcatgctttgggatgcggtctcccgcctggatcgcgccggtcggcaagcgggcctctggaaaggccagacaatgacgcatcccaccaacctggaaggcctcgctccgcacctcacgaagatggcctgggctctccaacaactccccgaggagctcgagaagaccatcaagtcatcctcgagggacctcgcccaagaagcggtcgaactcgtactagcgagttaccaggccagggaccccaacttctctccatggatggcgctggatgagttccttcccgggaccgaggacgacgcgcgcgcgcgggtccgggatgccgccgaccacatcgtccacagcttcgagggctcggcccctcggctcgcgttcgcccccaactccgacgaggagggcgacgccagcggtgcagacgacggtgacgacgaggccggcgacccgggcgcatcggaatgagcccccaggcccccgccaatctccagtttttttctttttctttcttctaaggccttcatgcctcttttttgtatagatcaacttaatctgcaatcaaaaatgatgaaaaaattctttgtgttaattttattctgctatgcgtatgagatgaggatgatctgtgccgtagcccttttgcatcttagcttgatttaagggctcatgctcaagtcccagccctcaaatggttcgggtcggggctagtgcctggggagatccacatgtcgagactggccaggccgggaacgtggtgaccgagggttatgggtgacccgattgtgggtttttgccgattcccccccggagttcaccacgccccagggcacggctcggttctgggccccgtttggcgattttagctgaccgaaccgagcccccgagggcaaggttgagcgcaagtgaccttaattcaagtcaagattcttcaaaaggaaaaaacggcatagacacagcctttaggaaattgaaaccgcttttattgaaatgctgaaataagagaaataagaatgtgcatgtgtggtagcccccggccaaccctgcacacccgaggggggtgcggggttggcccgagccgaaacctgacacccgacccccccctctcaggggtagaagcgacgaaggtgttcgatattccacgggttaggcagctccgtgccgtcgcccgtggccagccgtatggagcccggccgggggacaccgatcactcgatacggaccctcccacattggtgagagtttgctcaatccagcacgcgtttggacgcggcgtaagacgagatcgtcgacgcagagtgatcgggcccggacgtggcgctgatggtagcgccgcaggctctgctggtagcgcgcggctcggagggccgcgcgccgccttcgctcttccaagtagtcgaggtcatctctgcgaagctgatcttgatcagcttcacagtacatggtggcccgaggagacctcagggtgagctcggatgggagaaccgcttctgcgccgtagacgaggaagaaaggcgtttccccggttgctcggcttggtgtggttcggtttgcccagagcaccgctggcaactcctcgatccatgaatcgccgtgcttcttgagaatattgaaggtcttggttttaaggcctttgaggatttctgcgttggcgcgctccacttggccattgcttctggggtgggcaggtgaggcgaagcagagcttgatgcccatgtcttcacagtagtcgccgaagagttcactagtgaattgggtgccattatccgtaataatacggttaggcactccaaaacgggccgtgatgcccttaatgaatttaagtgcagagtgcttatcgatcttgacgaccggataagcctcgggccacttagtgaacttgtcgatcgcgacatacagatactcaaacccgcccggggccctcttaaacggtcccaggatatcgagcccccagacagcaaatggccacgaaagtggtatgatctgcagggcctgggccggctgatggatttgcttggcgtgaaactgacacgctctgcatcgccggaccagatcgactgcatcattgagagctgtcggccaatagaatccttgacgataggccttgccaaccaaggtgcgcgaggcggaatgggctccgcactcgccctcatggatgtcggcaagaagctcaacgccttgttcctgaggaatgcacttcaggaggattccgttagccgcgcgccgatagagggtcccttctatcagcacgtagcgtttggaaatgcgttggacgcgttcactcccttcgcggtcctcaggtagagtcttatctgcgaggtatgcttggatctcagagatccaagcaatcaatctaagggggcttggagcgctcccttcgggtcccgaggcctggactccgacgggcctcgggggccggtcaggcgcatccgtctcccctaaggggtcgggtcgcgccgacggctgggtaagcctttcttcaaaggcgcccggcggggtctgggctcgcgaggacgcgagccgtgagagttcgtcggcaaccatgttatcccgtctgggtacatgccgaagctctatcccgtcaaaatggcgctccatacgccgcacctggcgtacgtaagcgtccatctgtgggtcagagcaccggtactccttacagacctggttaacgaccagctgggagtcgcctaacaccaagaggcggcggatccccagtccagctgccactctgagtccggcaaggagtccctcgtactctgccatattattggtcgctcgaaagtcgagacggaccaagtatctgaggacgtctccgttcggagaggtcaacgtgacccccgcgccggcgccctggagagacagagaaccatcgaactgcatcacccagtgggcggtgtgaggcagctgtgaggagtccgtgctggcctcggggattgagacggtctctggagccggggtccactctgccacaaaatcggcgagggcctggctcttgatagcgtggcgtggttcaaagtgcagatcgaactcagaaagctcgattgcccattttaccacccgtcctgtaccctctcgattacgcaagatttgaccgagggggtaagacgtaaccacagtgacccgatgcgcctggaaataatggcgcagtttcctcgaggccatcagaatagcgtaaagcatcttctgggcctgagggtatcgggtcttggcgtcccggagggcctcactaacaaagtagacaggccgctgcacctttcggcggggccgatcctcttcgctaggggccgtatccccggggcgctcttcgtccaagtggcctctcggggcgcactcgtcttctgtgctgatgacctcggggtcggaggatgacaggagcggccttcccacagtggcctcggggccgtcttgggggtcaggagctcctggcgtcgtcggacaagcgggcaaagggccaattccggtcgtcaggggcctcaggcctccgttcggctcgggggcctcttctccctgctctctcccgggtcgagtcagcacagggttagcctcggggccaaagggcgacaggtgcggccttcccgcagtggcctcggggccttcctgagggtcgggggcacccagcaccgtctgacaagcgggcagagggccgactccggtcgtcaagggccttaggccaccgttcgactcgggggcctctcctccctgcttgctcccgggccaagtcagcacagggttagcctcggggccaaagggcgataggtgcggccttcccgcagtggcctcggggccttcctgagggtcggaggcacccagcaccgtctgacaagcgggcagagggccgacaccggtcgtcaggggccttaggccaccgttcgactcgggggcctctcctccctgcttgctcccgggccaagtcggcacagggtgggggtgcgcggaatgaggattgtcctcatcgcgctccacaaccaacgctgcactaaccacttggggggtcgccgctaagtaaagtagcaggggctcatttggctccggggtgactagaaccgaggagagctgagatatgccttcaactgagcgagggcacgttcagcttcctccgtccaagtaaacggcccagagcgtttgaggagcttaaataagggtagcgccttctctcccagcctcgatatgaaacgacttagggcggccatgcaaccg

SEQ ID NO: 12352 - DNA, 703 bp, Oryza sativa
ggtggttgtccagttttagcgtggtcacgacgtgacgttcccacgtttgtctcaagagatttgcggtggggatctacatatttggatgaagatttagttgatcacgccaaaaaatcacagattctgatgagctttttttgtcaaaaaagaaatcacaaattgcattaccagtggtagctccggtgccttcttacggaggatgcgccgcgccatgtcagcggccatggggtgcacgatcgccgaccggtcaaacgccggcgcggggggagatggccggccgcgcgccgccgcggaccacgcgtccatgaaccgccagaagctctggccgtatgccacggcgtggtgcacgcacacgcccaccgagacgccgcccccgcccccgcaaccgacgaagcgcgtcacatgcacggcgagcaccggcgcggggagctcggggacctccaggctgggcacgagccgcaagaacaccaggacgtcgagcctctaggtgggcgtccgtgccggcgtgcaaccgtcgaccaccacctacaagaacgcgaccccgtcggcgacgcggacggcgagtggtcgtgtcgtggtgtaaccacgatcgcttcaaccaattcgcggtggggagctacaaatttaaacggaaattcagttgaacacgtttaaaatcagacgacatgatgaattttagccaaaaatgcacgagcgcacatac

SEQ ID NO: 12353 - DNA, 7512 bp, Oryza sativa
tgtcttattctgcctaacttaacactaatatttgacacactatcaattgttagctattgatatggcagtttgacatcgaccctgctccatcattattactgcatgcccgcccattcgatgattgacttgaccaaacccacaagtgcaaattggaaaattaattaattaattaattagcaagataaatatatccatcagggattcaggatcaggtcatggatgtaatcactctcaaacatagctaatcattgtgcttatggtccaagtgatcattccccctaatcaacaactcgcttgctagcaagacgtcccttcgaatggattatttgatagctagagcatatcaccttgcacttcaccactccccttatgcagagtgtacgtatgtctaaccagaatctagtggtgagcgtaaaagatcaaagtgcccttatcaataacaaaatactccgtaatacatttggtggatatataggtatataagtattaaaggaataaaactttcaaatttgtggattctaataaaaactaatattaattttgataaacctgaattgtagatactctaacttagggtagtagttgaagcatgcaaagctctaaaaatatatatgaatttcggcgtgtttatatatatttctccgtggatataaaagcttaaaatttataatcattttatgatgatcaggtgacggagttcagttgcggagggttcgtggtgggcctgatctcggtgcacacgatggcggacgggctaggggccgggcagttcatcaacgcggtgggcgactacgcccgcgggctggacaggccgagggtgagcccggtctgggcccgcgaggccatcccgagcccgccgaagctgcccccgggcccgccgccggagctgaagatgttccagctccgccacgtcaccgccgacctgagcctggacagcatcaacaaggccaagtccgcctacttcgccgccaccggccaccgctgctccaccttcgacgtcgccatcgcaagacgtggcaggcgcgcacccgcgcgctccgcctcccggaacccacctcccgcgtaaacctctgcttcttcgccaacacccgccacctcatggccggcgccgccgcctggcccgcacccgccgccggcggcaatggcggcaatgggttctacggcaactgcttctacccggtgtcggtggtggcggaaagcggggcggtggaggcggcggacgtggccggggtggtggggatgatacgggaggcgaaggcgaggctgccggcggacttcgcgcggtgggcggtggccgacttcagggaggatccgtacgagctgagcttcacgtacgattccctgttcgtctccgactggacgcggctggggttcctggaggcggactacgggtgggggccgccgtcgcacgtcatacccttcgcgtactacccgttcatggccgtcgccatcatcggcgcgccgccggtgcccaagaccggcgcccggatcatgacgcagtgcgtcgaggacgaccacctgccggcgttcaaggaggagatcaaggccttcgacaagtaaaatgcttgtgaaatgtgaactttgttattgttactacttctatgggctcgttgctcaatgggcttttttttgcttttgttttgtgtgtgtgggccgacacgattggtcaaaagggatttggtggaggcccagttgtaataagatggtccacgcatcatggattaatcgttaattgtaaggtagtactacacggatttgttaacaaggaataagttcacttggtgacccagtgatcggaatctaattcatctaaaccgcaaaaccggatatctcgaccctcaaattattgaaaccggtgcaatttgactccctcggcggttttggagggcggtttcgctgacgtggcgctgatgtggcggtattgacctagtatgtgtgctgacgtggcgcttaggtggcatttcaattaaaaagatttacgtgggacccttttgtcatttacacacgcagttgaggggtccactgacatgtggcccccacatgccatctcatccttttcttcttcctcctctcctcccttctatctttctttctccctctcccctacggccgtccgcggggagcgagcggcggcgggcgagggctgaagcaatggcggccagcgggagtttaagcggcggcggcagcggtaggctagagtccatgtcgcgccgctcgccgttcctctcgcaccaccaccatccgcaccacccgacggccggcatcgagatgtcgtcggcggccgagctcccctcaaaacccgagagatgttccgggtgtcgcggcggctggcggagactgcggcgagcggcggcggctgcacggagtcccgagcggcggaggcgcaggtgtggagcggcagccggcgagcggcgcggcggagacgcggatgtggcgacggcgacctgcaggtcgagcagggcgcggccgagctcgccgtaccccgccgcgtgtacctcccaccgccaccgttgtggtctccttcgtcttcgcggcggtgaagctcagctcgggcgccgccgccgcccgcaggcgatcagctacgccgtccgctccggccgcctcgacgggcacgcgctgctcctccttctcgcagcggatattataccccacggtgaacgacactatggacacgcagtatggcgacgagctccaagccgtgtgcctgccggacgcggaggagacggcgtgggcgcacctggaccacggctcgccgggaaggtgctggctattcaacttggatcactgggcgctgatcagcgaagcggcgacgaggcagatggtcgaggacaacgcggtgaaccagtcagccctttgcttgttggcttgccgcttgacgttagtacacacatgcagatgcctcccaacacgcgtgtggtcacgtcgttgtcggccggctcggcacgccgaccgcgtccatcggcggcggcgccgcctcccccgcctgcgccactcctcccgccttcaacgccgccgccgccgcaggtgcagaagaagccaccaccagatgccgccatcttcgaggggatgccgacgcgagtcgcggtggcgagacgtaggcggcccttacacgttcgtgggcgcggcgggagaacagcggaggcgggtgcatcgtggccggcagagagggcgtggagcacagtggaggatagtgcggtcgcggggccgagggtggcgaggacgcgaccgttctgatggcccgttttcttccttccgacggccaaccttccacggcggtctcgatctccgccgccaccgctccggccctcgcccgcacgccaccgtcgccgctctcgggtctccgccgccactggcccccgtcccacactcgcggagagaaagagagagggatatgatttatgtgggccccacatgtcagtgggtcccacccatacttttggtgaatgaaaaatgggtcccacgtatattttttatttctaatgccacctaagcgccacgtcaacgccacatggacagaagaccaagtcaatactgccacgtaggtgccacgtcagcgaaaccgccctccaaaaccaccaagggagtcaaattgcaccggttttaagagttggggggtcgagatatccagttttgtggtttaggaacacggattagatttcgatcacttttgagggtcacgaagtgaacttattccaaacaagaatatcttatcatccttttgtggctcacggtgaaataatgggccgcctatgaggcccaaaaaagattaggcaggttaatggactggaataagttccccggctcccctcccctctccctctccactctcggatcttcctctacctctcaactctcccccgtcctcacggcggagcggcgacctcgccaaggacgccgcgcgcacctccgacgcgagaggagcggcagcgcgcgccggccaacgggagggagggagaggagcggcagtgcgtttgggtcggcgaccggcgggagggcgagagagaaacggcggtgcgcggctgccggcgggagagggttggcggcgcaagctggccgatgggtgggcgggagagaagcggcagcacacgccgcgccggcggagaggacggccgacgggagggcggaagagagggccgccgagcgccgcctccctcctcgcccggccgccgcgagcggcccctcctctcacccgggcaccacgcgccgctcatcccaccgccccccctttgcgccgccgcaagctgccccttgtcgcccggccgctgcacccaccgcccaccctctgcgccgccgctcgccattctataagggagggagagggggctgacatgtgggaccacatgggccccaccttttcttataattttttgtgtagctgacatgtgggtcccacgtttttttattatttttccgggattcatttgccacgtcaatgccacgttggacgaggacctagtcaaagaaagccacgtaggcgccatgtcatccaaaaccgcgcaaaatactgccgagggacccttttttttttgtacggttttgtaagttgggggacccgtcatacccggttttgcgaccgagggacgaaagtcggactgggcgacaaatagagggacctaatggactcgatgctatagcccagtattaaataagccttggctctggcccacgtggaaagggctagattgtaagctgggtaagatgaaccgtggcccgtgggcctggattgtgcatagctacggttacttaacttggcccggaacaaaagtggagattacaccacaaaattaatacataggactcttttggttttggaggggtgatgatgggtgagaggatgcatgattatttttcttataatattcttatacgaaatgttgtcattcttacaaagagggagatctttgcaaaaacaggagatgtacaagctgcaaagtatggtgtgataacaagacgtatattgatgcatgaatatgggaagccaagtggtaggctagagatttaccgttgtctcttagacagaatttatgcctggtcgtagtcgtgggcgtgtgagtgtgctgtgtacacatatgcgtcgctttctacgtaatcagaaaatatataagtatatacccaactgaagtcatgtagacatacgtgagcagcagcagcagcaacgctagcaatacaccattcagtataagccattgggcccaagcagagcaacaagattatcagttagcagcccaatcatagcagaagccagcagcgcgcaggagctgcatcagtagctagctagtagcccagcagcccagatgaactttgatgctttgggaacttattagaatatccgaatatattcttcccagattattatcgatcggctcaaaatatcagatagttagggcagatgtttggaggtatctatatctgtatccaacaagggatcccatccaacaactactccgcccgttatgcatattataggttattttgtgtttattctaagtaaatttctttaaattaaatcaagtttattgtatgaaaaacgtagccacatttataacatcaaattagtttcattaaagtcatcatgaatatatatttttataatatatttgttttgtgttgaagtggtgagctctctcgcttggcaacacgtacccatcgccgacaccaagccctctcctcctctcagccatgcctcatcgaaaggcccaccaaaccacaaagacgaaaacacaattttgtctggacggatgggcgggggcagtgtgcttgacattgtgctgtttttggtgatgtcgccattaacattctttcgtgtgtttgtttggctaccaactgactaattttagtcagattgatggatcgaacagtcacttcgggccttgtttagcaagggatggtcgcaagagtttgggctttttgaaggtcgtcttcggatgggttttttgcgcggcagggataaccaggtagtagaagaccgttctttagtattacatttcttgcaacaaagtttgtttctaacactaatacaaaatcacaaataggggacatactcaaacgtgacagttcatacagcacatacgaggctttttccatcattccgatcctcaagcaggcctaaaatagaaaaatggcactaacaataagtgtcgtcccccgcaaaaaaaaataagtgtcgtcgtttttttaataaacatgcatgtatactttgagatactaggtgaaactccgcgtgttgctgcgggagttcaatatgataacaataagtaaaaataatgtgtaatatagctaaacaacataaacttacataagcactaaaatcaattaatgtgatatggcttaattagaaaagagagaaatatcattaaccaagtgaggatgaacttacataggtacataagatatataaaaaataatgaagatatgtattgaaatattatgttaattatgtgggatgatgatttaacatgctttcattttaaaagctctaaaatgtaatatattttaaattatagataatatagcatgtttgcatgtgatattaaatgtattgattgttagtggatgataatgtgtcaacttgttagtggatgatgatgtggcatctttgtatgttaagctttaggagttagtgggttataactttatagtaagataggataagtgccctttttttttaaaaaaaaaatacttttagtgggagctaagccaagccgatgccaatgtcaagcgtgcgtgaagtaggcgtccttatcctcccatagcgtccttatcccctcggtcactccatctccttagctctgcatcttccgtctctgttcatcttctcggcatggcatggcgcgtcagcggctacctcttcctctcctcagccttgcgtggcggccactagattcagctagcacgaactcgaggacgatcatttccggccaccacaagctcgggacaacaaaatccatgtgcggctgcctcttcctctcccttgcgtcgcgtggtggcatccgcctcatcttctccccgacacggcggcgacaatggcctcttcctctcctcggaccagcacgatggtcatcagatccagctagcatgactccatggcggagatcaggtagacttctaattggagtgatggaactattcatttgtgccaaaatttgtaatcaatttatgtgaattgtgatgtatgattctttattttggtgggggtgttcttgttggatggattgatggtgatttgtgttgtgtgatttgtgcggggatattgttgttggatggatcaatgatgctatgtggataaatcatgaaggtgttcttcaatgtggcatggtctgtgggtgctaagtttttctttttattcatggaaccttaaatgtatcggtttcagaatcgacacctttaattttacctcatcagtaccacctaagaggtgttgatggaaaatttggtacttatgtggggttcccaactgacacctattattgttctgtagtagtgtaaataggcgagtgatatgcttgatgaact

SEQ ID NO: 12354 - DNA, 19640 bp, Oryza sativa
  unsure (1)..(19640): unsure at all n locations
aatatccaacctgtttacattccttgcactattggtgaaagctatataggagtacatgtaagtggctagacgcactaaggatattgacgtcgaatttggtatcaaatccagttactttgcacacgtccatatgcatcaacaaattagctactagcattttccactagacaatctatgggcgtggaaatgtggaatcgatcagcatgatcaagactagacaggacagacgaaaacgacctgcacgatgctgctcacaacgacaattgatcgtgttaatcgcgtccattgtcgatttatcgatttgcttggtttcccccatcttgctacaatgcaacacggacagcaagtcagcatccggtgtgtttcattttttgttgctgaagttttcagcatgacgtaccaaaccaaatgaatgaaaagatgatcatcaccattctgatctagcttgagttgctcagaagcaacaatcaatcgtacgtacgtgtatgcatggaatggaacgcaactactcgtcggacactgattgccctgatcgatcggcatgcatatattcatggctttttttttctgttgcgcatgctagcttgattatattggtccacactaaaggtcgctagctgcatttgcatgcaaccaaccaccctgcatatatccaagctacatgtgtgtactgtacctaaagcagagcagagaaactgaaaaaagggaaaaagagaggacatatgcatatatcatcagggagaggaagaaagaaaagcaatgctaacatatctcaaatcattagagagtggtaggtagattattattcactcacagtcccagttcgccattttctcccccacaaaagtctagctcttgggctgactactaacagcacaaagtttgcagctagctcaagtcgtaatcacacattcacaacgctattagaactagctagggtcgccaatctcattcagattaatggctttcgcctacctacatgaatagcactagctccagggttcagacgattcagcggctgatacagctaggtcaatgctgagcagtgacagttttgttcttggcctcaaaaagcagctccaactttattgactactaaattaaaacgcgaacacaaaatggcgatatatatgacagtctagagacaacagtgacactaattttggtaggtataggtcaccgatccggccatgtcgcgctcgcaacaggaaaattcgtgtggattatgtcgctgaacgaagaccggcgatttgttggttggatttttttgaacgatttgttggttggattttggattggatggtgtgatttggagatgcagtcattcaaaagtctgaggcttttcagtttgtaatctctcggtcagtaggtaagcaagccatggtgttagtgaccaatcgatccctgccaaattgatggaatctcgttttcagtttactgagccgaagcaagtaggagtaggagtggcagtggcaggttgtctatgcgtgtgggtttatatgatttgaagctgtcatacagtgaaatttcagtcacagtagaactttcaggtttagtggatcgaagcctgacagtttcaataggctcagcatgttgacgatattttttttaagaaaaaataaagataagtttagaagacttgaagaagacctaatactggatttcagaaaagttggatcggttttccgtaagttttaaaacaatgaaatctcaggaagcataacaatgaaacgtgagatttagtaaaaaaaaaacaagagagtagctatatttatggcgccatatttttcaccaaaaaatagtcggttttacattgtaagtttacaaattacattgtaattttagtgtatttacattgtaagtctcaaacttacatacgtaagtcccaaaaatacatatataattttagtctatttacaatgtaaatctcaaaattacatatgtaagttccgaaattatatatgtaattaatatataatcatcactcatcatgatgtatgatgtatgtgatgtatgtgtggaaataatcttcaacctcacagaagcatagttgggaggcctcaagcccgtgcggttgtgaggcatagcgcataaacatgtaaaccgactgtaatcaatggaattttatggtgccagaaatttagcaaatccgaaaaacaatgaaacgtgagcaaaacatatagtatgcttcgtgtacttaactgttggaggtcacctcactccgtccgacgttcgtccatatcgtgggtcgtgttggatgctgaaaatgattactactacatcgatccctcttaaaatataaatattttttattgtacatggatattaagaaagtaaatggaatgattgggaaaggttatgattcgtcacgcacatccaagtccatgcttttggacacgtcgtctccaattgcattaatacaatgggacgttgtaatagaatctggagttaacgcaatggacagacccatttcttttgccattccatttctcttgctgatcaaggaggtcgtgttcaattatcagattggatcgtggtgtgatttcctctgtctgcttcacgtagtttcaagcctagaccatgctatctccctatggataccgtgtcctctgtaggacacccctgcaagacacaacccctctctctgctccactcgaactcgctttcgacatgttgccatgaaaccacacgatagcgacatagcgtggaccatggttcatgcttaaacggctagagcatattcaatctgattgtggcatatgtcatgtgcacgtaaatatgattgcagacatatatcacttctacagaaacgatttttctgtacgagaacctctttagattgtaggcagatcgtaactgatcgcgtctgtaaaaatcaacctccattttcccatacggctccttgagagttccacatgaaaaaaaaaatctatttttgtaagcggacctcttaaggggccgtatacaaaaataagcatattttcgcatacgagctatttaagtaatccacatgtgaaaatacccctctcctgcacaaattttttttctccccaacactctcttttccctctcaatacttcaaattttatcatccttatctcctcttcctcccctctcctcatattaatttcttctctcatttctctcttcctcccctccaagcgggagcgggcggcggctggctcggtgacctcgggcggcactaccgccacagccaacgaggagcgacctcgtccctgcccggctctgccaccgccgatgacgatgaggaggcggccaggagtggctccatccccgtccacgcctggtgctgccaccaacgacgacgaggaggaggaggaggcggccaggagcggcgccacctctgctgacaataaggcagcccgatccgtcgccgccgccatcggtgagctagggttacgattttttttattttattttattttttgagatttttcttttggatttttgtttttgtgtgcaacgacataagcactcccgcataaaaaaatcgctagtaccgcataccttttcggcagataggctgcccaaccacatataaaaataggttttgatcggaaaatgcttttttcagtagttatatgcttccgttgcgagctcatggtgagtttggcaaagcccaagcgtagagtgtgttagcacacaaagttgcatgggttttatcatcaattcaagtcgttttcgttccatttaggcaatccaaatatattcatgcatgttttcggtcgcttttcacagtcttgctagtttagcttgctcaaaacaatggcacaccgtatatatgcgatcgagtcaatgaagtcgcacatcgtatcatggcccacttttaagtggattattaatattagtgtagtgaattatctacactattatagatatataaattaaatactactttaataaataaactaaataaataagtttgaaccaaaaatctaataagcaatacagtagaagaagagatttgcttttaataacatatatttaccggattttacaaataatccgcgacaataatcaatctgtccaaatgtataaattgttaaaagatcgaccgatcgatcacacgattaaagtgcgagagagctttaggcgttgtcctcccttgttccggttgccacaatccatggaagccatggctggaagtatctccagtgacgatcttccacaggatggttttcggattatctacagatgccttcaactgggagtggggcagttatatgcgacaagaggttgcgccggccattggcttcatctccggcgacctaatcgcagggctactgatctccttccatgtcttcggtggtggttcttcaaggggcagctaagttttcctggtttcactaaggtaacctcaacctccaaccaagagggcccttttggatatgcatcttggtatcttacagcactgatttcttcatcactggtgctgttgtcatcaatctgatctccagccatgagcaagaagcatagggcctcaacttttcacttatgcttatacttatcagccaaaatttgaatttttcaacctaaaatttggatttgattttggggtttttttcatcaaagtttatttttcagcttttatttttaggtcgctaaaaacacgtatataaaagttttattcgctaaatgacggggccaaaagagaaggacgggattgcttttttttttttactttttattataggagtcctactttattactttcaatacttaatgcaatttgcccatcttgaaggggactctttgtaaaactgcctgttcttgcagttggttatgaatagtactcctacacctcaggttgtgttaaaaaaaacaagaagaagaagaagaccacgcgatgtcagtacgagatccgttcttagtctgaactctgaacggagtaagaattctaagccatcaacgtctcagcattcagcaattgcagctttgcaagccgccgttgcgtgatgaactcgtccgttccgtatggggaacatgtactgtatagtactcacctactaccaacgaacgcatggcccccatgccaatcagaatctcaaaatctggtgaaatcattggagacgaaagttctggactaataaatcgctgactacgaccaacgtgctccgagactcggaatagagtccagttgaatcattagacctctgtttaaatcaactctaaaatttttcaccatgtcatatcgaacgtttgaacacatgtatgaagtattaaatataggctaaaaaataattaattgtacagattgcgactaatttacgagatgaatcttttaaacctaattgcttcatgatttgacagtgtggtgctacagtaaacatttgctaatgatggattaattaggcttaataaattcgtctcgctgtttactgacggattttataattagttattttattagtgcccgagcaccctatgcggcaccctacatgtgacacgccaaaactttacatcccagaatctaaactagttctattagtagtatgggaaattttactacaggaaattgtgacttcgtggttttagctgcagggcatcgcacgaagtgacttttgggggaatacactctataaatgtggtaatttgcacccattaaaataataattttccgttaaagaagagagagaaatcgcgtcaaatgtcagaaatacccacatgtcaggtctcccatctctcttctctctctgtctcctccttccacaccgcgccaagaccgacaccgccgcagtgttcactgtggaaggcatcggtgtacatcctgggcgcggcgggtagcaatatcgtgttcatggcggtgctaagcgatagcgtcgtgctggcggtgcacaggatcaacagtgacggcaccggcgcgagtcggtttagcgagttcaacgcccagatgagcgccnnnnnnnnnnnnnnnnnnnnnncagctccatgttgcctccgcccgaaccaagcacgtggtaagcctccccatagtccataggccctcccttctcctttcatcgagccgccatccaccatagccatatcaccaccgccatcccgaacccacttccaccgctggcccatggcactcgctgcctctagccatcctcggccgcgtcgccgcctctagaaggtgcgggacgacccactctatctgtcctggccttcggccgagccaccccctccaccacccgtcaccggtgggctcgtgccgagtcgtcacgcttgctcaccttccatctctcggttggaaggaagaagaaagggacctttttgtaaaaagcgtaaatcccagggttcctaatacaaatgaccgaaacacttactcgtgggaccctagacttatatgcaaataaagaaacaattagggttcgagttataaattgcgatgggtaggagagaaaagagatgagagcgctgacatgtgggtccaggggtatttatgacagttcacgtgattttcccctcccttttaccggaaattattattttaatgggtgcggtatccactagcaaattacaacgtttatagagtgtcttccccaaaagtcacttcgtacggtgtcctacagttaaaaccgcgaagtcacaatatctggtagcaaaacttgcctagtagtatctatctcctttagagacgccggctgatcgacacaagagttctttttttttcatcttgagctacactggccagggccggcctttgggtattgaagatgggaagaacaaaggatggcatgatcgattggtgtgtgtactggtttttacaaattaggtcctatttagtattgtcggagatatgggcccgggggtgtgcggagtgagggaaatttaccttcccatcctgccgcgtggccctacagcttgaccctacccccgcaccttgtggatcgcagaagtagccgaggggcctcgaggtgccacatcatgcccctcgggccctcgcgacgttttgccccgaggcccccgcccggctgccatgtggcgggaggagcaagcggggaagggacccaggctgtaccgctttcaatgcgtgcgacgccccaactgcccctcgccgcattaaatgcggtaggggcagacgtgcggtgccgtccgactgacgcgcgtcagtcaggaatgactggtctgtgaccggcctgtcgtcggtcgcatctgactggacgggcgaccatgccctcacgtcgcctttgttcccggcggagtggaggtaggtatgacccgtcccatcagagcatgattcggagctccctctacgagaaggacggtcgccacaagtcttcacacatttatgagggaatgacaggactgtcccccgtgtcaggcgggagacggcgttgggtctcactcaaggacgagctgcggcttagcttccagacgaaggcacggatcgaggtctagtcaaggtagggtgggtaccccacccggtagaagagtaggtagaggcggtgcatgtggtatccccttgagctataaaaggaggatcttgcccaccgagaaagaggatgactccaagcagacctaagctctagggaaaaagagacgagagcattctccggagcttagggacccttgtaacactcaaccataatccctcacataggagtagggtattacgctccatagcggcccgaacctgtataatcctctcgtctacacacaactagtaacgttcagggcagatactcgatctctaggggcgagccctttcccccggccgaactcacaaaaggggatctcacgatctcccgctagagaggttcactcctcgacagctggcgcgccaggtagggggaaatcgcgcgcttccaagggaggtcgtttccttccgccccaagttttcctccgccttcgacgatcatggtcgaggttttggaggaagaggtgctggtgcacacccccgctccctctaggagtgaagatgctagcgggagtcgcagcccccgtcaccgctgccgcaactctcggactccgccccgctgtgaccccctgcggagagaggatcccacccgatagggtggcttggccctctccccgcctccagacggggggcggccgcggctcgtcggagcgcgccgccgcctgacatatggcgacagcggctcgccccgaggtgcgcttcaggtggcaggagcccttctacggcatcctccggtgaacgcagagccggaggcgtccaacgatggttggacgacgtcgccaacctggtcaccactgctcagcggcagctggctgcgggtggccgttccaccgccactggtacgtcacgtacctccaccgccctctcatcggcaaggaggagggcccgtcggacggccccaacgtcatcaggggcctcgggaagtcagaggcatcacgatggcctctacgtggagcaggacgctcgaatcaacatcgagtgtcgccgggacaagcgccgcgctgcccgcatgggagaaggcgcctcctcgtctggagtgccgcgttcctcctcgcgaggcggccctcccctcacatccacccctagagggactggttgcagggccttcgtggcgagtctccggaatttccggtggccctcgaagtttcgccccaatctcacggagaagtatgatggcagcatcaatccctccgagttcctccagatctataccacgatcatcgtggcggcggggggggggggggaggggaagagaccgggtcatggcaaattatttccccatggcccttaaggatcaggcgcgtggctggctcatgacccagccccccgactccatccactcttgggaggacctgtgccaatagttcgttacaaacttccagggcacataaccccgcccaaggaaggaggcggacctgcatgctgtgcagcggaagcacgatgagtccctccgctcgtatatacagcgcttctaccaggtccgcaacactattccgtgcattccggcccacacggtcgtttatgcattccggaacggcgtgcagcacaactgcatgctagagaagatcgccaccaaggtgcccaagaccaccgccgagctcttcgagctggcagacaaggtggctcggaaggaggaggcgtgggcctggaactcccccaccaccggtgcggcggctgcggctgcccccgaatctacttcccgctccaagcggcgggataggaggggcaaacggaagccggcccgctccgatgacgagagccacgtccttgcggctccgcgcaagaagaaaaccactgggaacaagccgagctccaccgctccctctagtgagggtcggtcggcggacaagtagtgctcggtgcataacacttatcggcatagcctcgccaactgtcgctcggtcaagaacttagccgattggtttcggaaaaccgatgagaagcggcaaagtcgacaggagggcaaagcccccgcgacccctgccaatgaccggcgaggagaggccaagaagaagcccccgccgatgacggcgacagtagcgaggatctggaattccagatacctcaggaaactgtcgccacactcgacggggggggggggggggggcttgcgctcacacctcccgccgcagtttcaaggccatgaggcgcgagcttctggccgtcgtcccaactcatgagcggcatggaacgcgcgctggtcggaggtgaagctcaccttcgatcagagcgaccatccgacagtgctcgctcggggtgggaagttggccctcgtggtctccccggccatccacaacgtcaggatgaagcgcgtcctgatcgacgggggggccagcctgagcatcatctccccggctgcctttgacgcactcaaggccccggggatgaagctccagccgtctctgccaatcatcggtgtgaccccggggcacacgtggcctctgggtcatgttgaactcccggtgaccttcagcgactccaacttccgcaccgagcggatcgacttcgatgtggcggacctcaatctgccctacaacgcgatcctgggcaggcccgtgttggtaaagttcatggccgccacccactacgcctacctccagatgaagatgcagggccctagtggccccatcaccgtctttggcgacgtcaaggtcgccctcgcctatgcggagcagcgtgccgacagcctggcggcaagtacagagccacaggccccggaagcctccgcgccccgcgcttccaagaagcgcctcacctcggccgacgaggtgcccgtcaaggagatcccccttagcgatgatccgtccaagaccgccaagattggcggtacattggacgccaaataggaaagctcgctcgtctccttcctgcgggcaaactccgacgtcttcgtgtggaagccgtcggatatgcccggggtcccagcgaggtgatcgagcaccgcctcgcagtgcggccagatgcacgacccatccgacagaaagtacggcgctaagccccagagcggcaagccttcattcgagaggtgacgcggctcctggaggccggcttcatccgagaagtcatccacccagagtggctggcaaacccggtggtcgttccgaaggccaacggcaagctccggatgtgcatcaactacacggacctcaacaaggcatgccctaaggatcccttccctttaccacgcatagatcagatagtcgactctactgcagggtgcgacattttgtgtttcttggatgcctactctgggaatcaccagatccgcatggttagggaagatgaggaaaaaactgctttcattacgcctgtaggcaccttttgttatacaactatgccttttggtctcaaaaacgcaggtcctacttttcagcgcatgactcgcattaccttgagtaatcaaatagggtgtaatgtagaggcgtatgtcgatgatctggtggtaaagacgcgccaccaggacacattgttgcaggacttggctgaaactttcgacagtcttaggtctacgcgcatgaaactgaaccccgaaaagtgtgtgttcggcgtgccggtgggcaaactcctcgattttctagtctcatcctgaggcatagaagctaatcccgagaaaatacgtgcgatagagaggatgcgcccccccagcaaactcagggatgtgcagtgcgtcacgggatgcatggccaccctaagtcgattcacatcgaggctgggagagagggcgttgcccctgttcaaactcctcaagcgtcctgggccgtttgtgtggacggaggaagcggagcaagctctcaatcagctgaaagtttacctcacctccccccatcctagtagccccggggcccgacgaaccgttgctgctctacttgggccgcgacccccccacgcggtgagtaccgcccttgtagttgagcgcggcgagggtgacccgcttcgtgaacccggccatgggaaggaaccaggggtccccttaactggtgatggcccctcgtccccccacggctcggagcccaaagcccccaacccccgagagggcccctaggcccccgtgggaggaagagaggctctgacggatggccccaaggcctataacccagagatggcccgagatccccccgaggcccctgagcatgggcgccccgggccaacagcccctgacaacaaggaccggccccatcgaaaggtgcagcggcccgtctactttgtcagcgaggcactccgagacgcgaaaacccgatatccacaggcacaaaagatgctttacgcagtcttaatggcctcaaggaaattgtgccattacttccaagcgcaccgggtttcagtcgtgacatcttaccctctcggtcaaatcttgcacaaccgagagggcaccggtcgggtcgtaaagtgggccatcgagctcgctgaattcgacctgcacttcgaaccacggcacgcgatcaaaagccaggttctggctgacttcatcgcggagtggacgccggtggacgaccctgttctgtccaatcttccctccctccccggaggcggaggagacccgaacgccgacattcgcgccgggcactgggttatgcactttgacgactccctcaacctccatggtgcgggggccagagtcacgctgacttcaccaaccggggatgtcctcaagtacgttgttcggctcaatttccgagccacgaacaatatggcggaatatgaaggactcctcgcgggattgagggcggggccggaaagggcatccgccgcctcctagtcctaggcgattcccagttggtcgtaaatcaggtctccaaggagtaccagtgcaccgacccgcaaatggatgcatacgtctacgaagtgcgacgcatggaacgccacttcgacggactcgagctccggcacgtgccccgacgcgacaacgctatcgctgacgagttgtcgcgtatcgcgtcgacacgagccccactcccttcagggaccttcgaggaaaggcttgcgcagccgtcggcgaggttggaccccccgagggaacccggctccacggcctcggccccgacccctgacgacccgcgggcctcggggcccgagggggtcgatcccaacccccctcgtcaggtcgcctggatgtctgacatccaggcatatctcgacaataatactcttcctgaggatcgcgcagaaactgagaagcttgcgtgtatctctaagcggtacgtgctcgtagaagggaccctctaccggcgggccgccaacgggatacttttgaagtgtatttctcgggaacaaggtatcgagcccattgctcacgctcatgagggtgagtgtggggcccattcggcctcacggacattggtcggtaaagccttctgtcaaggtttttactggccaaccgcgttgcaagacgcccaggaatgggttcggcgatgcaaggcgtgccagttccacgccaagcaaacccaccagccagcccaagccttacaggtcatcccgctctcttggcctttcgcattctgggggctagacatcctcgaacccttcaaagcggctcgaggcgggtatcagcacctgtatgtcgccatcgataagttcaccaagtggcctgaggcttaccggtcgtcaagatcgacaagcattctgccctcaagttcatcaggggcatcacgtcccggttcggggtgcccaaccgtatcattacggataatggcacccagttcaccagtgagctgttcggcgactattgcgacgacatgggcatcaagttatacttcgcctcgcctgcccaccccaagagcaacggccaggtcgagcaagccaacgcagaaatcctcaaaggactcaagactaagacgtacaacgtcctgaagaagcatggggatttgtggctcgaggagttgccgccgcgagcagtcgcgcttagggctgagcaagctctcaccaatgtgggaaggaccatacaaagtgatcggcgttccccagccgggctccgttcggctaaccacggaggatggcacggagttgcctaacccctggaatatcgaacacctccgccgcttctatctatagcgacgcaattttttgctttctaggagctcgggccaacccccgcacaacccctcggtttgtgcgggcttggccgggggctaccactgtcaattactttgtaactttttccctttccaagcaataatttttttccgcttaagcggaggccgttgcacgccttttcttactctttcctatggcacgtcctggtccaaaggatgattcatgtttgctccgagccctacgtggcgttgggtgatccgaaaaccgccgaaagggagtccaaacgcgggccgtgccccgggctgcggcgaaccctgggggctcagaagggcctacacacggtcatccccgacctccggtcgtcgcagccttggtctggccagacccgctgggcggctccctcggggtaacgatcttacccctcgccacctaggtcccgcggaccgaacgcaaatttcccttttcaccagaacgagcccgaagggggggtacaaagatggtaagaacggcgacccaatcacagggaagctaactggatatatccgcctttgtttttttttcttcttttcttgccgcaggcattcaaaggagaaagcaagagtgcaaaacatgcgaaggggaggctttatttacaaacagggtggtgcaatggccgaaagattagaagcgttcactgcgagcacataacaaaataagagaagaaaagcagggatagtcacggagttcccaagcccccgaggccggcgccgctgaccacatcgtcccagtcgtcgctgccaccgccttcacttccgctctcctcgtccgaggtacccgaaggtgaaccgaggggccgatccctcgaagctggagatgatcgcgtcggccgcctcccggacctgctcccaagccctcgcctcggtccctggggggaaatcctcaagcgcacgccatgggactaagtcggggtcacgggcttggtggcttgcgagaactaattccaccgcagccctcggaatcgcccccgggaggggcactgccgctgacgctccccgcggccggttgtacctcggctgtggcggattcagagccggacccggcgtgtggcccgtgggccccgccaggatgctgcgaggactccatggcatctgatcagccgggaccaagccgatccgatcgctcggatttcaacccctgtgagggatcggacgtcgagaccccctgggatggaatctcactacaggagagccccgatcaagttaaaaaaaagagagaaagagaaagagaaaaaaacaggaaaccgaagtggatgaagagcaccgggttggatgctggcaatcgaacctgcgagggggccgtttgaaggtccactttgggggctcgatgaaactcccccggcacggctccgtttgccctatcttccggagccgcttcttcttccgtccgaccccggacgcggcagggcatttgtggcccgccggtggtcggtccgccgttcgctcggcgccccctccatgcggtggagaaggcggcccaaactcggacatttttcgcttccctttcgggtcgctggccgaatctcccccgggcccacgattaggaccgggcgccctggagccgtcgcccccgctggagccgccattccgaccgccacctgcggtcgcaccactgctgcccgtgccatcgccaccaccgccagcgccgctccggcgggaccgacccctgccagcgccgacgaccgtcatcacggccaggatactctcccggtcgcggtcgctgcagaggggaggatcccatctggaatcagtgtttgctcggcgatgtccagacccagcactcgccagatcaccatcttcgcgccctcctcgccctagtcccagcgctcacccacatgggtgcgcatgggatcgttgggcccagtgtactcccatgcgccacgggaccgctcctggaggggtgcgatgcggcaatggaagtagtcaccaaaaaccatcgcccccgttaggccctggtttcgcagacccctgaggcggtcccgcactgcgtcgtactcctcgcctagatccgaaaccgccaaccatgcggtggatcgctcggaagggccagtagggagccgaagtcacggatggtccggcagcacagtatagaaccaatccttcttccaatcctcccacttcttgcggaggtggctctcgatgtattgccccgccgtccctggccggggctagagatagcatccacccaccaccgcaccctgctacagctatgggacgaagaagtgctggaacagccgcattgtcggccgcaccccgatgaacatctcgcacaaatgaacgaagatggccaacgtcattacggcgttgggtgcgagatgcaaggcatggatctcgtagaaatccaaaacctcatggaagaacctggagaatggcgggatcaaccctgccatggcaaaggacaggaggtgcacggatcgctctgggtaccgcggccgcggccgcgactcccccgccctcacggcagtgtcctccggcatgatcttgcgggggaggctaaggtgcctctccgccgtgatgcgcgacgccgggagcacagcgtcaccagcgtcttgggcgatgatgactggtgatgaggagctcggtgtgcggagtagcgaggagcggcaagagtgttagggcttggggagcgagtgtgcgagtgagcagtcggcgagaggaagtaggcaaaatttccacctcctatccttttatccctgcctcacccgcgcttgcctcctcgtttcacgcccccactattgcccccacgattctcgcgcatgtggttgcctcatcgtttcctgcatccactcatcacgtcgcccactgaatccgcgccccgcgtttagtgcgcctgtcagcggcacactcggcgcagggcgtgcaatgttcacgggtgcaaactaggcaggctcgccgtcagttccatcgcgtgcaaggcgggcgagggagtcgaggcgtggtcttgccgaccccccgattttcgcgccccaagcgcccccgtcgtcagcgcggttagtggcggtcaaatcgccattatggctaatgcaccagcctgacagctcggcggcatctgtttagattccccaccgggcccacaaccacagcttgggaagtcgtgaggcgccacgtcagactgtcctcaaggggccaatgcccgacgtggtgtcgggggctactgtcagagatatgggcccggggtatgcggagtgaggggaatttaccttcccatcctaccgcgtggccctacggcttgacctacccccgcacctcgtggatcgcagaagtagccggggggcctcggggtgccacgtcatgccccttgggccctcgcgacgttttgccccgaggcccccgcccggctgcaatgtggcgggaggagcaagcagggaagggacccaggctgtaccgctttcaatgcgtgcgacgccccaactgcccctcgccgcattaaatgcggtaggggcagacgtgcggtgccacccgactgacgcgcgtcagtcaggaatgaccggtctgtgaccggcctgtcgccggtcgcatctgactggacgggcgaccatgccctcacgtcgcttctgttcccggcggagtggaggtaggtatgacccgtcccgtcagagcatgattcggagctccctccacgagaaggacggtcgtcacaagtcttcacccatttatgagggaatgacaggactgtcccctgtatcagccggggacaagcgctgggtcccactcaagaacgagctgtggcttagcttccagccgaaggcacggatcaaggtccagtcaaggtagggtgggtcccatacccggtagaagagtaggtagagccggtgtatgtggtatccctttgagctataaaaggaggaccttgcccaccgagaaataggatgactccaagcagacctgagctctagggaaaaagagacgagagcgttctccggagcttaggacccttgtaacactcaaccatgatccctcacacatgagtagggtattacgctccatagcagcccgaacctgtataatcctctcgtctacacacaactagtaacgttcagggcggatacacgatctccaggggcgagccctttcccccggccgaactcacaaaagggggatctcacgatctcctgctagagaggttcactcctcgacaagtatagcttcggactaaaaaaattttgaagccgagtattcctagctttataaatctatatatctaactttttttattacgttaataacatttggatgaatcattttattcctattttagataaaaattaaaatatcaaaccactgtaatttaacatatcaaatctagcatagacataagatatagagttgtgccaaataggacaatagaaagcaatcatcttgaatgataattaatcatgccatgttaacttggttgcactacgactacgttttcatcttcacaaacatcttctttctttttacaaacaggctaaagaaaactcgtatgtaaaaagatttaggagtgacccatatacgaaaattaattttcacaaaaaaaactacttaacaggtatatatatgaaaatatgtttatttttatagacgggcatgctaaaatgctaacatgcccacatgtgaaaatagaattttcataattagtgaattttcgtccacatgagaaaaggagacatcgttttcttctccttttctctcagtggcaagtcctgaagtgatcctctccttcttctcagtcctctctcacccaccacctctcctccccatcttcacccttcccctctccctcatttcctctttctcccccatcacttctctcacccagcggccaacgatggagcacccactacaggagcatcgctgatgaagcgcccatgacaagagcggccagcgtgcacctcaacacctcctcctccaccgccggttgcctcgcggcggtcgaagccagtgtcggcgtccctacgatgtcttctccctcagctcctcctcctctaccgctagtggctccgcggtggccggatttgccagaggtggtcccgagacgagcaggccgccagcagcagcattgaagcgatggatccgctggcttcagctggcggcggtggggtagcagcggatctggctagtggatcatgggctagggtttctgtaattattttgcatgcgggtgacttagcatgcccctatgcgaaagtaggtttattttttacttggttgcggtacccgtatgggataattggcatttctacatacacctagctagctgacggctgacgctaggcgatccttccgtccctatgaaaaagtgattctgcttgtttagaaaaagcattaatgtagtagcagtagtgttgacccattcatgcttatattactctctgctccagcaatgaagcttaaggggaaaaaaggaaaggagatcaagaacttgtgctcatctaaaagttgtgctccagtggaagccagcaggtaggttctccgtattcaactgtacacagaaatcaagacagacaagtgctcgtataaaatgagcagaagttgactctagaatgtgactagatgcgcggtccgatccaatcatctcgtcagatgaccaaagaagaaacatgtctcactaaccaagataatttgtcatattcgtacgaattatctatacctttctgacgtgtgtcttacataatgctactagatcagatctggcacataggctgtatttagttcacactgaagtttgtaagtttgttgaaattggtatgaagtgatagaaaagttatgtgtgtgtgaaagttttgatgtgatgaaaagttaaaagtttggaaaaaaaaactttaaaactaaaccgggcctagtaataatagaactgttctgaattttaacgctttagtgcatttttaaaaaaatcattttataaatagattatgtgtaaactaattccaaaatagctaacttacgacctcaacgacgacacatttctgacaatgacggggtggatgactagctacaattaatttttagtggagtctattcgcgaaacaaattttacaaaagaccaaatgtcaagatttttgtccattcatcttatactagattgaagacatgggaattttttagcgtgagtagtgtagaagtccaaagcacatcaaattagcattatactactgccttcgtccatgata

SEQ ID NO: 12355 - DNA, 5260 bp, Oryza sativa
caaacttcacgacggcgttggcggccgccatctcgtccgtcgtggcgggaggggctcatcatcaggctctgtccaccacaccccgtggcagcgccgccggcgccggagacggcaacggaaacgggagctccgccgcggcagtcgccaccggcgccgcctcgccggcggcgacggccgaggcacctgcggcgtccggatcacctcctcggctcgcgacgcagtcctgcaccacgtcgaattgatcgatcacagagacatacgtgacatatatcatatactagtatgaatcattcatgcgtgcacgcatgcgtgcatgacgcccacacatacttgacatacataccgttttttgttttgagatttgagatcgatacatatacttcttgtattatgtacagtaaaacgtatggagtaaatagtagttactagtagatgaattgattatatacacacagagttactgagaaattaattaatatcactgtcttagtgtctttattaattaggtttatttcattcatattggggaatttcctacaacatgctacaagcattgctgtacggtactgacataaccgactgagatgcaaacgttgtttagtggactgggccagctcagttttcggcccacactacgaacgcaaatatgcgtccaactgatcaaattaattaacatggacgccgttgatttcgatccatgatctcccttaggctttgttggggaacattactacaccagcgggcggacggatggaaggcaccgccgagatcgagacgcgatgaatcctcttctcattttaaagtccaaatataccccccaaacttttggttgaatttcgtctaccaccgtgaactctaaaaccggacatgcaaccccgtaaactttgtcataccatccatattatcctctaagatggttttgtgaattttgaaagcttgaacgaacaattttcaataactaatataacatatttgcatattatcaattacaagtaatcaatttattcgtatacagtgatattataatattattatgttggcatttatttgaaaatgagagctaataaggagaaaaagaaagacttaaatcaaaattttaatatatgtgcctaaagtgtatgacatgtgatcaaactcatctaacttatatacaaattagataaaatcactatgcaaaaccatcttaggggttatataaacggtattgtacgtaaagtttagggggttgaacatctgatttcaaaattcagggtgctagatagacttccatataaagtttaggggttatttggactttttcctttttcaaataaaaccgaccgaaagggagctaggcggccgcaccaaatgctggaagttcaggtctggtcggggttacaaacggcgtccacacctggacgctacaatagccagcatccatcctataattaaaattttcatatatgatttactacatatttgtaattaatgggttattaattatctctaataatataaaaagtacccgttcatcaaacacaatctcttcttccattcgcccagctgaaagttcgttctcctgcgcctgatttgcattcaagagacttcattaccctgtcttgtcaaacccaacctctagccgcacccgtatccaatggcattcactctccacgtctcaaatctcctttctgccctcccttgcccttgcccgcctttacttggcttaactcccctaaacctaccgctcactcctttcaagctactcttcttgcccacccaactcccagtctttttcctcctcgccctcaaccctcgaaaaccaaaaccactcgccccaagcccatgctggatcgctgcttccgttatcctgctcgtgaccactaagtcaagaagtgcagagactcgttgatctgcgctgcttgctgcctctcctggcaccgacaagactcctaccgatcttctgtaggctcaaactccactcccagacaaccaccttccttccccagcctccgctcgtgccacctagcatcctttgccgctcattgggtgcgcaaaacctcctcccagaaaccccacaaaacctcgcttccccactgccccaggggaggaggtagagtatgggaggggagtacccaggaacctcgtcaagaaatatttttagctatacatcacctattttcaccatatgtacacccctctcaatacaaatttagacacccgcatcaacttaaacttgatctaaaatagagtaaatcaagcaagaggcaccctcctccatttcgttctagctccgcccctgcactgccccttaccctagctccaccaaaaccctaatggcggacaaggcagtgactgcatcagatatggcggtgatccctctggaagtggtcattggtctgcttgaagccagcctggcgaggggctccccccccccccccagctactgacggcctgtctgctgctgctagtgcgacggctgaactcacctcggctgtccccatccccgcgccttctactgctaaagccctagcgcgtcggctgatggtttgacggccgatctccccactggctcttcccagctgggggatttgcctgtcgtgcctgcctctctgaccgcctctcagggtctggtcggggaaggggctccgctggccttggtcccggaaagagaccttgtgccctccgcttctcctcctccgctagaacaccagaactcctccacttacaggcgtaaaaacaagggcattctttccattgtgggtgccaacccctctctcctggagcacgtgcctgaggttgcacccccctccccccccccccaggatgtctttgtcctggggagccctagtgcctttcaccccctttctcccccgccacaactactcataactttcggtccctccctccaaagaatgaagccccacctacccccttggccactctgatcggctgtgctctctctggcattcctctgggcacaaagcatccctctcatggctcagatgacgatgagattgagtatgcttcaagggacactcctgggggctctggtcctgcacaagcagaaccccttcttccgacaaatctggcagaagaagatttccaagacgccttcattctgtttgttgacatgcgtatcactgcgcattttgccacggcttacaacaccccggccagtgacactcctgcccggatcatcacgaaaactatggaagcggctcatcctaccgccaccttcaaactggttgcctcctctcggggcaccatggctcttcgctttgccagtcgggctgacagagagactgccgtcttgaaccaggaaggtctagaggtgaacgatcacattgtgatcatggaaaggccaaaggcttctatccaaaattcaatctaattttggaaattccaagggtaggataaaggtgacatacaaaagaaagaactaagatactctcactaaaatataatctaagctaagtggagaaagaataagaaaaaaatccattcatatacttctagtatacaaacatctttagtctatactagctagtatatagtcgtgcaaccaataccccttaacagtgctctcctggtgtttcgagatgaccacccctgattgccgagttccttatgacaacctgttatggttgtccaaccggggctaaatacggaggagtaccctccccagaaaagtgtcttaggagtatatactaacgtggaggaatactcatactgagctgtcaccatcagcgatccgcctactgtcccgcaccatatatgcccaattaatgatatctaataattctggtcaatgatatctaataatctaagcaccaggctcatattattaaatactactctacatccgagctcccgaccttgatggtgatgtaatttcatcattttgctctgaaccaagacaaatgttactttcttattttttgtgaaattagttgttaagaagatttggaagctagagaaaaatatttgtagaacatgttgatgccatttttccaatctaatagtggattagagtttccaccttttgctgatgaactgattaaagttacagtaactggttagagtttccactgcatctcctacagtaaatgattaaagcttctaaattactgatgaactgaactctaaaatatttacctttctcagcatagcagtgtttgggatgcaacaccatgtgaagtgcagttagactgaattttggagataaattactgaggtgctgaactctaattgtgaatgcctttgtactttttgttcttttaaccctgatggatgatgtttgtaagagaagtacatatgcagtgctatttcggtgaccaaggttcagatcaaatcatataaagtaaggctctaaaagtcatataaaatactatgattgttttcctttttctaaaaaaaaaaacccctcaggtttgcattttggattgcatctcaggctactttggctgctgctctaggtaatttgctatcattgctcgttggtctgtgttttgtaatccagtctttaagatttgtaaaggataagatacaatctcaggtaaaagattcatggatgctagccaattttaactgcgtaaattgacatcgacagcggcattgaatcattggcaaattaatagatgattacactgtaatatagattatatatagtagtagataattcatgttgtccttgcacctgcagaatttatttgttataatcaaatgcaaatgggagtattaaatactggaggttgcataaaggactaaccacagtccaaacattcagatatatgttgctgttagattgcgtctctggatttcttcagagtctgaaattttcttaggtgcttgtgccaatcttacatggccttttattgcttctcatattgggaagtatagttctctggtatgccctactcttaaatgttcttttctttgtaatttcaggttgtttttgttctaatggtctctgagaattgattttgcttgactgtgtgccttttgcaatctttatgctctgtaatctcgaaggatacactgttaaattgagttttatgggtctaagtataaatgggctgtttatatagaacgtcaacattattactctgtttgccgctgcataaatttccaggggtcaaaacatccatttagcttttattggcatgaatccaatgattttcagggttcaaaaaataacaccaatttggcgtttatgactgcagagatatgataagttcattttcactgtccttattaaattttcaaatgaatcagcattgat

SEQ ID NO: 12356 - DNA, 1131 bp, Oryza sativa
acccatgaattcagaaccccagagtccgcacatcctcaaatacaaagcacttccctagttagatgtaggttagacttcccgttcgagaaactctaccttctacctgccctcaatttatgcacgattaatgaatgccacctgggtggaagcgagaggtggaaatggaaggtcttagttcggaggtgggatctctacctgatagttgcattgccattcatgatgatcccctggcattcgtccattcagccattcaccattcacccattcaactggaattttggttgaatgccggaattgtgtccacaaattgtggatggatagttggttggctggctggatggctggctggatggctggctggatggatggtgaatggctggcggcggttcggttgctttgaagcatttgttgctatctaaattccatttaaggtcgtaccttatcgcccagcatcatcttattctctatttgtattccctccatctttcagatacggatgtagccttggatgtgcccgtgcccaatgaagaggaagagcgcaacatgaaacgtaagtacaaaagtaccggacacccacccagatcccaatagaatccgccaaatcctgcgggaaattgtaatcccattcaccagctcctacatttaattaacaagagaactattgtatttatctaacacctggattatctccacctttcatttgatccctatttatagattacgctgcgttgctaacgggccgcacctcctatttcctcaagggtgaggaaatgaagtccatgtacaccacctacaatccgcagaatgtggtggccaccgcccgtttcctgttccacaagaagaatctatactactccttctacacctcatcgcgaatcggtcgtccgcgtgccattcaattcgttgatgatgcgggtgtaatcctggaggagcatcaactggagaccacttggcgggcactctcagtgtctatcagaatgccacgggcaagatctgcggtgtctggcgacgagttccacgtgattacaagcgcatcctgcgcgacgatcgtctccctgttgtcctcctctggggcaacaaaccgcaggccgagttggctctggccggaaaggtggccaaatacgcggcctg

SEQ ID NO: 12357 - DNA, 605 bp, Oryza sativa
tagtccatcatgtttccggctgcacggctggcctttatgccgccggtgttgggcgcctacctcttcaccgaccggccgccttgttcgccgacgactggtgcttccgcctgcacggctgacttattatgccgccgttgttgggcgtctacgtcttcaccgaccggccgcctcgaccgcgccgactggtgtttccgcctgcacggctggcctattatgccgccgttgttgggcgtctacgtcttcaccgaccggccgcctcgaccgccgccgactggtgtttccgcctgcacggctggcctattatgccgccgttgttgggcggctacgtcttcaccgaccggcttgccttcgccgctgccgactggtgtttccgcctgcacggctggcctttatgccgccgttattgggcgtctacgtcttcaccgaccgacttgccttcgccgctgccgactggtgtttccgcctgcacggctggcctttatgccgccgctgttgggcctctacgtcttcaccgaccggacggctcgttcgccgacgactgatgctttcgcctgcacggctggcctttatgccgacgttgatgggcgtctacatcttcaccgacc

SEQ ID NO: 12358 - DNA, 547 bp, Oryza sativa
gcgggcacaccgttgagcgtcacctcgtagtgcagattgcactcgttgtcaatggacatccaggccatgccgacggcatgtggattctgtgcatccgtgtgctcctgtcgcttcagcagaatgggttccgccgagtcccgagcatcggccactggacggggcactaggcggccacggatcaggctcgtctcatgctcggtggccacattaacgcccagttcgccggcatacagcgactcgaggaccttgggacccaacttctccacactaccaatggcctggttgaagttgaagctcggcgtcagatcctccagcttggccttccggttgccctgctcctcaatcaaactgatgttgggcctatcccgggtgttcacgtgctccgtttcgatgttgtaggccagagatccatcggtgttcaagtagacccacgccaaaccgctgctcttggtcgaggattcggcactgtgcggcgccagcagggtctggaagatttcgcagctggctcgggtcacgatgtgtccctggatgcgcagatgtgggtact

SEQ ID NO: 12359 - DNA, 7829 bp, Oryza sativa
  unsure (1)..(7829): unsure at all n locations
tgcccctcccagcccacgtcatgcagagctcggcccggcccacctgtcatgctgacgtagcacctgacgaggcctggcccacccctcctccggctctcccgattggtccacgcgctcacacgagtttacacttatgcccctgggtttattttatttttattttcacggtgcagtccaaagtccaagtcctcggatcagccttgggcgaaactttgacccctaaactgataaagcccatagcaattcttgccattttggagcggtgcaactttttgccatatggagctcaggccgccgccggccaagcaccaccaccaccgccgccgtcgcggcggcggcggcgaaaacggcggggaggaggaggaggaggagactggccgcctgtcgctgcgcggcggcggcttctggcggcgccacnacngngaggaggaggaggagaagggcggcgggaggaggggcgagatcaangaggtggacttcttcttgggcgccagcggccgcgatgtcgtcgtggcctcccggcggggacgacaaccgctttcgcgggacgacgcatggcggcggcggtggctgcgacgtcaacgtgagttcgccggcgttggactagagtagctgaaacttgagctcttgattgattggttgcttaattgatctgcagatcgggctagacttgctgaccaccaccaccgccggcgcggcggcgggtggtgccgcggccggcgccggccaggaggacaccgggaacaatcatatagttagttgattttgtcgatacccttgtgtactcttccattcctcttggtttttaattaaattaattgcttgttgtagcttaaattatttggtgtgatcccttgttggctgacacgtatacttatccatgtgatctagaaggaggcgacgacggcggcggtggatgtggagctccggcgagtggtggaggagaaccggcggctgcggggatgctggacgagctcaaccggagctacagcgcgttgtaccatcagtatctgcaggtcacgcagcagcaaaaccatcgccatcctgatcatcacctgattatgaacaacaacaacaaccggccttcactagctcaagtgagtaccttagcttcttgttctacatgttattatcatcacaagcatatgcacataaaaatgttccccttaattatcccggtaaatggatgcatggatgcaccttgcttagatcttcatttcttgattcccattttgttttttcggggcaaggatttcttgattccttgattgtatttgcctttccttaattattttcaagaattcttattttgggtagtttgttcctctgttgatctttcagattcaattttaagggtatacctagccggacttttttgtgcacaattaatggtgttattggttttatccccccctggtttattatattttctgaattctcaatgcacacgtacacattggagatcgaattgtctagtgacaacaattggaaggcatgtgtagatttttccccatgatcaagatctctggtgcaataatgtacaggtcaccaaaagcacacacaccgatgtaagatcctgtagatcaaacgagcttatgtcaatgcctcggtctgctaattaattaactgattaatcttatagaagcctgacactttccaaagcaaatctttccgaacatgatggagtagaattactgaattagatattataaaatgggcatagtagttacaaacatatatgagcatgggcagagcatggcatcaactcttgatcacttgcaagtattataagcttcggggtagtatattacattatttcctccgaaactatcgggattttcccaaatactacactgtttaatccgttttaggtacttcctccgtttcacagtgtaaatcattctagcatttctcacatttatattgatgttaatgaatttaacatcaatacgaatatgaaaaatgctagaatgacttacattgtgaaacggagggagtactaaataactttggctttcattaattgtccatccgattaatcctttttgaacgataggcaggtatacgattaatcatcatcattaatgctgtagctcacaattaatcgtgtgaacaatgttccaaaagtctccaagcgttagatcccttcccaactgcttagctttgctttgctttgcagaggacggacatgtactgtacagtgacacactaacacgagagctagctagctagctaacaaagctaactactactgctacttataactgtaggagtagtagttagcgtgtgctaatctcatgcacgtaattttcatttgcccctgctcgctttcgcccttccttttgactaacgaacacaccacgtactaactacgtacttgttgatcctaccaaacatcgacgcagacacaccggaccgcggcgacgacgacggcgacgacgcagcaattcctggagccgcgagcgtcgtccacggcgcaggccaccgccgacgcggacatggcagcgtccgacgacgaggccggccgcggcggcggcgacggcgacgcgtcgtccccttcgctgagcaacgccgccggcggcggcggcggcggcaacaagatgaggagggttggtggtcaagacgagactgcggcggcggcgccggcgagggagaacggcgagcagcaggcggcggcggcggccgagctgccgtgccggaaaccgagggtgtccgtgcgtgcgcgatccgaagcaccaatggtacatatacactagtagcagtaactatgttttgattgagatgatctagctatatatatatatatatatatcatgcatgcatgtcatggcaacattatttaattttctttgatttgaacattgcctgcaatttaattcattaatttgttcagtcaaaacaaaattaaacatggccggtatagagtatagacaacagaaagcgattgattttacttctagaagtgtacacatgaaacaaattgttgttgttattgaatttacaattacaaatccaaaagatgggacgacgtacgtcgttgctagtttaattattttgaccttttgttgctcttgcattcaattaatgatgagcaactattgaactcctgcagattagtgatgggtgccaatggaggaagtacgggcagaaaatggcaaaggggaatccatgcccgcgagcgtactaccgatgcacaatggctatcggatgcccagtcaggaagcaggtaactaaattaatatatatgcattctcataatatgcgttttcttgtgtagctttaattagcatggcgctatatataaaaaccagctgaaattggaattcatatattttttaaaaaaaaattaaagatgtttgacatagtaattatattgatgtgatccatttttttggaacattgagacgcaagttaaatttatattagttatatatatcttccgttcgatctcccttttttaaaaaaaaattgtggtcgatctcactatattaatggcgctcaccacacgcaatcttcaaaaggaaaaagaattccttgggattttcttactccattaatatgtgtcttgactctttgttaacggatttctcatcttatcgataaacaaatcgttagctctccccgtcaaaaaagaaaacaaattattagctctggttacgtgttttcattgcccctcacaaactatatatctgcatatcgatcggttattcaaactggaaaatataacaagctagctagggacgtcctctttgaccggccggttaagcttacccgatctcacaacataaaaaacggatagctgatttgatatgtgtttgcccgataaccgatctcaacacacatgcaaactggaggaccaactgattataaattgcctttaatttgatctcctacgatctttgcactgtcacacacacacacacacacacacacacacacacacacaaaagtacctgttctctgacacatatatcgattaactaagcaaggaatcatgatactgttgactttcaacacgtctagtaaatgatcgtgtaaatatcaattcatgtttatacacgtctatatatattgaagaatacttccaatagtccatatgtactgatgtgaactcatgcatccagtgagaattcagcatctctgcatccttccttgcatacgctagatatgactcctatcattgcatggacttgcatatatttatgtttctccatctatccagctagctgtatacccatagcagtactcctacataatatgcgcacacaaaactagctacgagctgtgcacacaatatatatatatgctgcgaggagacacgtatgtttccgttgttttccgtgctgacatgacgagatagaagacaagaggaaaaactatcaaatcaatttccattgtttaatactagttcatttttgtgagatatactccttccgagctgataatacttgttattttagacaaggttgatgtcaaactttaaaatctttggttatgaataatttctaaaatatttgtctttgaaatatggtgactatatatatagaatagtcttaaaaaatactttcgtaaaatcatatagttgttaacatctatatacatattataataaaaaataatggtcaaagttagtttttgaagactgtgccattatccaaaacgacaagtattattaacccgaagggagtagtacgtacgtggttataaaaataagatgccaatgcgtttttaaactttttataataagtatcggatttgctaaatgcctttagcaagaaaaaggggagtgaaatcttatggtctctggaccgttgggttcacgctaagatgttgtgtccgagatgctcctcctttagctccaaagaactcctctttctctggcgtcaaggacaccaactttgtcatagtacctatacggactagaggtttggaattgggataggggtaagaagagagagtgagttggaaaaagggaagaaaggggtatcctgtcttgaagagatggcttcgtggacaatggtcagaccaacggtgagcgacgaacacagataggtggtaaggcagtggcgctataccaccggagcagggctggagctgtggcggatccaggatttatgtgatgggtattcggaattctaaaatagcagatatatcgataccgattgacacattgaatgtacgatacattattttgatgcataatctttactacgaattgtgcgcatatataataaaatatatagaaacatttataatttcctataatcagcatcaaacatatttctattgatctaagtatgagtgaagagtaccaaagaattcggaatttttggagattgtatagcataggtcgacaactttatgtagtaaaaatattctgatttattgctaatgaaggaaaacactcataaaccacgaagaaactagtagctagcaaaggaatataacttatttccgtaggacaattgatatcaattagacaacaacatgtagagaaaaacaaatgagtgggcaatatatagatgtatatacaatttgcaaagataactatttcctccgtttcataatgtaagactttctagcagtgtccacattcatataaacgttaatgaatctagacacaaaatcttacgttatgaaacggatgaagtaggcattaaagtaattgcttattaattgccacaaccaaaatgtaaacaagaaaattaaattagcatgaatacaacccatcccgaaattgctccaggccaagcacgcttaacctcatagttctttcgcgatcagcttccggaaaaaaagttgcaacttattgatatgagtatcctatcaatcctattaagccatgtgctaggatgtcacaatatattacaaaagaaagggagggactaggaagactattgatcttattgggctgaggagagctagaaaagggtggaattgaattgttagggtataaatatcacaaatctagatagagtatggtagtacatatatattatggtcaatatatattaggtttgtgtccaaaattcatgggtattcagctgaatacccatgaattatgtgggatccgcccctgggctggaggagggcaatggacgagtcggcagagtgattaagaggcggggcagtggtgatgtctccgttggtggtgagccgccaaagaaaagggcggtggggcacctcgtcaccgctcggttgaggaggagcaggacgacatggcgttgatggtccggttgacgccttttggttttgtcaatgttaaggggcaacccgctgggcaggggaggtggcggcgatggttgaggagatggtgacgccacgacttgcgagaggaactaggggaggagagaaaatatgattagagtggtaactggtactatagctacatgaattcttggtgtgatctagaccatctaaatgtagctaattcagatgagataggcagatcaggaagtatttaacatttgagaaacgagaaccctcaaactatatatgaaaaccaacttccgaaaggagtctaatatacttgccttaattaattactccatccgttccaggttataaaacgttttgactttggaagttaaactgttttaagtttgtctaattttatagacaaatatagcaatatttataatactaaattagtgtcatcaaatcaataattaaatatattttcacaataaatttatcttgggtaaaaaatgttactacttttttctataaacttggtcaaacttaaagcagttataacctaaatcggagggagtacatagttacatgattgcatgcggccggtgatgcggtgcccgatgctgcatgcatgtatttgccttcattagtgcatgcgagaaagatgcatgtaactagcgcacacattggtaagtagcacagtaattgacatgggagtggattctaagagcaggtacaataagatggtagatgctggcgataggacgaccatgtcagtgttgatgcttagctagaggtgaaaaaggtggtgagagagattaacgggcgactaattagggcaagtgctatggtagatgtgactaccacctccaaatttatctattttattcactcatgaactaagaggcaacccatacaatgtatcacctctaacacacaaataccaatatctctaatactctcacacacttcttaaaatttgtgtggaggttgcctcttgatttaggggtggttcatcttctctctctccacttctctcctccactcatcacccaatccattgtggcattcttaggggcaacatatgagatattatagtacttgcccttagtcgctagctgctcacactatccaaggcaaagtatttaactgctgttggctgcatgctatggcaacgcaagaagctgggtggggtcacctcattctaccgcatgcatttgttcatggttgatgggaactgtgtagcaatagaagatagtagatatctattgtatgcactagctattagcactaactataatttgctgatgtggttatttttgtagcctttagctagctatttactattgaccttgctctaatcctccaggggattttcttttaaattcgatgcatgcaattagttgtgaaaaattgtgaaaaaaattgataaattagagtatagtgatatgtactaatccaaaaatcaaatttaaattagacctacacatcgagaaaaaaaaagataaattgagatacgaatagtacgctactatttatatattaaatgcatatatcatctgtgtgcaggtgcaacggtgcgccgaggacaagaccgtgctgatcaccacctacgagggcaaccacaaccacca

SEQ ID NO: 12360 - DNA, 1380 bp, Oryza sativa
aaactaaatagtttaaaatttattgattgtcaaaattttaattgttttatcttgatcttgtataagatatcatgaattatgaacggagaaaaataggagtagttatcgcggagtactatttcttaggtacggggagagaggaatcaagtcggataatgaactattttggctatatttttgtcgaaacatgatttcggcaataataaaagggggtagcgcacgagacctaaaagtggatggatgcagagacaaaggatttagacaggttcaggccctctcaatgagaggtaataccctactcctgtttggggatttgaatccgccgggtgtagtatagatctgacgatcaggttgtctcatgcccctaaagggggctccctgccctccttatataggttagggggcagggttacaagatagaaaccttaaccaagacggtatcggtttcctaaatctactttacaatcttatcaaaccaggactttaggccgttccataatatacagggaaacgtaatacccaagtcatgatctgttacatatttcatatatataagttatcccctataactagtcggataaccatgccgtgtgggtatggggtacccataatcttacagtagcccctgagatcttcacaggcgaaaatataatcttctctcgaactagattactctaaagccgagtgcttcaatcatcttcgccatgggctcccgagtacttttaccaaatctgaagactgtggagggctgaaaaataaagtcaggtgcatcgaatagatgcacctaataggtgtagcccccaactatgtgattagctgaacaaactaaacatataggcaaggaataaattatctaattaaccgagtggtttttgataattatagtcaaccaagtgacttgataccaatatatagcatatgcggcgtgaatccccgaataatatgaaccaagtgatataccgactgcttggcaaaatatgatgcgtacaacctaaaggtgacaacatctttgaaagatcacatagcaaaacaactataaagaagcttgaatgctgggaataaagaaatttccaaagtattgggcatacgccatgcgcacactgctttaacagatgtgcttaagtccctaaaagacacatggtttcaccacttctggaaatatatggcatatatgggataacatccgagcaagtaaactcataaaggatttaccaaccgcctgaaaaatgaccataatatataatcagcctaagccataatattgtcaattaaaatgcacactgacgtggcaaaaagcaatgatattggatccaatcaattgcttgataaacccaaacagcaccttgactatataaaaagtcagcggcgcagctatataaa

SEQ ID NO: 12361 - DNA, 870 bp, Oryza sativa
gtcgtagacgcccaacagcggcggcataataggccagccgtgtaggcggaggcatggacgcccatgaacggtggtgtgaccaaccaaccgtataggcgaggacaccagtcggcggcgacggaggcaggccggcggtgaagtcgtagacgcccaacagcagcggcataataggctagccgtgtaggcagaaacaccagtcggcggcggcgaaggcaagccggtcggtgaagacgtggacgcccatgaacggtggtgtgaccaaccaaccgtataggcgaggacaccagtcggcggcgacggaggcaggccggcggtgaagtcgtagacgcccaacagcggcggcataaataggccagccgtgtaggcagaaacaccagtcggcggcggcgaaggcaagccggtcggtgaagacgtggacgcccatgaacggtggtgtgaccaaccaaccgtataggcgaggacaccagtcggcggcgacggaggcaggctggcggtgaagtcgtagacgcccaacagcagcggcataataggctagccgtgtaggcggaggcaccaatcggcggcgacggaggcaggccggcggtgaagtcgtagacgcccaacagcggcggcataataggccagccgtgtaggcggaggcaccactcggcggcgacggaggcaggccggcggtgaagtcgtagacgcccaacagcggcggcataataggccagccgtgtaggcggaggcaccaatcggcggcgacggaggcaggccggcggtgaagtcgtagacgcccaacagcggcggcataataggccaaccgtgtaggcggaggcaccaatcggcggcgacggaggcaggccggcggtgaagtcgtagacgcccaac

SEQ ID NO: 12362 - DNA, 4468 bp, Oryza sativa
aaatatatggtatatatggtataatattggagtaagtaatattataaaggatttattaattgtttgaaaaatgattataatatataattagcctaagctataatattggtcaataaaaatgcacacttacgtggcaaaaagtaatgatattgtatttaattaattgcttgataaacccaaacagcaccttgactatataaaaaagtcagcggggcagctatataaagctttactgtttgacaccttttaagatgcatggtaccaactcctaaaaagtcgagtaactgcggtataaaaggattttaaggtattgggcacttgatcacgcgcactttggcctaagcgaaaagtgcctaagtccctaaaagaacgtgacaggccacacctgaaaatatgggctgcagacatattaggcctaggccaaaaaatatgccttcgacaccctttaaaggatgacgcatgtaacatgctcccgagtaataaatcttccgggtaatatagaccaagtgtagctcatatgaatagcttctgatctgaatgattatcccttatgggatactccaaaataaatataataattgaatcccgactggcgcaagtattcggttgatagcccttacggggaataataattggtccagtctttgagcatagaaaatagactcatgactatgaatccatgtggaatgtatccggaacaagtccaaattggagatataatcctcacgcttgagttgatgagcccctgagcatatagcttgtccttctgtcatagtcaaaattgtctattggcaatagctgacgcagttggcatggagatgaaatgaccaacatgaagacgaaattgctcatcagaagtaacggaagatgtcagtggtagtaaagatgccaccgatcaaatgtaatgaagttgcataaccatggaggcgaagaaaccagttggcaacagtcaggtcagctagcagtgaatatgtaggcgcccaacaacaacgaaagaacagtcggtggtgacaaaagcaaaccgacgatgaagacgtagacgcgcatcaacggtgatggcgaaatccaccaatcatgaagatgaagaaaataatcggcggcgacaaacgcatccgacggtaatgatgattagcggcaacagagatagccgactatgatgacgaagtttcccatcaacggcagcagagtaggctatgttgatgaggcttgacaagatgttgatgaagatgacgatgtcggtgatccagtcaatagcgatgtagcagccgatgataacgatgagatcctctatcggcagttgcgtagtaggccaaccgtgaagacaaataattggaggagagttgatgttgttgcccaactcgtctaaaccgaaatatttgaagttgttgaagtagaatgtctgttccgaagcaaagatgaagataatgactcctggagtgactcattggctgattaattgattttttcagcttgacataaaatttgtcaaattttgagccttatatttgtgtagcccccgactctttggttagttgggaaacaactgaacatagagtcgagaattatagcttcttgtcgtcgagtagtcattgcttgattgaagatatgtgttgaaggtgtccaagtagaaatcctgaatattggagagtcacttgttgtagtaaaatatcatggcattgcatgccgagatgtcgaggttcacaaagacgtcgtggttggtgaagtagtaaaacttgcgaagtagcagcaatagagtttgccagtgccgaagataataaagatgaagtcgctccaccatgatgacaaagttgtattgccgtaatgaagtgaacacaagtcggcggcaacagaagcaaaccggtagtgaagacgcgcagttgtgaagataaaagcaccagtcggcggcggcataatcagtcggcgacggaagatgatgatgtccatcagtagtggtagctgtataaaccagacgtagaggcgagggcactagtcagcagcagacgagacgaccagcgatgaagatggtaaggccaatcaacactggcagaatcatgcagccatggaagtgaagaaaccagtcggcagccatgacaaacgtaggcagcttgtgttgaagatactgatgcctattagtagtgacagcgatgtacccagccgtgaagaagatagcatcagttggcgttataacaggccagccgtgcaggcggtgccaccagtcggcggcggacgaagcggccggtcggtgaaaacgtatacgcccaacaacggcggcataataggccagccgtgcaggcggaaacaccagtctgcggcggacgaggcggccggtcggtgaagacgtatacgcccaacaacggcggcataataggccaacgtgcaggcggaaacaccagtcggcagcgaacgaggcggccggtcagtgaagacgtagacgcccaacaacggcggcataataggccagccgtgcaggcggaaacaccagtcggcggcggtcgaggcggccggtcggtgaagacgtagacgcccaacaacggcggcataataagtcagccgtgcaggcggaagcaccagtcggcggcggacgaggcggccggtcggtgaagacgtaggcgcccaacaacggcggcataaaggccagccgtgcaggcggaaacaccagtcggcagcggagaaggcaagccggtcggtgaagacgtagacgcccaacaacggcggcataataggccagccgtgcaggcggaaacaccagtcggcagcggcgaaggcaagccggtcggtgaagacgtagacgcccaacaacggcggcataataggccagccgtgcaggcggaaacaccagtcggcggcggccaaggcaagccggtcggtgaagacgtagacgcccaacaacggcggcataaaggccagccgtgcaggcggaagcaccagtcggcggcggacaaggcaagccggtcggtgaagacgtagacgcccaacaacggcggcataaaggccagccgtgcaggcggaaacaccagtcggcagcggcgaaggcaagccggtcggtgaagacgtagacgcccaacaacggcggcataaaggccagccgtgcaggcggaaacaccagtcggcagcggcgaaggcaagccggtcggtgacgacgtagacgcccaacaacggcggcataataggccagccgtgcaggcggaaacaccagtcggcggcggtcgaggcgagccggtggtgatgttctgactgatccattcctggagcgtaagagataagcttaaagccatgaatcccttttatgcatatctggatctggatcctgcagaacaaacatataggatgagtagtatctgatataaatataatactcgagaaaaaatcaagtattttaaaatatttataaatatgtatttctcctcttgtcaattttgatttccccgagcagatgactctgtacgtttaaacactctgtccgactagtcatagcccccaagcatcgggagtcggcctaggcatttcccaaacatgcatatgagtgacatgagttcgtcattaatggaacaaagtttcacggatcagaatttactactcaggtacttttgcaattattaagagcagaaaataaatttatctcatctctatgcttttgatttattccaaataatacttagcaccttgcgttactcggtccatccaacgagcccccgggtgctaggaatcggcccaaaggcaaccatccattggcaaaccaaacggaaagcataggaagatagaactccataactcgataggtacttttgtactcagattatgtcgcaagcaatcaagataaatattataaaaaatatgatataacatctgtagcccccgactcactactcaatggaagaccaattggtgtagtgaggcagaggaaaaggaaaaatatcatataaagaataaaataaatgatgacttagctttgtaatattccccttggtgatggcagaagtggccaatgtgggaacaaagtcgtccatcaataacaatgaagacaccagtcggcggcgacgaaggcggtcgacggtgaaagcgaagacgcccaacagcggcggcatattaggccagccgtgtaggcggaggcaccagtcggcggcgacggaggcaggccggcggtgaagatgacgatgcccatcaacggtggtgtgaccaaccgaccgtataggcggggacaccagtcggcggcgacggaggcaggccggtggtgaagtcgtagacgcccaacagcggcggcataataggccagccgtgtaggcggaggcaccagtcggcggcgacggaggcaggccggcggtgaagatgacgatgcccatcaacggtggtgtgaccaaccgaccgtataggcggggacaccagtcggcggcgacggaggcaggccggtggtgaagtcgtagacgcccaacagcggcggcataataggccagccgtgtaggcggaggca

SEQ ID NO: 12363 - DNA, 2718 bp, Oryza sativa
acgcctcgagtccatgaccagcatcaatcgcctcaatagtgccgcgtaattatatgcgaacaacaacaaaaaatagcaagagattaatctgggattaaaaatcaatacgataaataatgataaaaatcagattgagtttccccctgactgatttggatcaagtcagagaagaggagcttgaagaagtggtcgacggaaaggaagtgaaaactcccaaagcgaaaacgaagtcggcgactcatgaaattgattccatcgcgcttgttgataggaaactcgacgcaacccctacctggcgcgccaactgtcgaaacatgatttcggcaataataaaagggggtagcgcacgagacctaaaagtggatggatgcagagacaaaggatttagacaggttcaggccctctcaatgagaggtaataccctactcctgtttggggatttgaatccgccgggtgtagtatagatctgacgatcaggttgtctcatgcccctaaagggggctccctgccctccttatataggttggggggcagggttacaagatagaaaccttaaccaagacggtatcggtttcctaaatctactttacaatcttatcaaaccaggactttaggccgttccataatatacagggaaacgtaatacccaagtcatgatctgttacatatttcatatatataagttatcccctataactagtcggataaccatgccgtgtgggtatggggtacccataatctccacaattttgaactattttggctatattttgtatgtgtccgcatgttgcagcactaggacatttttatgattcgttactacctacaagttgaccagaagattccaccaccagaacatgtacaaaataccgttcataggtgttcatggccagttggtttaatattgaattgactttgccagttccaagcggcattaccgctggttttagaacacgcagagtgctaaaatggtaggtaagctcgataaggactagcggtgtaatatattcagtgtaaaaaaaaattgaacacccgttttaactcactactaaaaaagagttttccatgctggctaaaatgggtcttttctggcggctagtcaaaccacttgaaaccaaaggctagagaaaatgtaagctcttcacaaataggacttcaaacgccaacgaaatcgattttcattggtggctgtgtcaagccagccgccagcgataattaaattttactagcagttatgttaagccagccgtcagtgataatcaattttgagacaaaaaaaattgaaaataaccgcatgcagttaccctctaaccgccagcaaagagcctgcattaccaaacccaaaccacaaatccacaacagagtcccgcattaccaaatccaaatccaaattcttgcctctgtcgtcatctccatgaatgcgcccacgccagacctgcccgccaacccaccatgaacgcgcccaccacccgccgtggacgagcttgcacgcccgtgcgactcgccggcgccaaatccattacgacgtgacttgtcacctgcaatcaatggaagcctaacgatggaagggcatgcggaggtcgacaagggagggacgatcgagtcgctttggaagtagtgggtagatagccaccttcggatccgtgttcccaaggaagggcgcggccagctggcagtagaaccgccttgctcccgaggtccggctccccgtgccgctgccgccgagccggatttgctccccgctgcccactcccctgcactgttactgccgagcgccgccccctcccacacacgagtgccgccaccaccccttcgttctcccatggaagggtgtggccggccagcggcagaaccactgctcccgaggtcctgctcccccgcgctgctaccgctgaccggatctgctccctgccgcccactccctgcgccactagcgccaagcgccgccccctcccctgcacgagcgccactgttgctgcccctccgtgctcccaaggtagggctcccggcacctccgctgcccctcccatgcacgagcaccgacgcagccgctgccccctccccgcaccgctgctgccaagtgcctcggctggatctgggaggcagagaagaaaaaaagaaagaaagagggggagctctggattgggagagagagagagagaggaaagagtgaattagaatttaagacccgctggattcttgcttgcggtggttttaagacccgcctgtaaaaattagatttttgcaagcagcgtcttaagagcaccgcttgtaaaaatcgtgttatttttaatggtggtgctcttaagacgatcgcttgcgaaaatagattttcaatggcggttactaactcggaaccacctgttgtatttttgctagcgatttttgcgtatggctgctagagaaaattatagggtgatgctatgaaaaatcgattgtttagtagtgactattgcgtttgtctaaactacactactcaactttaaaacaaagcctttaacccacctcaactgtcaaaacttttcagtgtacccctttactcaaactaagggtgaaaatagtacaaaaaatttcttgtccgtactaataccgtttccacaaaacaagagataatctaagaaataccattgacaagcgtccaagtcccagaaatgccatcgacaagtgtgactttcaagaaatgccattttacaaaccattttgtcccaaaaatgccat

SEQ ID NO: 12364 - DNA, 5162 bp, Oryza sativa
caagtagttcatcattaaaaaataaaataaaccgatttttaatgttttcaataattaatgcgtaattaatcatatactaggcctgcaccattagtgaggtttagtgtgtttattattaggtttctatcacttatcaaccggcaccgatgagaacgtacccctcattagcgccgctaagttggtgttgattgtcaaatccggtatccatatatggttgttattgttaaccgacacctgccgaaagggccgttctctactggtgagtgcaacaaaagactagccatatctcaaattaacaccccagttacagaagaaaaacaaacttcgtcgtcagcactctgggagacattcccttccaagcaatccattccatcaatttggatatgaataacaaaccaaactagaaacaaaatgaagttcgaaaagcggagcctagctcgatgctccattttttagtgtaggaaacatcgatagatgtatacgtatctgctattagtacgtagctactagctatctgtacagttagagagtctctgtcgtgcccccgtgctctcccatatcttttcttcacctatccccttcacatgagatattgataatgggatctcaatgcatctatatatattaataaaatcgtggttagttgttcaccgcgctgtcaacctacaccgactgggcatggccagtgagatgctctgcaaattgtacatgcatgtagtatgcgacactgaaagagatctgcgatcctctcctagctagtactaatatagctttgttgatgtctatatatatatataccacggaaataatactgcacacaggattccaccaaaaaggtgaccgttgcgtgacatgtcgattctacctgatctaatcggccagcaattcgctagtaattaagatattatatatatggtgcttgtaaaatattattgggcgacagctcagcttcaaattaaggacaaaatatatatggttaggtagctccagtttcccatcccacgatttttgtgtgaaaaatattattaggagacgtgcactactagaaaagcgttttccagacggcaaaaaatagtttttctaggcggagaaaataaccggatgtaagcaaaggcctgcaggaatagacgattttcgcaggcgacatctccatcttcacaggcgatagatccacctgcttgtgaaaatattttcagcgaaaaaaaattgccgacgccggcttccccctccgaccgacggctctcctcccccgtctgccgccattgcccgaggggagcgccgactccgccgccgctggtggctggctcccctcttccgtccagatctaggagcggagaggctcacgctatttgcggtggctattgccggagaacggatctaggtggtaggattggagtatcgccgccgcctcccctccttgttgctaagccgctgctggctctcctcttcatcagaccgggagaggagccaagccactgccttacctccttgtcgcggccgacgcctctcctccttggaaaaagtacgaattaccgccccccaactatcacggtcgaccgaattacccccctagactcaaataccagacattttacaccctaaactatttataccggactaatgaatcccctgaacaggctttgacttgagctagcacacgtggagccaacgtggcagactactcagcaaaaaaataaataaattaaaaacccatgggcccacctgccatccctctcttcaacccaacatatcccagcccccctgctctctctctctctcttgcgcgcacacgggcggccagcggtggaggtgggcggagctcgctcgagcgcacaggcgtccagcggcggaggtgggtggagctcgctcgcgcggctgggggcagaggctgaggcaagccggttcccccaaatccagccgccgccgccgccgcccggggtggcggcgcgggctcgggtggtgggcggcggcacggggacaggcgaatggcgacggcgcaggggcgggcggtgtgcagggtcggcgacagctagcttcatcgcggcgtcgtggttgcggagcaggaggaggagcctgtcgcagcagtccaggagctcccactcggcagaggcccagccgccatcggggaggaacgaagccaaaggcagaggcggaggtggcggagaggaagaccggaggcatgcggcccaggacgacaaagaggaagctgaggaggtgcgggggagatgtctagtggtgagcacggaagtggcagaggaagccggcatcgcgggccgcacagaggaaggatctgcccgcgagcgtggcacgcaccaacgcggcttgagaagggaagcggaggaggatctcgcgaaggaggtcgtgccgagcaccttgatgccgcccgttgcacggcctccccacgccaccgcccccggcatgcccttccgcgccgaccgcctgcgctgccggctcccgccagcactcgcgcgtcgccacaccccgcctgccctcgtgtgctgtccgcgcgcgtgactgcttatcgccggccctcgcgcgccgactgcttgcgccgtcggaccccgcctacccttgctcaccaatggctcgcaccgctcaacctgcgcccgtgcgaccgcgcctgacgagtgacgacgctagagagagggggaagaggaaaaaggaggagatgagagagtatgacaggtgggacccaccatgttaaaaaaaaagaaaatgtgactaggttgccacgcatacgccacgtaggacaaaagcgctctggattgggtcgagggggattattcgtctggtattgaaagttcagggtgagtgatgtctggttttcgggttcagggggaaattcggccgaccacgatagtttggcgaggtggggggggtaattcgttctttttccgaaaaataacttggatgcaagaattatacatcaaagtgaaggagaaatgaggtggtatgcaaagaaacacacatctggcgaatcaagtgcaagaatacggattgaagggcccacatgtcatgccaaaccgacctaaagtgagactaaacagctgtgcaccgccttaggagcccacaagtctgtcactggtgaaaggcgatggagagaagtagggccacgggggttcggccaaactgccatagccacttctcatcatggccctccacgtgttgcttactggttggctcccaatgacggttatgggtgtttaaccataacacaaccatcatcagtcacctataaatagagctcatctccctcacttgtaacacacacctcttggatagggatggcaatttccccgttgggggcggggacccggcgggtacccgcccctaccgggacggggatagggcgaattttcaacccgcggggctgcagggatggggccccggaactatgcgggggcgggggcagggccacaagctcacctgcgggtgacccacgggccctcggaatatagggatctaaaatatggcatacaacccataatcaaatttaagcccatatagcccaatatatatatagagatcagtaaagagaagccaaccctaaaatcaatcccgtgagtttgtcacctagccgccaccaatctctattctcgttccagtagttttgacttttgacgctatcccacaaatcacgcaacacatcacacgccgcatgctgcttcctcacctccacaaatcatgcctcgcgagttggtcccgcaccatcaagcagcagcggtcggcgctcttccacgctgctcgtatcgttgctctcacggacgccgtctcccaatcctgcaatccgccggcgccccatgtcgttctcctacctctctagccgtcggcgcctgtgctgttctcctccttctccgaccgttcctctcccttcgactgctgcaggttccccacatcattattcccttcctccacccggctgctgcaagttcccaacaccattctttccttcctccggccgctagcagtcgccgctcgcatctaggtgcggggacccggaaatggtgcggcgccctggaggggctgggggcagggattgatttcgccccgttcctcactccgggcccagggccgtgtgaacccgcaaggatgcgggggcggggccgttcctatccaacccgcacccgccccgtcccgttgccaaccctactcttggagtttgttgtgtgcttcacggaaagtgaggtaggcggcaagtggtggcagagtttttatgcactcttacgttcgggtatgacgtaagagtacataaatgccataaccacgctgggagaccagtagtgagtggtctctcagtagtgtgtttggaactaagtcctatgttgtaagcatgtatatgttaagtgtatactgaatatgattagtataaaagtaaagatgaattgtagttttctgatgctaatttcctactagcaggggcgaagctaggggcgggaggaggcctggcctcccccaatcagcagccgattcaccctaccccctaaaacaaagaaaattgatacagcatcacacttgtgttgatcgcctgatcccctgaattagttctgcatcagctacgtcatcattgatatctagttgtgagatgtgttagatttatatgtgtatgtgtatcctaagaaaccattatcagtttgctaatgacgcatggctgccgtgataagtatatatgtatgtgtttgagtttacatatcagtttccactttcctactaaatttgtagactaaatttgtagctgtagctgtaggtgtgtgtttttcttgcgcttgagccatgatgattaggaaactaattatacctattgctaattttgctaagtttttttttctaattactgtcaatttatagacttttagctctgatattttttaatcatctatagaaaatctttaaatttatatatatttatacaatttttttattgtaatcatttgttaagctggccccctcataattaaatcctagctttgccactacctactaagatattcttatagaggtgcatcttctcataattaaatcctagctttgccactacctactaagatattcttatagaggtgcatcttctgtgtgtccactacctattaattattatcctaactcatgtttgaactatggtgaattaattataagttaattaaggagatataataaacatatct

SEQ ID NO: 12365 - DNA, 1444 bp, Oryza sativa
gagctacaaatttttacggaaattcagttgaacacgttaaaaatcagacgacttgatgaattttcgtcgaaaatgcacgcgcgcacatacaaaaatggagattaccagtggtagctccggtgtcaccttccggaggatgcgccgcgccacgtcagcggccatggggtgcacgatcgccgaccggtcgaacaccggcgcggggggagatggccggccgcgcgccgccgccgaccacacgtccatgaaccgccagaagctcagcccatccgccacggcgtggtgcacggccacaccgaccgcgacgccgccccggtccccgccgccgacgaaccgcgtcacctgcacggcgagcaccggcgcggggagctcgggggcctccaggctgggcacgagccgcaagaacgccgggacgtcgtgccgcttggcggccgacagcgcccgcgcgtcgccgtcgctctccgcctccaggaacgcgaccccgtccccgacggcggacggcgagcagtcgacgacgacgtcgccagtggaggggacgtacgtgagcttcccggcgagggggaagaagaccgcgacggcgtcggcgagcgacgaccttagcgactcgacgagggacgggaagtagtcgtcggcgccaccgccgccgccgtcgtcgtcgtagaggaagaggcgttggatcggcggctgcggcaagaaccagacgtcgaagagggagagcgggatctgctcgaggtgcggcggcgagcggcggaggagcgggacgcggatggcggcaacgactctcacctccgcaccggaagccattgatccgatcaagctagctagctatactagctagtgactggcaaagtgacaatggtggttcattggttcaagtgtgtcgtgtaatcttgtcgcattgcctgcctctcgatctgtctgtagccaggattattttgcagttggggttttggcgtaggccatggatccaaactttcgtggatggagaatattgtctcatattgatgtattaaattaaatattataaagcgaacaaatagtttagaaaaaaaattatgtaaataatgttgatgtatttcttctgttctaaaatgtaaatatttttttagatgggcacgggaattaaaaaagtatatagaaataattggagggttatgattggtggagaaaaaaagtaggtgaaggggaatgtttgtggttggttaagaggagagggcatttgaaaaaaaaaaaagttttattttgagataagttactgtgatagaaatagctacattttacaatagaggtagtagaaagttttcgaaagaacagcatggcacgaataacccatacttccataccacaatgataagttctactccatatggattagacaagcacaaatgatgctatgccatttgatgcgggatatattgatgaatatgtatgctcaatattataaaaa

SEQ ID NO: 12366 - DNA, 1950 bp, Oryza sativa
tacgcaaatgggcatggtcgagagcatgcctgccataattaatgatttattgacaacgaaatggatatatatatatgatgtataattaatatgacagttacagagatttacagtagtacaagtgttatccatgtgagtacgtatcactgatgatcgaacattgaaatcaatggatttcaaccagattttcttcaaccatagaaatgtcgtagtaatcggatatatacactagatatttcgtgaggatttgtatgcatggtgaccgtgcgcttctctgttccattagggcatatattaatttggcaaaatttattacagatccagagatcattgattccagttttgggctacttagagcaggtacaataacaggctataagccagctataaacatattttaaaaagataaaggaagagagagaagagcagcgggctacagatctgtagccagctgcagcacggacgtcaagacataatgtgtgtatgacaggtgggaccaggtattgatagtatagtaaacaactattgtatgaattggctatagatgatttggagctagtagtgggctatactattaaacttgctcttagggcagtcccaacccatagtgtccataagcattgtttatggtgccatgttaataagacgtcacaatagaaactacactctacaacccatgatttcttaaagtgggccattaataaatacatcatctctcttctctaccaatcatatttattcttcatctattatgaacacactattctcccaatgcaaaacttgatagtgtctagtgcatataggttctcgtgttgaagctgtgtcttgcatgagacccagtttcttcctctcttcactctctctcttaattaatatagtgccacataagataaaaatcctacatgacaatgtagttaatgtcatagacaccatcctaggtggagggttgagactgcccttagtagctactatagaagacagcgtaaaatcatactatttatgttgtaccatactcaaaataattttgttgtttgctactccacactatgctcctgcggtaaaaaaaaaacacatcacacatgcgattttattatatttaattttaaatacatgtatacagctgcctattcccttaattatctgcaccttctttctccccttatttcttttccaaaccacctcacgccaaggagcccaaatctgaagggtatttttttctttttttgaaaaaagaaaatattacagatgcatgctagctcaccatgtgcacactaattaacccctataaatacacatgcacactctactacctttatgagtatatctaaaagattagaccagcatatcttaagattgataaagttatcacggatgtgtcgctggtgcacgactaatacattacctaccattaaatgaataattactcataaacgcaagcactcgttccaagtttagtatgtacttgaacccggatatatgggtaggttatagcacaagaaatccattgaattgagctacgcttcctacgtaaatccaaagagtaaaattggaatactagtttgaaccaaataaaatgtacttgaccccaggtcgaattaattataaactttgctttaccaaattggtcttgtaatatataagtccatcggataaagtctccgttacacgctagacaaatgtcgccaacacactttcctccgactttttatcgtagcgaatggccgtggtacgcagcttcgcgaacgatcgatcgtttggctgcacgcattcggcttgccaaggatcggagacaacttcctccgatctagaggcgctttgtcatttgtcaacacaagacaaaacaacacgtacgttgctacctcgatcgcatataagcaccatgaactatatataagataatcgatcgatcgatggatctgccctttggagaatgcgtgtttccaacgtaaa

SEQ ID NO: 12367 - DNA, 7997 bp, Oryza sativa
caatatttgtctatatttatttagattggagatggtgaagatgatgttgagtctattgaattcccaaaatgcgtggtggcaagcaattagtgtctagtgggtatatgtgcttattgtcctttttttgttatttgttggcttgttgttgttgcttatcatcttgttaacacagtgctgtttgttgtactattattgaccctataggaaagggaggaggactgaaggagagacattttgccatggatgagaagtgttaactgaccatgccttttgtgtgtttgcatggaaatacagaatgatggaacttaaacaatgtatcattctgctatgttaacttatgtagttatatttatgcgcccttcctgtctagctgatgtagtcgtactttgcaatttgcatggatgatagttgatggatgaatatgtgatggagacatggacgatggacctaatttgtactctattgcgtgtatgcgcatgatgcttgctgctagcctgcatgatggataaatatgtgttatatgactcattgaaatgtatggtagtttacattttacatttttttgtccctggctcacgagccaaacgagctagctcgagctttttgccgagccgagccgagctagctttttagctcgttagggttaacgagccgagccgagccagctcgttatcttaccgagcctgaccgagccgagccgagccgagccgagccagctcgatatccagccctactcccaagcgatcaaagcccatcgtttccgccagccccagtcactgcccaggcgggcccacccccgtccacgtaagcagcagcgccggaaccacacgttaaaacaacaagcgcgcccgcgcgcggcggaggtgagagcgaccggcccgaccgagaccggtccggtcctcgcctcggccggcgcggttcgaactcgaactcgacacggctcgcgacgcgagaagcccccattcccaatccgcaaattcacttctctcctctccccaaatctccacctccaccacctctccaatccaatccaaccaaaccaaccaaccaaccctaacgcggcggcgcggcgagcgatggcgtcgatcccgccggatgacgacgcggcggcggcggcggcggcgggggcggccgagaacgggtacgggaacgggaaggggaacggcaacgggccggcgccgcgcccgccgtcggcgaagcggccgaggtcggtgatctcggcggcgcagatccgggcggagttcgagcaccacgaggccggggtggcgcgcgtcaacaacggcagcttcgggtgctgcccgtcctccctcctcgacgcgcaggcgcggtggcagcgcctcttcatcgcccagcccgacgacttctacttccacgccctccagccggggctccgccgctcgcgggctgtcgtcgcgggcctcgtcaacgccggggacgtcgccgaggtctccctcgtcgacaacgccaccaccgccgccgccatcgtgctgcagcacgccgcgtggagcttcgccgaggggaggttctcccgcggggacgccgtgctcatgctccactacgcgtacggcgccgtcaagaagtccatccacgcctacgtcgcccgcgccggggccaccgtcgtcgaggtgccgctcccgttccccgtcgcgtccgcggacgccatcatcgccgagttccgcgccgcgctcgatgtggccaaggccggggggcgcaaggtccgcctcgcggtcatcgaccacatcacctccatgcctagcgttgtcatcccggtgaaggagctcgttgccatctgccgagaagagggtgtcgataaggtgtttatagatgccgcgcactccattgggcaggtccctgttgatgtgcgcgatattggggccgatttttacaccagcaatctccacaagtggttcttctgcccgcctgccgtggctttcttgcacacccgaaaggatgatccgatagcctcccagctccaccatcctgtggtgtcgcacgagtacggcaatgggcttcccatggagagtggatggattgggacaagggattacagtgcacagcttgtagtgcctgaatctattgattttgttaaccgatttgaaggtggcatcgagggaataaggagccgtaaccatgaaaaagtgatcgagatgggtaagatgcttgctgaggcatgggggacttttcttggcacaccaccagagctgtgcggtagcatggttatggttggtcttcccggttgccttggtgttgaaagtgatgatgatgtgatgagaatgagaacaatgttgaggaaggattttatggtggaggtgccaatatactacaattcgagaagagtagaagctcaagaaatggcaaaggataagaatggtgatgcagtcacagggtatgttaggatctcacaccaagtttacaatgtaacggaggattatgagaagctgagggatgctgtcaataagcttgttgctgatggattcaccagcagcaagttgcggccttcgcagaaggtaccatctcgctaaagttgcattcgctttaattatttcgttttctttgtttgcttactctggttatccattgatggttgccctgactagtgtagaatttgatagatgccattacaactccatggttgttttatccactggtaatttggttactcgatatagttgcttttgagaagacatgtctttacaatccatttacattcttaggcattggttacttctgatgaacatcccaaataagcttcaggttctaaccatatatttctgaatagatttgggtttggtggtaaagagtcaagacaatctgttgcaagaaagtcactttctttttcgttcatccatgttttgtcaaatgcccacacataaagttttacggattgttccatagtcataataatttagaatttactaaggtttcattgacactaaacttcactagattttctcatcaataattgatcttatgcaagtatatggtgatctacagtagcatgggtttatctatgtatggattgtgaacattccgatggtatgcagtacgaatctttgctttatgtccatagaatgtggaaaagtttgtcaaaattgttctatgcatggttgaagccacatttttttaaaaaaataattatgtgttagcattctggtagatcaaaacaggcaaaagaggtgctgtagtactatgaagtgtcaagtaaaaatcattttaagccattttaaacatatttacttggaagtacatagtgcttactagatttctttgagcagcataactgcataagtatgtttttacctgttagtgtaatgtttgcagaatcaaaatgaactggacattttgactttttaagaggtgttgatgtaatcaagagaacaattgatattaactatcttatagaaaatacaactgatttaaaattctagaactgatcgtgtttagttgtactactccgaatgaatgattccatttctgcattagccttattatactcctgattgtatagaaacttagttctcatatggcatgaggtgtttacatcatcgaaataaaaaatttacgatgaatgctagtaatgcttactacattgggcatttatactgggactaaaatgttggtcatgatgtcataatatctttctgttttgaaattcaaaaacagctttttgtgaattattattgctggttcttgcttttgattagtgcacattgtacttaaggaggattatatttattcataaggaacagttattgtatttggatattgttctctgtgtgcataacctctgtttgtagtcttgttactggaaattagcgaaaaaagcattgtagcactccaaagcatatgcaatgattctgattcactgtttaagacctttgtgagaccctgtgttctactcaagttaggacagttgttcatttgctacaccggtaactttgctagtacctgtaagatagggagctgtgcctagaagcaaaattctgtgttattgtgcattttgtttgtggaaggttccctcactagaaaggtttaaagtattaagtttcacattcaaacctgaaaatcatctggtccttaacttatcacctgatttttgtttaagaaagtatgcaatcagcatttctaggttaatcgcctgaatatattggcttgcccaacaaactgtttattaattatgctaaattgttctagaggaaaccagagaagatgcattttctacttttattggctttatgtagtactagtaataagggatggaatttttcttttattttgtattgcacataattgaaagcagccaaactttggtgtagcttggtccagctagtcttttttcatgaatgaaatctgtattttgtcatcagggtgccaaatgttccttaattttgttggtaaacagtctatggattgtatgggttttcttcttcacatgttgtgtatctggggctactattctaatatttcattctgacataattttgaggcaaagctataatgcgatctaattttttatgttctatggttgcagcaggaaacgatggcctgatgaacattgcagccaaccagcactctgttggaagttatgttgtggccgactacttagatgtggatcgccgtgacagccagcgctgcggtgtgatctagatttagcccgccaatggcgttgccagttcatgtagtgtactttcagaaactgacagaagtgttgtatttgcaatccgtccgtcacaataatgcactggcatgtcttcccccttaccctcattttcaagctgtaatgtaagaacaacaataatctgaatccaaggagaattgccgccgctgtagattgaattgaatgctggctaccgatgatatcgtcaaatggcaatggaattgtggtgaatcatcttcagagagattaggagggcctggagctgtgaaacattttgaagcctggagcccctacctcatgtagagattagagctggggacaagggaattgatggcttctcttttgtggcatgtgtttcttggtgacggctttgttgctttctcgcagttagggtcagtcactatatattaactcgattcagataagtttgccgtgggctgatgaaaaaaattctgatgtgtatgaaattgcttttcatctgccggcgggtcgtcgccggctggagcagtctgctctccggcgagcaggcgaccaggcggcggaagagaaggacctgtccggtgggcgatggccgtctcgtgcttggcctttccacggttcgctcgcaccaaagtaagcaccctgtaaccctcaaggtccttaagaaaaaaaaaaccgctttaaattagattatccacaccattagatgaggtgaaagatttagtaaggacaatttaaataataatactaaaacatgtctcctggatttgctgtctttggagtttcccttcgcctgaattttgatgtcataaacaagaaaatattctgaaaacaacgggtggatatgatattcttccttggcttatccgttcagttgccagccactcaagttattgcaaaaaatataaaactccctctatctcattttaagtgtaaccatgatttttcgtacccaactttgatcgtccgttttatttgagaatttgttgaaaaaaaacataagtcacatataaagcgccgaatctaaaatcggacggaggtagtattgcctcgcctaagccatcaacaacgtacagtatgtatcaccaagtcagtgaacaccttacctgcagtgctgctttctcaaatcttgcgacaccctacttaaaaaaagttttccttggcatccttgtctaagcacgtctttttctgcctctaatctaaacaatcaacaatggccatttcttttaatcttctctgtacttgaaattcttgtcattgacatgtagggcagattgcatttgagcccacatgtcagtcgaactcgaagagtactagtagtagcaggtcggtgtgctcttaagtctaaacaaatatcttcgggtggtttcttctggactggacagagccatgcgaacaacgcttttatgaatcgtctcatcttcatgtcctattactcctaccactgagagagggccactctttcccctcgagttcttcaccggcttctttcccctcctctccggaccagggaagcagctaactgtctgcgcaagaaaggtatgagtccaggttcctcttagcttcttaaattacttgcaatcaactctgcagttaagttatttgggatcctatcactctgtggtgcataattatctctactgtgatgcctcagtatgagccttaaccttgacatattggtatatcagttctttgattctcactctctttgttcttgtgaactttggtgcctttcttgatatttgtccaaggatgatggaacttcaactccatggctccatttttacatgtcaattaaatatctatgtccaatttctgaatttcctgccataatagcatatattcgacactggaagtcaaacagctcaacgtgatgaacccttcttaatgataccggtttacaatttcaagatatccatgcgctcttccttttaatttgttgtctatattttccaaatgataacctatcataggataatttgttgtctattttcccgtattctgctgattaattagcttttataccttaggtggttcaagcacgatgggacggaaccatctttgcctggtcacttgcttgtggattctgtcatgcgcagttctgcttcatgcttctcctgatggattgctgagaattagcctgaataagaagagattggacaagaagaccttggacggtgcaaaattggcaagggaggaaagccatcgtctgagagccgacggtttaggtgatgacatagttcctttggacaactacctggacacgcagtactttggagagatcggcatcggcactccaccacagaacttcactgtgatattcgacactggaagctccaacttgtgggttccatcagtgaaatgttatttttcggtaggttcatcacctaacagacttatgaaactattgtgcacgtatacagtagaaaatgactgtatttttgtaaggaagaatgtttgatgttttgatgtctatgctttccagatagcatgctacttacaccacaggtacaagtcaaaagggtcgagcagttacaaaaagaatggtatgatagatccagtggcatctcaatattgtagatccttttggcaagtaaaaccaatgtctattaagacccttatactgttattgggatttttattttcaggagaatcttgcagcatttcctatgggtctggatcaattgctggtttcttcagtgaggatagcgtgctagttggggatcttgctgtgaaaaatcaggtgacttatcgcactattgtctcagtaaaacatttagatgcatcattgttgatgctgcaggtccatttttctttcagatgttcattgagacaaccagggaaccgagccttactttcatcatcgggaagtttgatggaattcttggacttggatttccggagatctctgtgggaggagcccctccaatttggtacctactcagaccattttataaattgtgattatgtcactacctaagtgatgattatgttttaacactgttctatgtgatatggggaaaaacaggcagggaatgaaagagcagcaactgatcgagaaggatgtattctccttctggctcaaccgcgatcctgatgcaccgacagggggtgagttaatctttggtggtgtagacccaaatcattacaaggggagccatacatatgttcctgttacccgcaaaggctactggcagtttgagatgggggatcttcttattgatgactactcaactgggttctgttctggtggttgcgccgctattgcggattcagggacttcattgctcggtggcccaacagtatgtaaccttcaatctctaactaatgttatgggcctttagtgtggtcctagaagtta

SEQ ID NO: 12368 - DNA, 930 bp, Oryza sativa
ataaaaaaaattcgtttcatagcgtcatctacaaaatctcatccgtcgccgtctccgcgctcgcatggtaatccgtcgtcctcgccgggtcccagccggacaacggcggcgccggtgccaacgccgacgctgacgcgcgcgcgcccctcgtcttcttcgccgactgccgccgtcggctggacccgcccgtcgacgcggcctacttcggcaactgcgtcgccaaggcggcggccgcgcgcgaccgacctggcccggccgacccccggcgcggcgtcctgcatgcgcgcgcgccacgcgatccagagggccgtcggcgttcgtggcgtttgctccggcagccgaggttcgtggcggcgtccgcctcgccgcggtttcgggcgtacgacgcggcggattttgggctggggcgcgccaaatcccagccaggtacgagctctggcaacaacgaagcactaccaaagccgtagatatgtctccattgattgaacacgttcgaccatgagatcgcaaacatcatgcttgttaggaaattataggcaaataaactataaaaaacaatagatcaatcatagaagatatgaaatttaacgtgaaaaaccctcccaaattagaagagaaaaaaaccattgaacgtgaaaaacctttccaaaatagaagagaaaaaaaccattgacgtcagcaatatatcttcactatatcaaggtgagattaccacactgaacggcagcttacaagatatatatacaaaggtgaaaccctaaaatataacgatcacttctgctcaccctctagcatctacgggcctccgcttcgctctggtaaaagctacatttattatgtataaatgaatttggatcacagctcaacggtgctgtcactcaccagtaaagaagttgcgacctaaacgcctccatatgctccggacggagc

SEQ ID NO: 12369 - DNA, 1572 bp, Oryza sativa
ttttttactgctgtcagaatattgttgctcaaattaatcaagcaattgaagctgaggaaattgttagtatggaatgcaaacaagttgtgggggactacggggacatgatcctcgagatgctcatagcacaggtttgccacttgtctgaacattggattgaatttttcttgtgatgcttcatttttttcattgatcttggattctctgaccaaatataaaataattttgtgactgagcaggcaagccccatgaaactgtgctctcagattggtctctgtgcatttgatggtactcgttctgtcaggtcagcacaacacatacatgacattttaattgccatcttaatatatctatgttcctcctttttgttccctttccatgacagacttgtttcacgaatgaatatgtagaaacaatatagagtctgttgttgataaaaaaaaggtgggctcagatctttcctgcactgcttgcgagatggctgttgtctggatacagaatcagctccgacataaccaacaagggagctcattttgcaatatgctgaccaggtaagtagtgatcattacgtcctttgctatgtcgcaccagcctttcctgattgcaaagcataacattccaatcccaatttaccgaagctctgcgagcgtctcccaagccccaatggcgaatcggcagtcgactgcgatgagatctcaaacatgccgaacctttcattcaccatagcaaacaagaccttcaccttgacaccagagcaggtggctccctcagtgacacacttggcccatcctcttaagctatactcatgcttttctaaatctcaccgtcgtcttcttcaactatgcagtacgtagtgaagctggagcagcaaggtcaaactgtttgcatcagcgggttcatggcgttcgacgtgccacctccacgcggcccactctggtacacaaattacactgtcatcaagaagcgggagctccatgttgttaggttctttgaccgtttgacgtttagcttctcgttatctgacccatcttgttgcattgcgtttttgcaggattcttggagacgtgttcatggctgcataccacactgtcttcgactttggcaaaaacaggattgggttcgccgagtctgcttgaattgcttggctagggccttcaggatcatacaacatatcaagtattgtaatgtttgttaggcagcttgtttactcggtattgtaacctgggaatgtctaaaggtatagtgcattagtagtagcatgcaaaaccttgtagaggaataaacgttttcacgatggagctgtatcagctatggatatgcagatatggatcttggatggtgcaatgcagatgtaatgagcaaatgagcacgatgagaattagggctttttaatctgatctcatcatataggtaatggtttgtctggcatataatgatgggcctaaaacttctggcgaggttaataatggctgtactgactgtttatgcaccttaacattcagagttcaaaatctctcattaaccaatttgtgatggatgcagctatggtgatctttttttttgtttgatgat

SEQ ID NO: 12370 - DNA, 1602 bp, Oryza sativa
atatatatatatatatatatacttaatatagattgtgtgatgtatatgtattttgtattatgagttttttggttagtgtggttttaggctaacgtaattgctttcaattccacagatgttttattttgtccaatatttggagttggtgagtttacttacttgacaggattaacttcacgtagtgcaaattaactaattttactttgaaaattgcagtgcacgctccaactagtttatgttgagcaataagctctagttagctcatcatcctgcctagtactatatagctcagtcttatcttgaatcctactgtactttatgtaaaataaatcggtgtgattattgtacttaattataacttgacacaagcatgactacagtttgagagtcatacatatattagtacctaatttctagaaagttataattgactagaatataatccaggacactagctaatgattgtgtacatgcatgtaatggcacatatgtacgtacgcgtaggttctattcatgtctgtgtttttgttcgtatatatttctacttgggcaaacatatatagttttgttcttatagttacataactccttgagcacttttgtaattaattcgtcagcaacaataccatagatcgagttcgtccacatattaaaatcttcacgggtttgaatgtgttcgtcctcgtacatgtgtgcacatccacacaagtgaaaaataaggtatcatccggagaggcagattctcgtcgtatcgggcctgttcactttgatgccattttcaatcttagcaaattttggtaaagttataaaaaagtggttatatttactttgctatcaaattttagtaactatataagaaatcctaccaaaattttggcaacttggtaaggttctttttttgcgttaaagtgaataggccctacgtaccaacaattatgctgtgtttagaggtggaggttagaaactatatctccccacacacaaaacataatgatccgttagcgcgtgtttatttaactattagctaaaataaacttaaaaatagattaatatgattttaaaacaatttatatatataacttttttctgataatacgtaccgtttagcagttgtaaaacatccgtgtggaaaatgagggagtaccagtcgggaagatgtgataaaaacacacccttaataatcacttaattagccggacagttttaattaattaagataatttgaattagttgtaagcataactggatggttaattgttgttaccgattttatttgtttttgtctgctcgcaagtatagcacgtacttacgtacgtagaaacgtacgtatacgggtagtattatacctgcatcatgagggggaggtcgagggggtggacaccgggggcggcgtcagggaggaggtcatcctcagagatcatgagcgggtggtcaaggccattcacatcatccaagctccaaccagcaacagcctccacaaaccaagcaccctcaccaatgcactccacacaaacactccccaacccaccaccaccatccacaaacctccccacaaactaatagtattccaccagcgccttccccagcacctccttaatcacc

SEQ ID NO: 12371 - DNA, 4586 bp, Oryza sativa
tatgtaaacatggaggaagttggaatgaatattaacatatatcccatacatatatattacatggttaatattctaatcacatgtggtaagtccattaaaattttttaaaatgcccccaagctaccatgtggtgttctagtaaattagaaaaaatattagaaattctaaaaaaacaaagtatctattacttgattttcgtttaaatcggtgggtccaatattataaaccattagattaaattgatcttagaacaaactaaatattacgaggtcccacctctccacctttggtaggcacctatgtacgtgggtacctacgcttcccctccccattttcatttttccctttcttcttttctccatgtatacgcttccctccctttcttattatatcatgcgccttcatgagacaatttaatcgcaagaattttgagtatcttgatctcgcatttttcatttgtagccatactacaagcaatagtttattatttactcgagaaaaaaacatgattcaaaagtcgtaaaagtcgtaagtacttaatccatctcctactcaaaagtttgtgaatagatttttaagatatcttaagaaaaatagaacccttaaattattataaaattaatacaaaataacagtatccgaactttagttttcccttaatctatcatacaaaatttttgaacaaagaaaacaaatcttacctttcaataatacaagtgcccgcgcatacgcgcgggtcaccttcctagttaataagttaaagacactatggagcccacatgtcaatgaagcatgtcttccttccctatcctctctctcctctctcctttctccggttctccccacaacgagtcaatggcggtagcggccaacgaggaaggaaagcagcgacagtagctaatcaaggagggagctgcaacaacggaggagaggacagagtcgaggaagctatagtgagctcgaggttgcgaatcccgtccgccataaggtgctggtgcggccggcgaggaatgcagcccactgatatacacgccccactaccgtccctcgcctcgtcgggatgctccacaacagaggtcgtcgtctccaactgcgtatcccctttccaccgacagactcactagctaccacgacatcgacaacgtacgggagtcatacgttgaagcggagtgcgccgaggtggtgccctcttcgctggacaatggccccactatctccaatcaaatcctcgtccgatgctccacgcaccatcatcgacgccccctcgggcgccgccgcttgccggcgcaaccaccttctacttttttcccaaagcctactagtcccgctctacaagcgcgcctgcaagaaacaccactacatgaaacgctgccaccaccagcgcccagctccgtccggctcgtcatcggtgatgcaggccccctagcccctccagtcgtccagcggctcttgtccccgctttgggagaccgtcacgaccgcaagaatcaagaaaaaggaaggccgattttttttaatctacccacatgcgacctcataattccaaatgtgagcatgtattgtcctgattcctgtttctaatcaaactagctggcaggcacaaagcaaatgatccattaacatgtttcgctagtattacaattaccctttgttaagcagcttctatgtaaacaaaatcaagttttattagcacacataatattatgattccgatgatccaagcagatggattatatttcaaccgaccgccacagttccaattttcaaaacgaaaacaccatccaagtcaaatatggattaagaaaaaaaaaaaagccgaagaaagctcgagactaacggcatgacggcacggtgccctatctcgtaatggttgatccacccaattgcaaatggtaataagattttcttttctgacgacaaacaatcaattagacctaaacaagtcgctacgagctagtgatttgtccaatgatcagcaaccattagtttgttatatttcgtttgacattaagtctgatggaaaaccactgcacacacacatgtgggcttcttgattaaaaatagaactccatccattacctactcatatttggaattagaaggttgcatgtgcttaaatgtgaaaatttcggaaaggaagtggaaaaaaaagtgtagaaagagaggtgaagagggaagagaggtttctcgctgaaatatacgaccatcacatttttatttatttattttaactgaaatgccacgtaggataaacgcaccattcaaatcgcttggggaagtaaattgaattggttttaatagtttgggtatcgtcttttttgggttcagggacgctaatcaaactggggctataattaggggatgaagagtgtgaacttaggtctgttttggattagtgccaaaaacgtgccctaccaatactttggtagtttgaacagtgtatctggtgattttggtttgaagccaaatcattggcattgccaatgcccaatttgatattttctatattctactcaatgcttggttctaaattggcctcaaaccaaatacaactctaccctaccaaaaaattggtagtaccaaaacttgcctaggttttggcactaccaacattttggtagggtattgaaccaaacaagcccttattccaccgtaatatactgagcttttcaagggcgctgatgggccaaagcctgataagagcccatttgttttcttttgtaaccagtccactccaagcccagaaagtaattagcctaggcctagttaaaatcggcaaatgagcgtgggcttttatccaggccacagccgccgttgagttgaataaattggaaaaggttcactttaggtacctcatatatatgtagacttccaatcacatcccttaaccgtaaaatcgagtatagatcgtctcccaacttctacaaccagtgtaaatcgagtctgtcagtggtttttatagcggttttgattgacgagatgctctatacacggttttgcagttgtgggatccgattgcaactcgacctatactttagggacctaacattaacttttccgaacagaatttgaaagagcatgcagttgagcatgaaaataagcaagtatttccccatgggctatcttaacctaaaaaatgggccttaagagaatgttcttaattttctgagacaatataatccatttttgccaccaaattaattatgcccagctcacggtggtagtcgtaaaagaaacttactatacgtgcgagactatttcttgcgtacagctacggcattctcatctacctattgtatacgtgtacacagaattgcttggtttgtgtatacaagtatccacacaattaataatgtttgcagccacatgcagcaacaacccaataaactaattaaagagtaacatgctctcaatatcctggccggataaacctatttcggctgcgacgacataaaactattcctcatcacagtagtactttgagattcctaacaaagcctgcccattatatatctccaagagatcatgcactaacctaaaaatatagaggatcatggcgtactaggtatatccattattagtttattatatcacacatcgcatattcataatttccaaccatgattaccaagataattaattaaagctacagacaaaaaattaaaaggacgtacctacctaccgtgatacattgatacagggatgcacgcaatggcacgatcgatcgatcgatcgtacgtacgtacccatatatcgggctatacggtgtgaacgtacgtactgaagaattgatcagttcttcgtttcgttcccttgcagcaaaagccacttgatagctagtagatagttcgtcagttagccgatcacgtgtgctagctagctgtcacgggagtttgtgaaaagaaaattttttggtgtcacatcgaacgtttaactggatatcgaaaggtgttttcaaacatgaatgaaaaaaataatttcataactcgcctggaaaccacgagacgaatttattaaacctaattaatatatcattaacacaaactggttactgtggcacttatgactaattatgaactaattagtctcaaaagattcgtctcgcgattcaatacaaactgtgcaattagttttttattttatctaaatttaatgctccatacatgtgtcaaagatttgatgtgaccttttttgaaaaaaaaaattgagaactaaacaatagcaaactaacttaccacgcacttacgcaaaccaacaattaaactctcttgggattgtagggctcgttgcagagatcaaaccggcaaatcggtcgtggaaagaaagcgaccgatgaatatatatatatgtgtgtgtgtagcaagtgtatatatatgtgcttatgcgtgtatgattattgcatgtatcgcgcgggagtatggactacggattcggatccggagttgcagacaaagataaacccataaacatatgcatggctcgcgatctgatcggggatggaataatgcacttgatatttttctccggtcgattaatttaattacttcctttctcttttagaatataagatattttggtttttgctaa

SEQ ID NO: 12372 - DNA, 945 bp, Oryza sativa
atttataataatgaatatgtaatcatgtatttcttctattttaaaataaatgatactgttgatgtttcgtataaagattgattattggtattttttaaaaaaatatatattatttattttgtaatgagtttttttatcgtcaaataaaatataatgttaaattatatttttatatatttttactaaatttttaaataaaaaaattaaatattattgaaaaaatttaagggtgttacatattttaaaaagaaggtactagtactacctaatgatctacataaacaattaaccatctcagcttgtttggcacaatggaatctaaagagtattcgacgtggttttctctgcaataccgctggtacagtgcagtaacagacgtactatggacaagtcgtacaaatgatccacttccaagctgtattttgtaattggcgccgatcgatgctggcaggtagttggatccgttcaggcccaatcatcgagttagagagagattccgtatttgtccccgtgaggcacgcatgatagaataagcatcttgagtacatacttgtttaattacatagtatattcgatgataaattaatactacgactaattgtgcttgattgccagctgagtgtttagcactgcactggctcagctggtacatgagcacgacatcagtgcccgataactgttttataaatgttcgatacaacattctcaaataagacatgaaacatcactacgaaaaatgtataacatttgtgtagaagttgtggaatatgtacagagatccgtgcaagataattgatgcaacatccaaacaaagggggtgaaacacgcaacagcgaaacagtaaaatgcagcacgtacaacgaatcgtcgaaaagatatgtaacaagagactaccagtttaattagaatttattttcttagccttggatcataacttgtcaacat

SEQ ID NO: 12373 - DNA, 3149 bp, Oryza sativa
accctcactccccggcacagaaaatgaagtagcgattagcacgtgattaattaagtatttgctattttttttaaaaatagattaatatgatttttttaagcaacttttgtatagaaactttttaaaaaaagcacaccgtttagcagtttgaaaagcgtgcgcaaggaaaacgaggaggatgagttgggaacatcttctgccgaacgcagccttaatctttatcttcatctgtatttcagtagattcaaacaccaaaaaaaaagtccatgaattgcattgaaattttagagagcatggtgttagcctcggggatgtaggtgcactttggttttatgcggaaccatgcagagtttttaataaattttctacatataaaaaatgcagcttgcgaaaaccacataagcaatggtaacagtcatcatgttgtactccaaataaatacaccaaatactacctccatattttaatgtatgatgccgttgactttttatctaacgtttgaccattcgtcttattaaaaaaattatgtaattatcatttattttattgtgacttgattaatcatcaaatgttctttaagcataacgtaaatattttcatatttgcataaaaaatttgaataaaacgaatgatcaaacgttagttaaaaagtgaacggcgtcatacataaatacggagggagtacgtgttatatatgaataataataacacaaaaatggaaacacaggcaggagtagtaagatggatcactgcatgctccatcccgccagtagacataatcatgcattacggttgtattaatttgtaagcaaatacacagatacataacatggaaaatggaacacgtacactgaggcaaccgcgatagtacatatatatggccatggatccaagctggcttactgcatattctatgctgatccatcccagtagacacataagtacgcattacgattacttaatttattcttaattaagaacaatgcaagcagtaaattaaattgttaagctaataagtaagcaggcaagggacacatgcagtaaattagtctagccaactctgggggtttcagcgacggtggcgctgccaaagatgcggacgcggttggggcgcagatcccgggtcatcggcgcccccaccggcagcaccacgatgtcggcgtcgggcttgtccttgagaatcgccgccttcgcctcctccatcgtcatccccaccacctccggccacgacctcttcgccgccgccgaacgcacaccaccgcccattctcgccggctaactagtatacgtagctggcttaattagcttgatgatctctctgtctgtaattaatcttaatctatctctgcacggcttgaaagattcatctggttgatgtgtatttatagagcaagcatatatatgaacacgtgacacacgacgatcgagctgatgatatgtatatatgttcatcgagaactttgcgtatattaatcgtagtaactatatatccaacttgctcaacaacttgtgtgtccatcgatccagtagttgatagaaattaaattaagaagcttgctagcacctaatccacatgttcacgtgaaacacaccaacatctaactagttagttatatatacgcagagtatgtattggccgaataggaattttgcatgaaacaaatttgcatggagcaaattcatctgaataaattataccataaatatcagtgtattccctttgtgctaaaatgttactccatccgacccataatataaaatattttggagggatgtacacgaaagtaattaatattgcaatatagtaccacctatttatactatctctgtcttaaaataaaatatataaaaagattatggctaccagtatggacatgttaatttgggacagagttagcttgctaagctgccgtagaaagtgaagctctggtaatattcaattaaaaggaaacatagatggccagctcatatattgctacttgaagttcaggaaatactgcaattaatcagaacatattcgtttgtaataagccgtcgtctctcaactttacgtcgaatttgtacagcattcccagggcgggggagccgccaccacctccgcccgccttagctacctttgcctccgcccaccgccgcgcttgcccgctgctgcggtgaagggagcaacgcctgtgagcggccggttgttagcctcgacgggttccttggcctcaccaacgcctccacctgtcacaccgcctccgccttgtgatgtggtgaagggaggtgagcctccgggtggctgtgaagagagcagcgcccacgagccgccagttgatagccacaatggattccttgggctcaccaacacctccaccgacggcaacgccaccaacaggttcatggctgtggagctggacgcagtgaagcaacgggtatgcgtcacggcgtgctactcaccgccgtcgttgttgccattgtcggaccctggggccaatgacccgccctcgaggaacgccacgaagtcgctcagcgaccgacggtgcgcgcccaccgcgacgcttcgaattcatcggccgcccaagctacgtccccggcgctagccttcgacatcaacggcgtccgatccactgccgttgtcgccactgtggaagctctgcctcgttgtcgggtgcggcggcggtggcggcaacggagcctctcaaggtggccgcctctcccccatttgccgccggcaacctccggagaagagaagaaagaaaagaaagaagagatgttggtttcacttttttttctctcatttacatgtgggtcccacatactttttttttactatataatgccacgtcagcgaaaccagacatctatactgctatgggacctaaattatatagtttaattaggggtgaaggtttctagtattgaggataaaggatgtcaaacaaactcggtgtaaagttgaggggagagaggtgaacttgttcatattcgttttgttgttgggcccattatctactatccagggtagtgcgcatatggcccagcccattaatcacatccaagcactttacaattaatttttgggccttattccaactaaaagccgcttcatcacgaatttttttctttttaaaatttatttttttaatattacagaaatattatgtcgg

SEQ ID NO: 12374 - DNA, 29595 bp, Oryza sativa
  unsure (1)..(29595): unsure at all n locations
atatatattaatgtgccttagctcgatcgatcggctttttcttaaaaaaaatgagagagaaatgccagagagctgcggattcaattaagaacaaaagtaatcgccttttcagttttttgacagagtccaggaaaccacgtacgcatatatgcaagggaagagttgaaaggttgggcaagaaattaattaaaaaaccacattccctttcttttggtttaaaatactagtatcttcacaaaaataagccttgcaaattaattaatcactaattaaaattaattaatgtgattggcatgcatctctagactaatgcaaaaccgcgtgtgacatgtttcataaagtttggtagaggtgtttgtgttggtaccatcgatcgatcagaattgaataccatcacaattcacaagtactatacgttcttcatcatcttgtcatgcatgtatgactcactttagagttaggatttggccaaccaaaatcttaagtactcgtaatatttaagtcacactaaataattaattattagttggcagcagcaccaaattaagctagcttcagatcagagtgatcgatatgaggcgtacgtgtgagatgagttgccatgtttgactaatcaaattaaaccctcaattaagtccatgtcactagctattacgtgcgtgtttatctcttcacctccaatgcaagctaattaagctagctatttgctggtcgttgctaatcccttctttctataaagttaaggctaaaagcttaaacctcgtgcttccacgtcatcatcaaattataaaccattggatgaatgtattagattgcttctcagacgttggatagaatacagcctagagcctaacccatcagtcaccgggtgagtctcttcgtctcctcagtgccaaatgtagcccacataaacatattggccatctccacacacatctacatgtatccagccgtcaatccgtataaaaaagctttatggctgaacgctcattcaattgacatgtgctacctaaattatctacaaattttgataaagctgctaaaaagaatttctccaagaaagctatttgtttcttctgtttcttcttgagattataccttttatctaataaattgatgttaaccaagtcccgcagcaacacgcgggtcatcttctagtatatataagtagttaacccataagctgcatataccatcatttttagtgaaaaaatatgtatataaccatttagttaaccagtgacggagccaacgacaccgtcaagcccgaatgacgactgaacggtgattcatagtatgatcgaccaattttgatgaatgttaatgatggtcgatcgatagtggaggtggtagtggcggagcctaggcagccatctcagttgctcagaagctgcctccaccactgtatataatattgaaatgttttcatggaaaaaattgatataacatatccattaaatagctcaaattaattaattgtgtacatatgcacacaatatcaataaataattgtgtacatatacacacaatatcaataaacaaggcaattataattgagatggatcgttgaccagctatcatatagatagctaacccttgccctagtacgtacatgtagcatagatgattaattagtagatgatatgtcatgcatgtgtgtcccctgctaagataagttaagcttgcttagctagcaacttgggctagctccccaactacttattatgctgatgacgatcgatatatgtatatatctcttttagggacctatcacggcctgaatatgccaactaattaacatttgcaaacaaaatccacctaaggtcatattagttagttaattaacaaattaatagccggccggagaatatttttaaaataggctgcacagatacataaaaaaagaattaaagaaaggcaccggagacacaggtagctaaagtatacttgtaacatgcatgatcgatgtcatagaatatcacgagtggatctagagaaatcatctatcaccaaactaaaccacatagaaacaatctgccttcacattgtttacccaataacacctaaatagaacctataattgtagaaatataaatgatgtagttttataagagaaaatagataatagtagtagtagtagtaatccaaatgctaaagaataatataaggtgaacctctgacactggaaatatagatgatgtagtttcataagagaaaactaataaaagatcagatccaaatgctaaaaataatttgaggtgattgtggcaaaaaaaaactatatgatatgtatgtgcgcgacttcataagagaagaaaggcaattcacactatagataaatgactaaaatgttaaaaacaattaagatgatgtaaggtaatagtaactacattaagcaatgtggattaactttataattatatagcttaactaacaagagttgatccattcacatccatcgtacccctccgtttcatattacaagttgttttaacctttttctagtataatacctttaagtttgactaattttataaaataattagcaacatctacaataccaaattagttttattaaatataataacattgagtatattttgataatatgtttgttttatgttaaaagcactactatatttttctatacacttgatcaaactttaaaaaggtttgattagaaaacaaagcaaaacgttttataatataaaacatagtgacaagttaagaattcagtcaaagggtatattacaagctgaaagtagaaatcatatcaatcggtagaatcatcgaaattaataaccatatatattaaactatccgcggaaaaaagtctttgaagaaaaaaaaatcatccatgaactagagctgccaataattgtatggtactcatatccatgttcatcgatgaaccctgagctaagtataatattaagccaaccaggtcagtccacatgcgagcttaaatggtggctaattaagcatgcataaatatatccttgtactatatgatatgcacatgcatgtatgttgctagctagctagttttcctccaatcaaggagttggccaggaagctaatttagctttgatcgagtaatactattaattgagttgctagcttcatctagagcgccaaaacatatttgtcttgtatcacagttaattactcttcattaaataagctgtcctaccttaacctcgatcctcttgtactagttgtactccagctagttatgtatctgaatcaaacaagacacgtaggcaaaattaagaaagaaaaaggttaattaatcctataatcgttagagcactataggtgaatggaagagtaggttaattttgagccgtgtcaacgcgcgttaagtttggccgcgccgatcataagcatgaatatacaacaatcaatcatcgaccagaacaacgaactcttaaccagtaattaattaattaattcgcagattaattaagtgggttattttcggtcttcggttagtttgacctgcctagctgctagctagctccacgagtatatgttttttttccttcaagaaaatttagtggatacaaattcattggtaactaccatttatcgccaagtttttaaacattgtaaaagaaaggagagctgctatacgtacgattatttgcgtacgatacttgtacaatgtaacatctgccagtcaaatcccatggtattttctggccgtttctaacgaagcaacacatgacatttaacgtatgttagcaatcgtacgatgatcgtacatataaaatcgtattcatagtattttcgaaaaaaaaacacggtcacaaataaaatactatcagtaaaaatctaaaataaaaggacgtgcgaggagacgcgacaacatgtctataaaagggcactaaaaaatagcccagctgttcttaaaaaaaaagttctaaaaaaaagaaaaaatatcccagccttaatattggtggtgccacctgtccaaaaaatttgggggaaatgggcataggattcctactaccgcaatactccggtttcaattataaaccaaattttcggtggaacatctgtctaataaataattaatctcctttattccttcctgtcccctaaaaaaaccacgagacacttctcccttttaattgcaaccgttccattcacactacttgtactactcctgctttctcttttgctgcccaacccgttgaccgtttatgaaatcaccaaactactccaagctaaaagaaaatagtgtacagaaaccaaataaaaaaggtcaggaaaagctaaaagagcaatttaaattgtacaattacctaaaaaagaaaatgctaataataatcttactgtagtagtatgaatgcaaaataaatgtgggtgtgtaataaagcagttattatcagcagttaatagtttcacggggtacggccgtactcctcctcctcctaccatacgttgagccagtcagtgagtgattggtggtggccccgcgatggcagtgggccagctaccaatggttggagggtattatggtaaatccgcgcgtggagacagcgatggacggacatggctggtcgtcggcgatccaacggcgcatgatggcggtgcggtggtgggctccgccggcgacgacggcgtcgtagcgatgggttgtccgcgtggcggtgggtttggttgacgacgacttgtcctcactgatgacttgaccaaacaacaagcttagctaaaagctgtttagctctagctgtgtccagcttactgcttgcgctgatgtccatttctcatggttaatgcttttgcgttttcttctcctttggaaacagtcaccccagtcaaacgttttccgtcgagatgtgcacgtgcattcattccgaacataccacgaaatttcatacttttactacaaacagaccataattactactcctaggttaattcattttttctttttctaaaaaagaattgaactttggttgcaggactaattttatggattttgcttatcattctatttaccataataagatactcatatgttccaaaattcaagcattcatgattatgtatgtagctagccagagcgatttggaacggaggtagtaagtaaaagttattcaaaactactttttattattattatttttaaaaaggttaaatctttaaatcagatgctatgctaatcaggcaatctcgtgtttgaaatttgcaaaagaaaaaagaacaaaaaaaaaaaagagagagggagggaggaaatgaggaaatgcgcgtggtttgggaggataacggcgtgaggaagcaaagcaagttgccaacttggaacacaagaaggacacaaagctctctctactcctttttccactcctcttcctcctcgcgacgcgtttcctctcctcccctttttttctcctctcctccgcccaatctcccaccaccacgccgttcctctcctcctcctcctgctgctgctgcggccgcgccgccgagcctcggcaaccaaccccctccaccaccaccaccgccggtagaggaggcgaggtcaacagcaacaacccaaacacaatatccatcccttcttgcgcgcggtggtttccgggcagatctgagacacaccaaacaaaagaaggtctcgatcgatggcttcttcctccccttcctcctcctcctcccccccttccgccgccggtgcctcctcctactggtgctacagctgcgaccgcttcgtgcgcgcccccgccccccacgacgactccgccgtcgcctgcccggactgcggcggcggcttcctcgaggagatgagcgcgcccccgccgcgcgccgcctacctccgccgcccgcgcgcgcaccacgccaacgacctgcgcctgcgccgcacgcgccgcgccgcggcggcggcggcggccggcgaccgctcgccgttcaaccccgtcatcgtgtttcgccgctcccccgccgccgccggcgacgacgactccctcgccgccgccaccagcttcgagctcttctacgacgacggcgcgggctccggcctccgcccgctcccggagaccatgtcggacttcctcatgggctccggcttcgagcgcctcctcgaccagctcacccagatcgaggccggcggcctcgcccgcgccaggggaacccaccggcctccaaggcctccgtcgagtccatgcccaccgtcaccatcgccgcctcccacgtcggcgcagactcccactgcgccgtctgcaaggagcccttcgagctcggcgacgaggccagggagatgccctgcagccacatctaccaccaggactgcatcctcccatggctcgcgctccgcaactcctgcccggtctgccgccacgaaatgcccaccgacgcggccggcccgcggccaagcaatgccggcacaaaggagaagacggtcgccctccccatttggaggctgccgggaggcggcttcgccgtcggtaggttcgccgaagggagaaggcccgagaagagggagcttccagttgtgtacaccgagatggatggagggttcaacaacggcggcgcgccgaggaggatctcctggggttcgaggcagagccgatcgacggagaggagtgccattaggcgcatcttccgcaatgtgttctcgtgctttggtcgcagccattcatcgaattctcaggcctcgtcttcgcattcgaggccggagttgaacgatgcgtctgaccggagcgccgtgttcagccatggctcaagaagccggagcacgagctggaggctcgaagatggccatgccgacgccatggtgcaaagataggcctcaactgaagtaaggaaggtcgtcgattgtttccatttcgcgcatatgtatttagaggaaaagaaatttgtagtagaacagaattgagaattggtgttgtacataggagcagcatcacatctactagtagatgataacttgcagggaagaagatgcccacgatggtgattctgaaatgagcatttgttgtttagagtgatgaatttgctcttgctggtagcaaatgtcgcttggaattctatgattcattcaaattcattgtggcgatgattctttgcatctgtgagaacggaatgaatgaaaccattttgatgtttgcagtcttgcaggattcaataaaaatcttgttccagaaaatctcttggcctcttgaatttcgacctattcatcagctttctgttgaaatgcagacgtctcatggcttgatagtttctggaggattgctatcatgctacgttatcacctttataattggtttgatgatcatatttcctggatccagtttttgtcacgtctttgcttcatttgtctgaaccaaagaacttcagtttcacgaaatccaccactgtaatttgtctgtagcctttctcatgtagcagatattttagtagtacttcctttttccttgacttatctgagacaagatttttacacatcattgtcctgatgtcaacatagaaagttgcaggcacatggaattactctcctgtactgcatttgagttcctttcctgcatctgagcacatatctcataagtgttgtgcagtaaaagcttggcttgtacattctccccatggttgactaccttctgcagtaaaatttgccttcctttgaaaccttaccttgtagtagtccttgaatagtactgacagcgttgtacaactatttcatttggtaaaccaaccaagaaatgctcctttcatgcatggcccatatacaggcataatgcagctactaaactgaaacgattccttcttcctttttttttttgtttgtacaacattgcagtgtatgtatgcatgtactggtacgtaggttaggtccaatgattaagccctgcccttaatcctgccactgatgtctgttttggtagttgagctgcaactgcatgcgagcagggttggtccaagttgaggtacgattgctaattttctgttcagttctgtctgcagaatatacaggcaagtattggcacagtatctttgatgccatcatcttgtccctgaacagtttctggctttgttttgtacgactgtgatgttgaaacggaagaaaaagggtctctgctttgctctttttactcgagtggaagtcattgtcctgtgatgagaagaaatcaagcaagtggtggtaggcatctgaatttaccacgtttcagattctttcctggggtgacatggacatgcttgtttgcagttgttacaaaaccacactggtgactcggtggatgtccattgagttgaacaaagggcaaagtttggttccattcactgagcaagcaaaattgttgtgatgacatgtggaaaatactgcaatattactgtggtcttgtgtagatctttagctcaggaattcaggaaacctgaaaacgacccacctttggagcattttcagaaacttgttccggattgttgagagagcttggtctgttgggcatgcttggaatcaatctagatatgttgctttcacgcatgacacatgcattgatgcatagtcctagccttgatcgattgctctggtttttattctctttctttacctcccatttccttaattgcagtttagtgcagctccaagcctccaaatgataagtctctgctcgactcggtaactccaactcctgaaagtctgtagtaatatacatggattttctccctgattccttttacttaggtggctgagttataaccgcaagcaacacggagaaagtcaattttctttccttgcgtgtgttgacatctcctgcgcattgtcagatgtagtaaacatcctactacaccttttttttttacctccatgtaaagcttgaagattggagctcggatgcaatcacactcttcacctctgttatgtctatgaagaaaaccatatgtgttcgatcagctccgatgaattacaggctttgcaacttctattcctagcttaggtccagaaaattcttgatatgtgatgaaccagacaggcagacggacagtatatatatactgctttgatgttgggtgagaaatgttagagagtaaaagaagtgggtgaaacagacacgatcagtttgcagatggtcacaacaacttgccatctccctccttgcacgattcacttggtacggacgcattgctcttgcttcagccttgttaccttgtactgcatctgtactatctcaatgtgaatcatgtgagattgatttcccaattcccatgcggatgacagatcacacacatcttcaagacccacacggccggccatgcatgttgagccgatcgaccacgttgattcttcttcaccgtgctgccattccatcgaacaggctgtgggtgggggtcggagtcttattctccnaacccccctcgggccgtgttggattgggaaaatgagaagccgacggcggaggctgcggtggcgtgctacagcggcaggggaggaagcggcggaggccatggccggagatgaaggtgggcttggacttacgtgcggcccatatattaactaattgggccaaaaactaaacccttaagtttaggggtgtcagtgctgactgtgactggactgtgggacccggtcatcttatccgcatcgcatggaggagaggaatcgcctcccttatcctctcgccatgcatttcctgccttgagtgtgaggatcatattcatattgcagctagcgtactgcactgatcgatttgctctagctagctcgtcgttagccacccatggctgcttctcctgcttccactgccgccgccgtcgtgaatgcgccggcggccaccggcgggctgctgctgccgcgggggaggagtagttggagttggagttgctgcaacaataacaattcttcgatggggaggaggtggcgggcggcggcggtgggggaggtggcggcggaggggaacacgtacctgatcgcgggggcggtggcggtggcgctggtggggacggcgttcccgatactgttctcgcggaaggacacgtgcccggagtgcgacggcgccgggttcgtgcgcaagggcggcgccacgctgcgcgccaacgccgcccggaaggacctcccccagatcgtctgccccaactgcaacggcctcggcaagctcggccagatcgacaagtaatcatccatctctacctacctgcttcatcgacgatccatccatccatccatcatcatccagctgccagcttctgatcatctgatcactatatacatgtgtgtatctcaccatctgtgtgcgtcgtctatataactatatactataatcgttagtttggaacgctggaataattccatatatatggtctaattccagtgttccaagccggctatatatcaatcgctacttaaattcaatgtacttgtgttgctgagctactttgtctctgatatacatattcattgtctctcgctgctcttccgtttaatggaacaatattaacatgttcttactactcaccacttttgtttatatttcttcttttttggatggactggaacgcgtcgttggcacatgtacgcttatcgctttattaaattgagacggttagtataagcgaatgattttgatatatatagctccgagttaaatactgtcctttttggagtatagagagagctagctggctctcaggcttttcctaagttttgcattgtgaatataaaatggacctatatatcagagagtaagttcgatatggaattacggagtatattgcaattatcttttccctctctttgtttggtatgaaactaattagcacacttgaatagctgtgtcatcttcaacttataaactgtacaataacacaaggcaagcaccaactaagtaattaattattaatcttcctgcggatgatgcacgataatcggcaaattgaaggccaagcctgaatagagggcttggtcactttaatgacattttcaatcttaccaaagttgacaaaaaagtggcaacatttagtttcctgccaaattttggtaactatataagaaatcctaccaaaatttggtaaggtttttttttggcatcaaagtaaacaggcctagagatagcatcactacaataaagtttttttgatgaaatccagcgcgttgctgcgagagttttatgtgatattagtaaaaataacatgtaagatagtatattttgtataattttcatctctggttgactattgaaacaaaaatctataaacaatttagattaatctctggctcaatgagagaaggaaaagaaagaaggtaatatatatataaattaatcatccaaatgtaaaactaaagtgctatgacattgcaagagaagaaaaggacgaagataatttaacaatgcatcataagtgccttatgatgaattctctgcattttataaaatgtatctatgtcttgtggcagtttcatatagacatttttttatgtctataagagagtagaagcattttctagagattaaattgtaccacaaccatatccaaccaatgcaaaagaaaaggagaaaaaaaatgctttcccttgttattgacaatccttgagatcatgacttgggtaaatcaatttcatcttccatgcactaatcaacttaatataatgtcatacctgtatatttgtgccttgtgttatttatatgtagttcctaagtatgaattaacattgaaaggtgtgcctctatatagcttaaaatgtcttttacataacatgcaatttttacagtacatgaagaatttctctacaagataaaatagaatcaaacatactaaaaatgtctctaaagtgtctctctatagtaaaagttttctatgcaattttcaaagtgcctctaaaaagtctctaccctataaaactcctaattttagagccaattaaaaaagtgtctctaccaaaagtgcctctatatggggttttttttgttgtagtgatggtactcatgtcaagccgttgtccaccttactaattatatccctcacctccgcaaacatatatacttcctccattcaaaaatgtaagttgtattttgttttcttagaacaagacttggactaacaattgctagatatatcatttatgtgacacaaaagctagcacaatcataaggaagtacttttgaatatgaatctcataacatcaattttgcgtcataaaaaacatattataataaagtaactgctagtcaaaggcttgtccaaaaaaatatgccatatattttcaaatggagggagtaccatatatatgcaggtttaatctagctctagtgtcatcactgtccactatgtatgctcccgccatcgccttaactcgaagtctacttgttaattttgtggtccactatggcactatccataacaataaataaaccataataccagggtgtcctagacatggctctagctgacgtgcgtatatatagtaagctccaaaacattgctctgaccaaccgttctttttatcgctaactatgacttctagttgaaactaaaatccacttgtctgagaggaaaaaacaaaccacgatcgcatccaccagatatatgtgagagtttgatctatcactagcgcgtcatcgctatttctagtacatatgcttctgtcatcaccttaattgtagtctatctaatcttcctccttttccacttgccaaccctaaacgaaatcgaattcactcgttgatcttgtggtcgactatgcatagtaaaattgtatgtagtacatagtaagctacaacaccttggtatagagtaagtggttttttcccatcactagacaacatttggcttcaaaagccacaaccatatccaaccaatgtaaaaaaaagagataaaaagtatgtccccttgctattgacaatcctcatccatcagatatacgtgagtgtttgatctaccactagcgcatcatcgctatctcagctacaaaaccttggtatagagtaagtggttttctcccatcaccggacaacatttggcttcaaaagccacgaccatatccaaccaatgtaaaaaaaaggagataaaaagtattttcccttgctatttacaatccttgagctcataacctgttgggtaaatcaaatttatcttcaatgcactaaccaacacattctcatgtcatacttgtacatttgtgccttatagtatttatatctagttcgttagtatattaacattatagagcttaaaattcctcaaaaaatgcctttacataacacgcatatttttaagtaccaaaagaatgcatctacaagagaaaattaaataaaatatactaaaaatgtctctaaagtgcctctaaaagtgtctctacactataaaactccttgttttagagataattcaaaaagtgtctctacaaaagtgcctctacatgtttttttttgttctagtgatggtactcatgtcaagccattgtccaccttactaattatatccctggcctctgcaaacatatatactccctccatttaaaaatgtaaggcacattttgttatgttagaacaagaattgactaataattttgcgtcacaaaaatcatactagtcaaagccttattctaacaaaacacaatacagcttatattatattttgaaatggagggattaccctatatatgtgggtcactatccactatgtatgcttccgccatcgtcttaacttaaagtctatgtgaactccctccctttttactcgccaccctaaacgaatgttgattttgtaacccactatccataacaataaaaccatgctaccaggcatgttgtcctaggcgcggctctaactaacgtgcatttgtatagtaagctccaaaccattgctctgaccaaccttttttttttcactaactatgaacccgggttgaaactaaaagtcacttgtccgagagcgaaaaaaatgcaccgtcgcatccaccatatatatatgagtttgatctatcactagtgcgtcgttgctatctctagtttagatgcttctgtcatcaccttacttatggtttatctaaacttccttcttttccacttccaccctaaacgaaattgagctttctcattgatcttgtggtccaccacgcatagtaaaattgtatgtatagtacatagtaagctacaaaaacttggtgtagagtaagtgcttttttcccttcactagacggcatttggcttcgaaagccacaagagtatagattaacattatgagaagtgcctctttagagcttaaaatgcctcaagaaaatgtctttacataacacgcagcttttaaagtaccaaaagaatgcatctacaagataaaattaagtaaaaatatactaaaagtgtctctaaagtgtccatagagtaaaagttttctaggcaacttttagagtgccactaaaagtgtctccactctataaaactcctgattttagaggcaactcgaaaagtgtctctataccaaaagtgcatgtatatagggtttttgttgcagtggtggtactcatgtcaagccattctccaccttactaattatatccctcacctctacaaacatatatacttcctccatttaaaaatgcaaggcgtattttgtttttttaaacaagagtttgactaacaattgctatatatatcatttatgtgacacaaaagtacgatcataagaaagtactttcgaatacgaatctcataacatcaattttgcgtcacaaaagccatattgtaaaagagtgattaatagtcaaaaccttattatagtagagtaatacaccttatattatattttgaaatggtgggagtaccctatatatgcgggtttaatctagctctagtatcgtcactatccactatgtatgttttcgccatcatgttaacttgaagtctatgtgaactccctccctttttgatcaccacccccaaacacatgttgattttgtggcccactatccataacaataaaaccatgctaccaggtaagttgtcctaggtgcggctctaattgacatgcgtatgcatagtaagctccaaagtatcgctctgaccaacctttttttttgtcactaactatgaccccgggttgaaaccaaaagtcacttgtctgggtttaaactaatgcgtcatcgctatctctagtttagatgcttctgtcatcaccttgattgtagtctatctaaacttcctcctttttcacttgccatctccaaacgaaatcgaactcggtcgttgatcttgtggtctccactatccatatggtaaagctggtacatagtaagttacaaaacactggtatagggtaagtgaattttccccttcattagatggcatttggcttcgaaagtcactctttcgttcgaaagcgcaaaaactaaggtaaagataaaccataccaaagcatatatagtatcaaacacgcgtcaaatatttaccgtgcgcacgtgtgttctacatgtacgcgaattattcggaccaatcaatcaataaattcctaaaaaccaagctattgatcctaaaaaatgtctatggtaatccttttcctagtgaatttacccatccatgtatacccatgcccctagctagatcaaaagcaatgcatagatctcaaaccaactaccataagtctgagatcgaagagagaacactgtaattaatactcaagcaagttaccaaaaagaaattaagaaagatgtaaggagaacaccatgagaagggaaattaaagatgtatgaggagcgatctaaagggcttattaatcatactccatgtatcggccggccgggaataaactgagtagaggtgatacattgatgagaaattaaaggaaatcgattaagaaaggcgactaatcaataaagagaaacctccaatataatccgacgcaggcaaaggatcgtcgtcgacgatgatcatggatggggtggcgagctagctagtactcgtcgcgccagcagatgagcatttggatgcagcggcgtatgatgtagaagcgcgcccggtgctccttcaccgtcttggtcagccgatgctttatgttctccgcggagtagctccggcacggcatcttcacttgctccggcgacgacgatggcggcggcggcgacttcttcaggcccttcgtcgtcttcatcacctgctccttccgcacggcgacgttgccgcctgcagcatcctccttcgtcttcaggttcttgcaggtcttcttcatcacatgcacttcccttgcgccgcctgctgcagcctccatagtcgtggtggtggtgatggtcgtggtcttcgatggagaaagagatttgaggatcgcgacgacggtgatgaggtaagctatagctatagctagagagagcggtcactcacacctggctgggtgtgccgcgcctggggtctaaaccacgcgcagccactgctgacgtgtggggcccacatcggccgtccgaggatgacgtccggccgagccgaccacacgcacgcacgagcccggtgcgggtcgtagcttgcttgctgcttcagttactctctcatctctcatctcttgctcgcggccacggccacagccactgccagcatatgatcatgtcatgctgtgcgtgcctagctttccagttgattccaagagagagaaagagaggagaaaaattatttttacaagcagtatatgtaatgtaaagtatatataacggatggatggaaattgcaatataatatatatggcaaataatattgttgctagctccatcttttccagctagcacacttttatttctttctgccacaatgaaccttgtgcaccacaggatattagctatggagaaaaaaacgaaacgatttatagttttacactacttgctgtctttattacgacgctctgattaatcattcttacctgatcaatgtcgtatgtacacaaactcaaacgtgcataaatatattcgcttctggccctggttttgatttttgaaatgttgatgtatcggatcatatcggagatcaaaacagaaaatggaataatggtcgatgcaaactaacttctatatattccactcaatcgccaatagccaagacttaattaattacttaaccaacactaccagaaactgaaatacccctgacggccgcaatttttactgacgtgtgtgcatacatgtcaggaaattgaaccctgacggacatatgtcaggcaaatttatttttccccgacaagctagttctgacggtgacatgtccggaactattttcctgacgggattttctttatttctgacgggatttagccgtcagaagtaatacaatttctggtaagatactcaaattcccacgtagatacgcatatatatgcttgcacagtaaacaaagatgagtatttatttaattttacatctctttcaaccgtatatatatatatactccatcttgtatagttcactgtcagaacatacgcatggttacactatagttacattacatttgaaagttaatttctttttagaaaaaaaacttatattacggtagctttttagataatttcaaattaacctagcaccggcagttcccgtgcaaaacagggggctagctagcttgcatgctagccatgcatatatagctttgatttttgttttcttgtgcttttcagggcttccagaagatgcagatgattgtggagtagaatactctatatcctagcttgctgcttttgttcgtttgttataagctttgtatggatgaaaaaaaagttgtttttaattaattacagaatgttaagaatctctcaagactctcagtagtggtatacccaatataatagtgcacctgacatgcatgtgaaagttaacggatggatgatatggatggatggatatgatgctcatgattccttactatttggagaattatctttcataatattcatatataatttacatgttgttaaattatacgatttttaaaaaaaagaattgatggtaaaagattaaaaaatatttgacttataacaaagctataatggcatctaatttaaaacagagagaatatcgggaatgcgtgggccttttttagggagataaatgcatagacttatagaaatagatgacttcattcatcaagatttaaattttagtgttcacgtatattacgcattggtgtgcactttcaatacgatttttggcgaggtcgagagatacccatgtcgtccatctatttaaccatgtgttatatatggacacacacatatgtatgtgggtatgggtgtgatgtgtgtgcacgtattcggtgttatgaaagaaagaatgcatataagttttacttgtcagtttcaagtttctaagtaattaactttgcgtcaacattatttgttgttgcgatttttttaaaaaaagaagcactatatgaatttgtatagaaatagagaacaaaatgaaaggaaagaagtagcgtgagcttatagtgtttcttcttgtagaacctgttgactcgggatttaagttacgactacttatttgttactaggggtgaaaagaaagctcgggttcgtgagcttagctcggccttggctcgagcttggttggcttggctcggctcgtaagccaaacaagccaagcccaagcctcctttttagctcgttgctgaaatgagccgagccgagctagctcgcgagccgcttgttttggctcgcgagcctaggccatcgtgtgtttatattgattattttactttatatagtgttattatttgtcaacttgaaatttatcactaagattttgaagaattgaatataaaaacttatttaaattttacatgttgatgatttgtttttactttttttcaataattacaaaatatatatgaataggtgtttcaacaggaaagcttgcaagccagctcgagctggctcgagccaggaaacgagccgagccgagcttaagttttagcttgtttccctaaccaagctgagccaagccaatcctagttttttgcgagccactgcaagccgagccgagccaggcttggctcggctcgtttccacccctatttgttactgatagtctttcttcggaggttcaggtgcttacagaagatgtgtgtgcgtatgtctggtttcatagcatcgtgcttcgtagaaaaatagagtaaatttcataaaaccccatctattatgatccaagttgtataaaaaccaaaataattttggcacgtgatatataaccttgggtattatgattctatagttttacaaaatcacacctttaaccattttgatttacttttatataaaaatttttaaaaaacggatgtaacatttatatgatgggataaaatccttataatttgagatatgattgtaaaactcaaaaatggtattgcgaaacttaagaaccataatacctgaggttatataacacatgccaaaatacttgtagttttgtgtaacttagactataatattatcggcggagttttatgaaatttagtgaaatgaaaggatggtaaaatggaacgcagggaggtccggcccacagggacatgcggcccagtaatagaagaagtcgattaggagcagcgggaaagcgataaggaaagcgacagccatagccactcgctgcgcctcctcctcatcgcctcgccgtcgccggagaagacaaccatgaccaccatcgccgcgcggatgccgtttgcgggcccacgcctcaggcctccctgcaacctcaccgcctcgaggccgggtcccaggagggccgggctggccgtcgtctccgccgccgccggtggcccgcttcccaccgtgctcgtcaccggcgcaggcggccgaacaggtgcaatgtactccttgcggaaacccctctcatgcccctcctcgccatcttgcccatttggttcctcgtgttcatcgaatcgaatcgaattttcttttttagataatggaatcgattttccttgcaagaagaaagaaatctagtttcgtgcacatctactcttgcaagaatttgactcggttttcccttttgcacgctgcaattggcctctctgtgatgatgatgatctttcaggccagattgtgtacaagaagctcaaggagagggcagaccaatttgtggggagagggctagtcaggactgaagagagcaaagccaagattgggggcgctgccgacgtgttcgtcggggacataagagatcccgcgagcattgctcctgccattgacggcatcgacgcgcttatcatcctcaccagtgcggttccgaaaatgaagcctgggtttgatcccagcaaggggggacgcccagagttctactttgaggatggctcttatcctgagcaggtgattaaatgtattttgtgtcactcacattttctgtatcaacttgtgccttcatttgaaattgatgttttctgctatttgctactctttgaaggtggattggattggccagaggaatcaaatagatgctggtaaaacatctttgtcttgcagatggattctttgaacttgtttcttttcagctatgctgttctttaaaccagtattatcaatgacttgttggtctagctagcatagctcctttttttttcagttaattcattccttgttcatgattcgtttatgttttttcgtcatcttcatgtagccaagagcattggtgtaaaacaggtggttttggttggatccatgggcggcacagatgtcaatcacccactaaataagttaggaaatgcaaatatactggtatataacatgtgcaaagtctttctttcttctaatttattcatctttatgtgtgcgtgttcatatgtatgcatgcatgagcacatcatatgcactgtttacaagctcagaatactttaatgttctttgaattcgcaggtttggaagaggaaggcggagcagtacctagcagactcaggtctaccatatacaattataaggttgtaaagcaagacatctcttgaaaatatagttgtgatttgtgaaatgcacgttgtcttgcagtctacataattttactagcacattagctttctagaacatggtttcacctttcttccctatagctataggtgcctgcagcctgatcataaactcaaaccttatgtatgtctgtcaggaataaagaacaaaccctcagtgcagttgaaatctggaagaattattgtaacttgaatcaggagattgcatcgacatactcttttcattttgtttttaatgcagggctggaggattacaggataaagatggtggtgtgcgggagttgcttgttgggaaggatgatgagatcttgaagacagaaacaaaaactattaccagagcagatgttgcagaagtttgtttacaggtaccttcacaactgtggatgacatgttactgttcataatctctgctcggtgaattttgcatctaccatgtctgatgtctccgagaacaatgttaatctaccaaaacgttatctatctgaaaatgttaatttaccaaacataaaggttgcaacattctctgcttgcacatgccatgtatttttatatcaagtgctgattctgttgcctaatccatctgtgcctgttcctttcctttgcaggccttgctatttgaggaggcaaggtttaaggcatttgatctggcatcaaaacctgaaggtgaaggagtacctacaactgatttcagggctcttttttcgcaagttaatagtcgcttctaagaagtataatctgtcaacgaggcacaatatttgtgatggaataatatgaagtgtgtattgagtgaggttagtttcctagcatatatgcattttttttgttcatccttgtattagtaggcagttgattctgcatatatttttaattatctgtgatctttttgttacctggtactgttttgagaaaaaaaaagttcgctaattgcataccaatataacaaaggcagttacttattactcaatcattcaatatcttcaaatcatttaagagaaatacagatgattgctatagtaatgcattcacagtaagagtatgttaagagcaaatttagttacccacccctaccgagaactccttgttcgtattaattggaaaaatacagagagcaaacataagtcggaaaaccaagccatcttccaagatcatctccaatatccatcaacacaagaaataaattgcaatacttagaacccttatgctgatgattgcataactagcttttgagaatattggagactgattgagatctgctttggtctttctgattaccacatgatcacctaggtttccactttccatgttgacagtgcctgtattatcctccccttccatccctgcagcagccagccactatcttcatcaattacaaagtcttcatgataaaattccttgtaatgtactgatctattcagaatggcttgattaacaggacgttgcttgaacccagccctgaggatcctcatttgccactgtttgtagctttctggcctctcaatcctttctgcaccttcgcatgctacagcattaagtgcatcattcccaaagagatccttctctaccaatatccttgcttcatggttcctaggaacattgttgtcgagcatatcaaaaagtgatgagtaatggaataaaacctctctgaatctagtcagaaagaatggggagctgtacaatccattcacaacaccaagaatgaaaacctgcgggttcatcctcttcatcatgtgtagtaccctatcccttgcactatcaatgttttctgtctcatcacctagctttctcattcgtgacatgcagttgattatgagtacctcatccttgtcaatactgagatcctcgatgcagatagtttcccatcttgaagcaatgccatgatactggaaaggtacgttgaacatatttgcatactctgccaaccgctttccagtctcctcaatcctttcatgagggcgaaaaccaggctggggtacatctacacctgtgatacgaagcttaggggggccaccttctcgctttgcaagtcgctgaattagacatggccactgaaagccgaagaggatgccaaaatcaacgatatgcaatgttgttttcccctccaatgcatcaatgatggttttgttggagaagtagtatgttaccatctcaaaagggcatgctacaaaatatagatgataggcctttagcatgtctctggtgctcgtttgtttcgccatcagtttttcgtacatttgactcccagtcccagccaagcgagccttgaggccatctgcaaagcagtttgctagcctctgagaaccatctccatttggcaaagcgtgatgccttattttcctcagtagctcactagcaaagggatggttgttagatgctatcgcttgtgcacattggatgagaagaacactgagatctattgcctctttctgtttcttcttactactgtgtggcttcctttgcccttttccatatcctttgctttgaaatttctttgggttgtcgcttgcttcttttgccatcattcctctaaggttagcaacttcaccagggagctgcctattgcagagcagaatactatcaaacatttcatcccgtattgtttcactagtggagatggccatatgcttactgttccttgcttccatcaactctatgtgctcaacatgaggatcatgaggatgattccttatttttgtctcatgcttgcccttctgttctgttgtctctgttgtttgtttgcaagcataaagaccattcttctctggatcatccaccaacttttcaatatttggaatgaacctctttgcttcctcaacacctctcctgaattgcaaagccaaacggtcaaattcagaagaccagtcggtggttatcgaatgcgcatcctgtgacccaaggagatcactaacaaagctaccactacatgcctgttcatgataactgctgctaccattatcagggtaatctgcttgactgtcaccgttaattgctgtcttcttaaatgaagatgggtatgccttcccaagaatatcataaaagggcttctctgtcgcctgaagtgcatcctgtcctttttttatgctgatcttttcatcaatatcctcctccatcaatattctgtttatataatcaagagttatgtttgagttggtctgacaatactcagggctgtccattatgctagacctgcattgctttaagcttctgaagcagaaatttgtgatctacaaaagagcaagtcaaccttttaaaagggtttctttaccagccaatgtcttttttttttgcctctcaaaacttgctaaaatatcaaaatagtcatagataggataataggataagttcaagagttcttttatggtcctgagaggtgccacgctaattaacaacaggagttgccaatatgaatgaaaacattaaaattcggaggtactggtacctcccaggactgtaatcagcaaaacatagttttttgcctagataaactgacatgtaaaaccatctctggcacccaattttgaagattgtatgcactacttacctgctatgtaaatcatacttttgacatggataacctccaaactctggaagacaccttttgttgagaaaaaatgttggtgtatcaaaatgtaggagttggtaacttggtataccaactacactgtagaatatatcccaaatatactttttatgatgtatactactattactgctgttacccaatgttaacagcagcaagagagattacatcagtatttacctagcttaatgatgtatctggcctatggtgaggaaggagggaggtgaaaaactggggactttattatgagccattgagagtagtggcattgtccagtccttatgagaggggctgaggctccttagttgtgctgatgggtgagcttttcttgttgatgtgaaaattgtttaatgttcctcttggtctttatttcttgttactttcttgttgacatctggctgattaatattagggttatttcttgtaaccttcttcttgacacttttctgatttataaaacatataactgtgacatgaaggtaacagatcatattccaaatggctttcttgtgatcatttctgttacaaactaggcaccattgtcattcatccaggctgggccttttggttcagtttggacacatagatgcccccaattataaccaaagagaaggatgtgacaactgataaaaggacatcatgtgcccaggaaaatgataagtaaactggaaattctaaagttattgtctaactatttaacgtattgtgctatttactctaatcccacgttaaacagtaaccggccattggaaatttagaatacaatcagtaatctaacttaggagtaaaaaaaatatgagaatatgagaactaaaagttatgaatataatctagaaattgtacttccaagaataatttactggtatacaatgaagtagttgtttccagccaaatagtttgctaatagatggaaagaacaattgcatgtcactggagcacaaacagtctcttgtttaagctgtatgattccagctattcattgcttgcagctttttttgtctccttctcaggtatttaaaattattatttttgcttccccattcacatgcacttagatgttgcactattacaacctattatgcatgaaagaacaagggatagacacattggttttagaaaacaacagtttcactactagagtagttttctattacacatttacactttgttctgaaataaaacaagaagacttttagtatggtccttagggaggaaccttgaactttcaaatagtacatattgttgagatggaaggactggtacctccttcaaaggtataaaaaaagtatgttatacacttcgtttagtttagtttctatatatgctcatgtacaatcaaatcaatacatataaaggatacatatatgttcatttattgtgtttacgactgttcaagtagatacagagattggcagttgcctatacacctttgagcaccatagcatatgtacatgaaaaactgtttgaatcttactgatccaaatatgattcatttggcttccatgtggatatggcataaattactctccctttccatccttgtagtagccaggcaccatcttcatcagctacaaagtcctcatggtaaatccctttcttcatatttattatctctttcaaggtggctggatcgacagggagctgctgaacccagccttgaggcaccgtgcttgccactgcttgtaactttctggcctctcagtcctttctgcaccctctcatgctatgatgttaagtgctttctgcccaaagagtcccccctctatcatattcctcgcctcgttatcccctggaacatttgcatcaatcatgtcaaccaatgaagagtaatggaacagaacctctttgaaacgtgtgatgaagaagggagagctgtatgatccattgacaataccgagaataaaaacccttgggttcatcatcctcattattttcagcaccctatcccttgcgctattcatagataccatctcatcaccaagattcttcatcctgaacatacagttgactatgagcacttcatccttgtcaatgttcaggtcctcaatttgtacggtttcccaccgtgaagcaatgccctgatattgaaaaggcaccttgaacaagtttgcataatcagccaaccgcttccctgtctcctcaattatttcacaggggtggaaacctggctggggcatatctatacctgtgatcctaagcttgggtggaccccctttttcatttgcaagccgctgaatcaatgatggccactgaaagccagtgcaaatgccgaaatgaacaatgtgcacctttcttggttgctgcccctttgatgcatcaagaatagtttggtttgcataggcgaatgacgccctttcgaaagggcaagctgaaaggtagaggctgtaagccttcaacaaactctcagcactggttcggcttgccatgagcttgcgatacacctggctcccgatcccagccaagcgcgcctccagaccatccaccaagtaaaatgccaacctctggttactatctccatctggtgaagaatgctgtcttatcttcttcactagttcactggccgaaatgcggtcgtcagctgctactgcttgtgcacagtggatgaggagattcctgagatcaactacatccttcttgagttgtttcataccccgtaatttccgttgtgcagatcctctggtttgtccattcagtgaattcttgcgtgcttgcttcgtcattatttttcgaagatttgatgcttcggcgaaattctccacaccatagcagagcagaaccctgtcaaacatatcattccggattatttcacagtaagtgatggcatagcgtttgctgttcctcccttccaagatatccaagtctgtggtgtaagggctgtgcctttgatctgtcaactcaaagattgcatatcttttcttgtctcctacttttgccttcgtggtcatttttgaaatggagagcccccggtcagtgtccaaatcgatcaccaacttatcaataattggaacaaatctctttgcctcctcggcacctcttctaatttggaagccagggatgccaaaggtagaagtccaggcagtgcttaccaagtgttggtttggaagaaaaagactcctgccatagctatatggactcaatggggttggcaagggctgtaacatgttgaaactggaatggctactatggtacctattatgataattgtttctgctactgctctcatcaggcgtatctggttcatttgcgctatggagtgctagccggtttagcgatggtggatatacctggccaagaatatcatagaagggtttctctgcagcctgaagagcagcctccccttggtgcaggtcaaccctctcatcgacgtcctccatcagcacccgacttatgtagcaaagggcatcgcttgatctgatcctctggtaccctagactaagcgctgcatcaatctgaaattgttgttgtccaagattacttttgtcattgcaaatcccagggatggtgactgcacctgacaaatacgttcttgatcctgtggttggctgggaaaacagctgcggatcgctggggctgtagttgtacaagctgagttgctgctgggaagaacaggaagacccatcatgtggctgttctgtttctgtggtggtgtattgattgtcaaagggaagctcaatcaccatttgttttttttttttttgccacctgaaaactgaatgacagatatatcctgtcccacagcaaatgaattcagtttgttgtctgtaaaagggaaagtgaagcaagttttgcatgagacagattctgaattcttcttcatgatcacggatactcaaaattatgttcagcctactcatttggtagaattcagaacatttgcatccccaaaccatagaaggttgtttataagagggaaccgcaaccagttagcgcattatttcctcaccctttttttctttggaaattcagcttataattgattcggtgtgaacttctatgaaaacaagcaaaactatggtctccagtaacaaattgaattgtgttgcataaattacacaacagtacacctgaagtactcgtttctaacattctgaatgttgaactgcaggaggctcctgatggaagagctcaagaacattgttgtctgctaattatggaaaacaggcaagtagttaaagtagacaaacacgcaccttacttatcagcagttccaattcagcaacaacatcatatataggttccttgagacacagaagtgaaggaagaggggcatgggccatgttcatttcagattatatagagatcatgttgtccccatgaaatgaaggtggttttccaatttcggtagctaatgtttggtagtgagaccagtgtcgatgtaaactaaaatctttgtatgtatctttctttcagggttcagattgctccaccgttttttggggggatattcttgatgcaatataaaaaaaggcgaatattagggatggcttgatgatctaaggctcccgtacatgttttttgcgagaaagtagctagcgagcccagctagaaacaatccttcttcttaagataatgagctaggaacatccttttatttgtccatctgtagttaactacaatgccttggcatcaagaatctccaatcaagaacacgttcacactataatgtgtctagcagcagctagcatcattatcctaaaaaaatttagctacatacataaacatttaaaagagtaaagtgtattgctggcacttaaatttgttcgtcttatctaggtccttgatattgttaaagtgtattattttgttctcaaattaccatgacatctttgagatcctatatggcactcacgtgtcaaattaccacgacacctttgagatcctatatggcactcacgtgtcatgtcacacgggtgttaactcattttctttatatttttctctttccttttcttctcttcttcgttcctactcgtgtgggaaaaaaatgagaaaaagaaaaagaaaatttaggaccggaatatccgtgtggcatgtcactttagtgtccatgtggcataccttgtaggatcccgaagaggtcttggctagttaggaccggaataacacacttaa

SEQ ID NO: 12375 - DNA, 1123 bp, Oryza sativa
agtgatctagcccgctctacccatcaaaatcccgtaatcttagaacgtatagacactcagatcagacagaaggatcgggaaaataagaccaaaacactggatcgagcgggcaccagtaacagccatctaacacgggcagaaacagtagaacctaagtgctcgtcagaacccaatacgcccgccacgaactcagcaccaggcgcggacatcgaggtgccatccaccccgaagagatccacacgacagcatccaaactctgaccgcgcgatcgacggattcaaatcgaaccaaggcacgtcacgggcagaacagatcagaacccccaacactcggcatgatctgatcggtaaagaggggatccctcaccgcgtccatctcgtggcgtcggagactggggaccggaggcgaggatgaggggggttggaatcgcggcgtcacggagcggaggaccgagccgagaggaagggggagaacgacgacgacgacgacgtggtagagcgtgggcctggtcaaaggcggaggcttaatattcggatctgggccgttgattttttttgagcccacaaaccagacgagcgatcgtggcactggcctgtaatgttgtgggccggaaaaggcccaactcggtgatacaaattataggcctgttcagttcaatgccaaaaccaaccatatcgaagtttggcaccttctcatcacaaaccttttcaatccctaccaacattttcacaaaactatatcaaaatttagcaaggtgtcaaactaaacaccgctttcacatcttcatttaaccaaaattttagctttatcagtttttggcttaccaacaaatggtaagtttttttttaatgaaccgaagaggccctatctcgctctctttattttttcagaaaaaaaaagattgcaagtacaattaagtggtggctactctgatgcggccaaacattgcgttgggttcgtgcatcgcatgtccgagaaatcaaaatcacgcagccggatcgatccgaatctgttcgacgcaggctcggcagaaatccggcgtgggcgctgcaaatctgcaatgggaaagcgacggcgcaacctaaatcgcttgtttgttctgttcacaggtgacggatccgaa

SEQ ID NO: 12376 - DNA, 6678 bp, Oryza sativa
tggcgccccaaaaaggaccatttctagaataagtttttttaggggtctatttgcgaaataagttttttaaaaggaccaaaatatgaaaaatccagggccctgtgccgcgcccctggccaccgcgtgcttggccaccaccgcgtccgcgcagcgctcccctgccgctgccgccgttgaagttgttgtgggcgccgtttttgttgccgcgcccgccgccgcgattagcgacgaaagcagcccctccctgaccggtgttgcggtagagatcaaggagagtttcaaagttgaggagttgagagtacagctccccaaccgtgatgggatcggacttggtgcagagagcagagacgatcgggctgaagtcttcatctaaccctgagatgatgtactgcaccatatcctcttcatcaagaggacgaccggcggcagccatctcatcaccaagagctcgcatcttggcaacgtattcagcgaccttcattgttcccttcttcgtgttggtgagggcgagcctggtattcaccgatcttgcacgggtgcggctggagtagagttcctcgatggctcaccaagcttcagccgccgtcttgcacatggcgacttgaatcagaacatccctcgaaagagatgacaggagatagccaagaacaagttgatcattggcttcctaatcttcgaatgccgggttcggctttgtcacagtcttcccatcgacggtgactgaaatctcggcgtctagagctttcacagcgccggtgaggtagccctggagacgggctccgcgcactgcagcgctaacttgcgctttccacagtgcatgattgcctttccgagtttctctgtaacggaatggccctgagcgaggtttacagctgccgcgcctgaggaagacgacgacggcatgagtggtggaagatagatgcaatctaccgaggtggaaaaggctctgataccatgtgataaaatgtgaagcgttgaaccctttgcctcgggccgcatctctgttaaatagtggtagaaacagcctctaccgtggcttacaatgttcagttacaagtgataaggagatagaacaaatttggagataagaaactaatcctaacaaccttatcactggatgagctattacgggtgtgagcagctgcgccattatcgcatgcatgcgccatgcaccatgcgaacccccacgacaccgacactgtccactgcttgtcgccgtggtagcacaccgactgctgcgccacgcccgccgaaatggcgccgtcatcctcgatctctccttcctctgtcgcctctcccggaccgcccgacgacagccatcggtggcgtcgccgccggcgcatcggccctcggccctcggcgcgttgcagttcatgacggcggtggaggagatcgcgcgtaggcgggcgacgccggtgctggcgccagcgtggggccgcgacgcaatcccgtgcctgccgtccgccgccgtggacccgctccccgccccgacggagctccgcctccagtacctcaccgtggacatctcgccgccgctgccgccttgctcccctgctcccgcgtcgtctccgccgccacgtcgccggccgccggacctcctctcccacctcgcaccgtcgatctcctccccacctgtcggccggcggcgccgggctacccagagtcaccagagagaagagcgagagagagaaggggaagggagagaagagaggaaagaaatagaggctgactggacaagctgacatgtggggcgcacgtgggtcccacgctgactcattagacacgtaggataaaaccgggatcgaaaccgccaagggacctattgtgaccagttttatatagttaagggatcctatatatctggttttgcggttcgaggacggttttgtatcccgttgacaagttgagggaccttcggtgtactttttcctttatccaaccatggtaaaggtgcagctagggcccaaacactttactggtcctgtttgtgtgtgtctcaccacggcccaattatgtaatgggctgattctgggttgtttcacagaaggtccaaccacttgtcacgccattgacaactccgtttgcaattttgctttatactccctccgtcttaaattataataacttaaaactggataggatataaaccaaaatataataatttaaaatcggataggatattttctaatactatgtcccatcggttttagattcttatatttcgggacggatgaagtatttgtttgctcagtttgacctagcaaagaagcgtatcattgctacaccttctcttctctctcttttttcgcgaggaattttccaattattgatcgctccaagttttcccgtgtaagttgaagttttgtcaaattcatgcaacaaaactaaagtaatccgacaggaatgtatggtcagaaattaatggcctcaactgagaaatgtatagtcagaaattaaggacctcaacggtataattcgacctaccactcagccaggcctctgttgtacgtgtgtgacaggcataaaagaaaagggaaaatttgaaccatgccattataattttgaaaaatttgagctataccatcctgacccacatgccattgactcatgtgggttctacgtgtcattgagataccgatgacatatctcaaacgttacaaaattataatgtcatggttccaaattaccaagaagaaaagggaaaaatgtttggtctagactatagagcaagatgattttgatccacaaaggcctcaactgaagctgacacgcaactccttggtcacatgcataatcttatatggactgcagatggattcagaatgcctaattaattggcccaataccacttgctgtgctgaaaatggcgtggtttagaaaatcttcggctggtcgttgcttattctgagacttttgagttctgacgcggaaaaagaacaagattgggaaggttgatcctgttgcttgctgtgctgaattgaagcagcaaccaagccactgttgtcacttgtccctgcttgcaaattgttgtcataatctaatataaggattcagaacttatgcagtttcttgtcaagctttcactgaaaagagttattgcagctaaccgaaacaaatcagtactgcactggcaatcgtctccctcggatgggcattagttcattcgataccgtcaacgagtaggagttttctgttggcctcatcaatactgtaacaagaactcgggtactggactaacctagtgttcactcccccaaagccaataatacgcgtacttgacccggttgacaatggcatgtggcttcggagttcatacagcgaagcaatgtgtactagcaaaccaacggccgtcagacagtcagcattaaagctttatgttcctcatcaaaatccacttttcatataattggcttctatataataattggctgtagctcttttgagtaaaggccgggatatttatttattccattatctaaaaaaaatcaaaatccacttttcatatactcctgtccttaataaacatatagtaatacccagcggagtgtagaaaagctctgggattactgcgaaaatcgaacaaaaaatacgccttttccatagtgatatcatgctgcttcttttttctcaagagatgcagcaaccggcaggcagagcgcacgatcgatcacaaggcgagcagaggttcgtgcatccacccatcacacgcccggcgcgcgcatcacagctcaccgcgattcggtgaaatcgcaagcttttggcaggacgacaacgacgacggccacggccaccaccaccgcactagcggagctaacctctgattaaccggaaaggtagcgacctttctcgaccagagcgagagcacctgccatgatgggagtccatccgagatgatgagaaagcgagctcgcacgcaacaaaccccggccaatctctgtcgaggcaatcacctcccaactcaactgcccatgtcgatggtggtttctagctaagcatgccccatgattgcgagcttttcatcagcaagtttattcgccaaatctgcagccgttaatgtatcgagtttgactttttaaatgcatcgatgagaatgatgaagccggttgaccttagtggcgcgccggtgagagcctgagactgagaggtgatggcaacagccatcaaacgagatcaaaagaactgtcaccgatgtagattcagaatttcagatcaaggtggcagtggaggatatgcagtttcagaagttacgaaaacctgcagctgggagaacgggagagccaacctacgtctgttggaggaccagtctgaagatttgctggatttgttgaccaaaacttcatacctgttcgagtacctcatcctgtacattacatgcaacgcgataacgtcaacgaactagtaaatgttgccaacggactgtgtactgaatccggcaactgtcgtcgtgtggttgaaacagtgctcgactggaagagccataccacaattatagtttcccggacgaaaatggaaacaatcgcttggtgcgcagtgtaccggcaaaagcaatgaagaaacaacaggaagagatcttgaatttcttgatcatgtcaacctctgccttcagaaaaagagaaaaaaggggacaaggtctctgactagatggtaaaatggataaattatccttatgaccttatcataaagttgattacgattctacaaccatcagccacgatccatccacagtgcccactcatcagacatcagatcgtggagggttcatgacttcatggatgcatgagtacagagttactccaagttgacattagcagttcagcactactgaagtactcccttcgtccaaaaaaagacaaactctggtttccgtacccaacatttgaccgtccgtcttatttaaaaaaattatgaaaaaaattaaaaagataagtcacgcataaaatattaatcatattttatcatctaacaacaataaaaatacgaattataaaaaaatttcatataagacgaacagtcaaaattggatatgaaaacccaaggtttgttttttttttttgggacggagggagtaagtaggagtacttagttctcagagttcagatcttcaattcataacgctcacattcaattccgctcacatggcttcattccctccatgccagacacacaactaaatctattggcttgggaatctcaaacacaagaaagaaataatatcttgaaaataatttaaaagctaggagtaatcctgtacatagataatgcaagaagcttttttttttacagtggcttgcaacatgttcaactgacaaacagtaacctttgacaaacgtcggtgcctacatgtcagtgggacagcttgccagctcgtggttggccaggatgaattcttcttttccagtttacacgtaaaggtaaaaaggaaaaaagaaaagcctcccaaaagggataaataatgtcggagcgcgggaaaaaaattaataaaggataggatcaccggaagcggccgccgtcggcgagcttccatgaccggcagtgggggagcgaggagccggaggagaggcggtggagcggtgacggccccagctcgccggagaaggcggcggcgtccggcgggtggcctcccccgcggtggtgccgcgccgggctgggacgaacgagcgggctgatgcagacggcgaagcccgagacgccgccggccccagtcgcgcctcccggtctgcgccggcagggggttttccgcatcggcgaaggtcgccatggcgactccgccggcgagctcccctcctcgccgccttcgtcggcgtacctcatcgccggcgagagcccgcggttgctgatcacgtggcaagagtgccgcggcggcgacgcgacggccggatccttcttccgggggccccagggtgccatgatcgccgcgagccaagaacggtgcttccgctccttgctactgcgcttttcctccgacccgtgttgccgatgggctccgaagagcgcggcgagcacgaagaacttgctgctgcggcgccggatctcgaattctatgtccccttcctcgaatccacttgcgccgcctccgccgccgccgccgccgccgtaggccggccccacctgcggcgtccggaaaaagaggaggctcggcgtgcgcctcctcgccccggaggcgtcggacttccggcggcacacgtacggcgacaccgacctcgggaaaaccggcaccggctccggcggcggcggcaatgaggaggcctcgttctgcgcggcggcgagcgcgagcaggcggtcgcggaggcacggcgcgcacacgccaaccccgccctcgtacgggtgcctgctgcacttcattgccctcttctctttgccttctccattatcaagcacagcagcagaggggagggaggaaggaaggaaggaagaggaggacgacgcggtctctcctctgtatatagaggcgccgcttttcaccttttcgtagttttcgtttgttcgatcggttcgcatctctctgttccctcgcttgcgtggctttttatggaagtgtgttcctctaccctactctaggaatagatgcacggttgcacactagtaggacaaaaacttccgataagaaatattgaaaaataggccgagtttagttacaaaattttttcttcaaacttctaacttttccactaccattgt

SEQ ID NO: 12377 - DNA, 7804 bp, Oryza sativa
acacaaactttcaatctttccgtcacatcgttccaattttagcgccacattttgaattgaatttgttcaacattgttcgaatgcagctttgtataaggtgggtttagcactttagatgcccgcgtggccgcgtgtgtgcgcctccatcgtgaccgtcacgagacatcgcttggactgggatcgcagcagccagaggccagagccaagatccaaacctgcgtgcgtcgcaattgccacttgccaacccattgaccaggcgcgcgagcgcgaaaacgagccgcgagtccgtgaccgaagcttcaccgcgcggcaggcagcctccccacgtgccactcggggttggttctcccggagccttttccgctcgcggcggcgtgtgcagcagcggcttcacccggatccctgtcagccaccacggcgaaccaacaaaaggtggcaacattttctcgacgggaaaaagtggtcgcggtggcggccgtgacggagtgatcgagaagagaagtaaattacggcgttttttcccgtgctgggttgcctgaaccatctttcaccaagacgaaccataccgattggatgtatcctctttattactcttccatcgatcgccccaaccaccggcagagaaaactcgcgcaggacccgacgacgaggcgatgaggtgatgaggcgtgtgttcttgggcaatggcgatcgacgagcgacacgatcgtctttggtgtttcgcctggaatcgacatgggagtacggacgcgcggtgtctcggagaaggtggcgagcgttgatccatcgtctggtggtcgaagtcgaagggggaggactgactgacgacgactcgtcgtggcgcgagttgggaggctctcgccccgacagggctgtcgggtccgcgtgctgtcactcctcgcgcgccgcgctttttggcgtggctgtcaatcctcgtgcgccggtgaacgattggccatttttgtacttgggcgggccggcaaatttgatgatttttaccaccaatttttagatcaggtgatacatgggaacaaatgcgcgtggtagtcaatcatcatcagatctctaatctaaataggtgacaaattatcgaatcagaacctggatgatggttgatgagttgaagaagaatcacaggaggagtgcgccgtacgcaggagactttcttgtacaccacttgatcagaggaacgcaaaaaatggtcatgagatttgcacaagttccatgagggaacgaaagaaactttgccgtcgtacatgggcttttagaaccgtgtaaggggggcccaatattttatgggccaaatctcacttctggaccaatgctttctcctttcaggcctagttttcaccgggccgtcacgggcccacgtcgcagtctaccccgccgaaatctctaccgcgcgggaactccaatttccaaccccgcccaattcccctccctttcggccattccccttccccttctcggctcctctcctctcctcctcgccttcccaccaccttcccttcccaacccgatcccccattccgccgccgtccgccgccttcgccgtatcgaaccgcctagcgaccggaaagaagaaaaccctagtcctcaacacagccatggctccacggaagcggacgggggcggcggcgggggcagcttcgaagaagccgccggcctcgcagccgtcgcagccggccaagttcggcattctccacttcttcgagcgccagtcccaggcctcctcccagaacgccaagcgccagaaggccgacggccccttgcagcctcccgcgccgccgccgcctccgccgccaccgccgctcatcgaggaggagccatcggaggtgtcgccggaggtcaccaagactctggcgccgaagcgggtcaggttttctcctgggatggtaagtattggtcttgcgcttggtccgatttggaatgcattagttggcgtttggatcgactcttaggtttggtggtttcttgtttggtgcggtccagctgattaagcagagccaggacgatgggggtggggaggttgtgacttggaagatctcgccggtgaatgatcgcctgcgcatggtcacttcaaggcagatgactggtatggcgcttcatccgtgctcaaacaatgaggtatatactggagtttctttatgttcttgcgaggtatataccggcgtgcaatgcacgtatgtatgtgcattggagccggtggagacacaacactttcttgtgtgatgaaattaatcgttttttgtggctttctggtttgctattcgatatgtaattgtattctagaagcattcctcggtcgagtctacaaagaaatggcattcatcactgctgggcatgtcaagatgtactgcttcagcacgcaatttggatatgtgtggaactggtccaggtggctgtgacggtgtggaggacacccaaagcccatttcggactcctccatcactgtcctataggtgcagtgaggtacatacagttatacgatgaattgttgtgtgaatgctagctaatgtagttccaaatcgtgttgatggagtaatggttttgtgcatgaagcagcagcttaatgggggtgtggtttctgatggaggacctgagcagttgggggcaggggagcacaaaaaggtgaactaagataacactaaatgtcctgggtgccattggtttcatgatattattacatgtaagaactaagttgccaaagaattgatcgacaaaactatgccatttctttttaccaggcactacttgatcttttagatcaagtggaagatgcaatcatggaagaagaattacctgctgatggtgagaataaaggagagcagctcataaatggtgatccgaaaaacattagttgttctcctattgctgacagcgatcaaaatgtaccctcccagaagtcccttgatgccccgcccttcgatagctttttggtgttggaggtttgctttctttacctccatgggttggtttctatcgaagttggagctgctctagacttctagtacaatagagatttatgtgtttaattacttttcaggtgtcagaaaagcacaaaggcgataacttaccatgtgatcgctatcctgttaaggtatatatcctctttacctatctggatgagctagtttgcaattaaatttttgttattttgcaaagttgctaactgttttgacaggttttacgtttgctgaatgagcacggtgggaaagagcatgcagtccatttgtgtgatgagtggtgagttcctatatgcaactattgacatgattccatttttattttctatatacatatgaaccttcatcaatctattgcctatatatttcaaaccactacaggttccatagccttattagcccaggcgacacagtaagtgtcattggagaattcactgaccatggaatatgtattattgatcatgacaaaaatcttgttatagtgcatccagaattactcatatctggaacacgggttagtattagcctccccccatctctttattataacctttgtagtcaatatcccagatcaatatgaacaagctgctatgatatcctcaaatattattttataagaactgtttgtaaaaatacattcatcttatcttgtcatcatattttgatatatagcttattttaggttgcttctagttttcattgtccaagaaggtctgttctcgatgacagactaaaaagcaatgaatattcaacaagtgctttgattggtactctgctgcatcaagtattccaggttcgttggtgcaagaaaaattggcagctctggttaatacatcatgcactttatcttcatgtaacagttgtgtgtgcctcactttgtttctttcctcttgtgcctcaggcagggctacttgaagatgttccttcaacgcaattcttagagcagcaagccaaagaagttcttttgaaaaatattgagagtttatatgcatgtggaggtaagattcgtgacaacatttttaatccataaaaaacacactacacaaaagtatgacactatgacatggactgttcatgacttattatgttatactgagtgccctgaccaataatgtttttcttactctattcttagagcaccgattcagtaaggctatagttatcagtaaattatcatgtgctactaaattttttgtgaaactttatatttaatttttgaatgttgctttgactaatttgatccaattttctgtgctatatccttcctattatttttatatgtttacacaaggaacatggaatgtcattccaaaagttctgcaaatctgttgtgtttgttctgaaatatcaacatacattgtggttgttctcatacatcctcatttactcaagtcatattggtatatgtcatgtttgattacagtactgtactgtagctcagcttctttattgatatttataacattacacaaactatcttatatccccagccatgtgcatatcttactggttttgacatttttctatgcagccagtgaaagcaacacgcttaaaacgctgattgaagcagtccccaaaatattgaattggtacaagtgctttatgaaggtggagtagatgacttgcacagcagttttttatattcactgttggggctccttaaatgaccacaagaattttcgaagtccatagagttgcaccatggtcatgaatactccacttatttttgttgaattggaacctgttgttatacccatatggcactcttctatttcttttcagaggttctaggcaatgattaatcactcgattgagccattttgtttttaattgctaatatatgccatttctattacggagtataattttttaagagaaagttttgatctagtctttcctttatcaatcctggactaacttgcctgcaaagttcaccggtggatatattgcatgtcttgtcctttacttgtttaaagaagatactgttacatgttctgcgctaatcatcgtcggcacatccaggtatcaaaatgtaacaatgtaaattttggtcaaattgaaggacaaaagactgttggagttgtggaggtaggcaacatcttgagcttgcaaaactttggaatatgaccttttcatattatgtaacttatatgtaatatctagcaagttcgtttcatgatggtaaactcctgtagtccttgtgattctcagccatcaaaattaggccaacacagaactttcactctccccatgtccttcagtacttgagtgttgacttgcacacctcattcttaatggctttattgaaatgaatttcaccttaggtaatggatattgaggagatggcctgggctccaagatatggtttgaaagggattattgatgcttctattagatcaagggtttcatgcaatggtagttcatacgacagagtaatgcctctggagttcaaaactggtaaaggaactagtggtcaggtaagcatatgctcctggatagtggatccacttgaagatatattatatctttttctggcatgagatatttttgtcaccggggttctggaaactatttatgcaataaattagtgaagtattgcaacaaccaggcttcttgaaagattgtgctgattccataatccatattaattcttacaagtagtcatgctctcaattttttaatcaaaacctgacgagttcattgaggtttatattgcacaggccagaactgttgttttctgtctgttttccataatgtaattactggttgcttacttgaattagattccctgctctattttatccaaaactttaagctttagttacaattgactagaaacctgtcaaccacctagtcatgtccattctgtggcaacaaccaatcaataataatgtcctacaacaactaatcgtaccttaaaaaaacccaatcatagttcattacaaaataataattaatcaataatccggagcctcagttccattctactttcacaaggtcaacatccttcagtagttttgataattaatacatgtcacatgtagcggcatccaaatatatattttgataccttttttgaaatgtgattgtgactattagtgttatctttactttatgtccatttctgaaaagaatattgtgttatttttgtggtgtttcacatactgtgtagcactctagtgtctcctatttacctaaccatgtctgaaaaaacaacaatttagtccttcagaatagatccagttacttctctattgctcttcacaatggtttatatatttccagacagctgtggaacacactgcccaagtgatattgtacacgctattgatgacggagaggtatgatctatctatttcttccactgcaggctttccatatatatatattccttaccatgcttttccatgtcttcagatacttgaacaaggatattgacttgggtcttctgtattatcttcacacagaccaaacattggtaatcttctaaaacgacactcaacataaattctgtacccatccttatccatttcttgttaatttctgaagggcatcaaagtcaagaggtctgatttaattggattaataatgcgtcggaatgagcttgccactgagatcctgaaggcatcgatttcacagagttttcccccgatgatacaggtggaactaaaaacttgtacataagtaattcatttgttagaactcaaacaaaatctttctttcagagtccatctacatgtaatggatgtcgacacctggtttcatgcaccatataccacaaggttcaataactctattctttttaatataaatgtgttttttgatacagtcctgttggtacaaatttgttcaattacataatatatacatgtgaaaagccatacttatattctgatgcaacaggcgcatggaggcaatgctgcaactagtgggcttggtgatttatttgataatctcgtgaatcacttgacagttgcacatcatacctttcttaaacactgggacagattgatcgatcttgaagctagagtttctcaggtatctttagcttttctcacgtgccgtgtatttgatttgtactctcttgatctcatctcatgcaaaattcaggtcaagaagaaggaaattttccagccacatcattcaaatactgggagcaggcattcttccccatcttattttgtccttgatgttacaaatggacattcaatagattcatctggaaaaagcaaaagatacatatatacttttctgcgccagaagttgcagcctgagacagctgatcagccaggagaacatgttgaaagtgtagattttagcctcaaatgcggtgattctgtggtaaaccttgtacactttctgtattcaatattcagcaacattactatgttagctatttcaagttcccagcaacattgatatttttattgcatatatttggcacaccatattgcaaatttgtaatgtatggctccatctcattttgtttggagtgtagggttctttccgtttgaactgttatgtgcttaatgttggtaaggaagtagaactataggttcatagaatatgctcagtgcatataaggaggttaaatggcaaatataataccagttgaaaacttctgcagctactgctaaccgatcaatcagcaacagccagctaacactttggagtattgtagcgttatattactttgtttttatcctcctgttttgtgatgtttactttagtgctgtaggcctatggccacaaaggggtcatttttttatgcgttattacacatatagtagctcacacccctttgcttcatggatacttagctattatagtgatgcatg

SEQ ID NO: 12378 - DNA, 693 bp, Oryza sativa
ggccggcggtgtagatgacgatgcccatcaacggtggtgtgaccaaccgaccgtataggcggggacaccagtcggcggcgacggaggcaggccggcggtgtagatgacgatgcccatcaacggtggtgtgaccaaccgaccgtataggcgaggacaccagtcggcggcgacggaggcaggccggtggtgaagtcgtagacgcccaacagcagcggcataataggccagccgtgtaggcggaggcaccactcggcggcgacggaggcaggccggcggtgaagtcgtagacgcccaacagcggcggcataataggccagccgtgtaggcggaggcaccaatcggcggcgacggaggcaggccggtggtgaagttgtagacgcccaacagcggcggcataataggccagccgtgtaggcggaggcaccactcggcggcgacggaggcaggccggcggtgaagtcgtagacgcccaacagcggcggcataataggccagctgtgtaggcggaggcaccactcggcggcgacggaagcaagccggcggtgtaaatgacgatgcccatcaacggtggtgtgaccaaccgaccgtataggcggggacaccagtcggcggcgacggaggcaggcccgcggtgtaaatgacgatgccccataacggtggtgtgaccaaacgaccggattggcgaggacacca

SEQ ID NO: 12379 - DNA, 1188 bp, Oryza sativa
  unsure (1)..(1188): unsure at all n locations
tcggttggtcacaccaccgttgatgggcatcgtcatttacaccgccggcctgcctcagtcgccgcgnactggtgtcaccgcctatacggtcggttggtcacaccaccgttgatgggcatcgtcatttacaccgccggcctgcctctgtcgccgcngagtggtgcctccgcctacacagctggcttattatgccgccgctgttgggcgtttacgacttcaccgccggcctgcctccgtcgccgccgagtggtgcctccgcctacacggctggcctattatgccgccgctgttgggcgtctacgacttcaccgccggcctgcctccgtcgccgccgagtggtgcctccgcctacacggctggcttattatgccgccgctgttgggcgtctacgacttcaccgccggcctgcctccgtcgccgccgattggtgcctccgcctacacggctggcctattatgccgccgctgttgggcgtctacgacttcaccgccggcctgcctccgtcgccgccgagtggtgcctccgcctacacggctggcctattatgccgctgctgttgggcatctacgacttcaccaccggcctgcctccgtcgccgccgactggtgtccccgcctatacggtcggttggtcacaccaccgttgatgggcatcgtcatctgcaccgccggcctgcctccgtcgccgccgagtggtgcctccgcctacacggctggcctattatgccgccgctgttgggcgtctacgacttcaccgccggcctgcctccgtcgccgccgagtggtgcctccgcctacacggctggcctattatgccgccgctgttgggcgtctacgacttcaccaccggcctgcctccgtcgccgccgagtggtgcctccgcctacacggctggcctattatgccgccgctgttgggcgtctacgacttcaccaccggcctgcctccgtcgccgccgattggtgcctccgcctacacgggtgggctattatgccgccgctgttgggcgtctacgacttcaccgccggccttgcttcgtcggcgtcgagtggtgccttcggctacacggctgggctattatgccgctgctggtgggcgtttacgactttaccacgcgcctgcctccgtcgtcggcgactggtgtcctagcctatacagacgggtgatcacactcaccgttgttgggcat

SEQ ID NO: 12380 - DNA, 12783 bp, Oryza sativa
tggacttttagggatcaattcaaaaacatggcagaaactagtgtagaaggcaatgggatcagtacggtagatattagcaacagctcgcccgccaaaaggttgcggatggagacctgagtagggacccagacagggtgtaccatcttgatccaagttttggaccgtttaagagggggaccaatggacctgttgtatggcctaccattttagtttcattttgtttttttaacatattggaaacaattatgaaattaagttgtttttaacagtccaccagtgttgcaagttttgaactgaaaggagtgaagtatgaattacgcgggtaatcttttgctctgattactactaccagtgaaagatgtagccttgaaagttatcaactctagagtaaatgccatttagctcaatcatgcgtgcagattgtggataaaatcaatatttaatccatctccgtggatcctttgttggaatgatcctctgtgggcctatcttcttgccaataattctcttaatggaacaggctggatactactgtggtagtactcattttgttttgacttttgaggaaaacggtctgcaatatactggttttgtgcattatactcgtgtcgtttggactttttgtgcattatactcgtgttgttttgacttttgagaaaaacaatctgcaatatggtttagactttagaatgcttgagactacccggacatctacattgagatgatcggcgtcttcggaagcaattcagatggtccgttcttgttcctttctatcagaacttctgaaagacgctttctatcagaacttaagaaagacgcttctgaaatatctatgctgactagtctttattgtgtgttagttaacggaatgcgtacaccaggaaagaacacattcaaaggagcacgtcgttctcagaactcggaagagttgctgcaagccatgtgcaaaggatccaagacctaaatgaccgtgataggatccggaaatttaacgaggatgctacaaatttcttcgctgtcagatgtgattgccgggcccaacgtcgtgtcttcagtgaacaaatcagcttgtgttgtttatcaccaagtcattgtactgatgttgttgttcttgacctttttcaggtacgtatgtgggtttggatcgtcaaactatcttggccatccgaatgcttaagctcgatatctgcagatatctttgcacagaaactcatctcctcatcgtttatacttaagctcatttgtttgtttgtttgtttttgtgtgtgtcgaagagagtttgttcttcacgcgctgacgcgcacgggggtggggtccttccgtccctgtgaatgattcgacctgacgagatttgactggtacgcagataacgaatgctctaccacaaattcatacaaaccagtattactccgttttacatatatcacatgtgtaaaagcgatgtagaatgtagatgcatttaccatcggtacgctttcgtcttccaagttccaaccacatgtttgatgtgagggcctgaatattttctgaaaaaaaaaggggttaatgatcgtacttggcctgagaaagtgacacctagggagtagggacactcagtcgtaacatttcaggcggtcattaacccattttagtatctgggctccaaacagttgccatgatatagctaggcgaactgcaagcgaggtcttgagaaacagaacccgctgcagtggcacatttggtgaggcttcgggaggtcaccagaattgttcctgttcacacgggctgctagttcttcacagctatctcgtgtcatccgagcagaagcaactacctaccaataagaggttgcttcagacccaaatggtaagaggaactgtacctgaatccacataaagaaaaggggaaaggggagaggttcagttccatggggatttgtttgtttaagctgtatgtgccacactttcttattcctgaaaagaagattggtttccctcttcaacttcatactccgatgttcttgcccctctatagctcattaaaaagttagtagttgagttcatctcagctgctcttcttctggttcttttatcttttgtttttttggtggttccttgcaagtgctttttctcgaggaatgtcccttttggttctgttgcctgttggacctcagttcttatttatttaatgatttgtgctcctctgtaacctggtgttctcgctttctaatctgtaacgctatacctgtgcttaacaggcatcgtcaggaatttttcctcggttattccagcatgtgcgttgttacgttgaaggatgaattccaaaagagcactacattaatcctctaggtcactttgtcaccatgaagttcattttctatctgttcagtattttctgttgtctgtgttcctgcgcacaaagccaaaacatctctgggaggcccgatgcagtgagaattggagctcagttcgcaaggaattcaacaattgggagagttgccgcagttgccgtccttgctgctgtcaatgacatcaacaatgattcgaatatccttccgggaacaaagctggatcttcatatgcatgattccagttgcaatcgctttcttggcattgtgcaaggtaatccattcgtgctttttctgccactgagtcaagcggacttatgttaccacatggtataaaacataactagtttcttcttcttctttgcatttgtcagccttgcaattcatggagaaagatacagtggcaatcatcggcccattgtcttctaccaccgcccatgtcctttctcatcttgcaaatgaactccacgtacctctgatgtccttttctgcaactgatccaactctttcgtcacttgagtatccgttctttgtgcggactaccgtcagtgatcaatttcaaatgactgctgttgctgacttagttgagtattatgggtggaagcaagtgacaaccatatttgtggataatgattatggaagaaatgcaatatcctctttaggcgatgaactttccaagaggcgatctaagatcctgtataaagctccatttaggccaggagcaagcaacaatgaaatagctgatgtgctgatcaaggttgcaatgatggagtctcgggtcatcatcctgcatgcgaatcccgactctggacttgtggttttccaacaagcactcaaacttggcatggtatccaatgggtatgcgtggattgcaacagattggctcacttcataccttgatccatcggtacatctcgacattggattactgagcacaatgcagggtgttcttacattgcgtcaccacactgaaaataccagaaggaagagtatgttgtcttcaaaatggagtgaattgcttaaggaggatagtggtcacagcagattcttgcttagtacttatggcctgtatgcttatgatactgtctggatgcttgctcatgcgctggatgcatttttcaatagtggcggaaacatttctttctctcctgaccccaaactaaatgaaatttcaggaagagggttgaatttggaagcattgagtgtctttgacggcggacagctgctactagaaaaaatccaccaggtagacttcttgggtgcaactggcccagtaaaatttgattcaggtggtaatcttatccagcctgcatatgacattgtcagcataataggatctggtttgcggacagttggttactggtccaactattctgggctatcagttatatctcctgagactctctacaagaaaccagcaaatcgtactagagaaactcaaaaacttcatgatgtgatctggccaggtgagactataaataagcctcggggatgggtttttcctaacaatggaaatgagataaagattggagttcccgatagggtaagttaccgtcaatttgtatcagttgatagtgaaactggaatggtgcggggactctgtattgatgtgtttgtcgctgcaataaacttgttagcatatccagttccgtataggtttgtaccttttgggaacaacagggagaatccaagctattcggagcttatcaataaaattataacagatgtaagtcctaattctgaaacttgcatcatgcttatcagcttatgattgattggtttatgtgtatctttcatggctaggactttgatgctgtggtaggcgatgtaactatcatcacaaatcgaacaaaggttgttgatttcactcagccatatgtgtcgtctgggcttgtggtccttacctctgttaagaggcagaactcgggtggatgggcctttctgcagccattcacgatcaagatgtggaccgtcactggactgttctttcttatcatagggacagtagtttggatgcttgaacatagaatcaatgatgaattccgtggccctcctgcgaaacagcttattactgtgttctggtaaggctataatttcgtcagtttgtatttatcgcgtgtacaattcctgcaaatatcattccatgttttctgtcaccattatccagattcttggacgatgaactggttttatttgcctgacacttcatgttctacttactttgcaggttcagtttctcaactctgtttttcgcacacagtgagtgaaacgacagcttgtcacattctcgacattttcaataaccatgatggaattttccagctcataggagctactctttcttctatgtttatacaggagaggacaccaggagcactctcggccgcttcgtgatcatcatatggctgttcgtcgttctgatcatccagtcgagctacactgccagcctgacctccatactcaccgtgcagcagctcacgtcgccgatcaccgggatcgacagcttgatcaccagcgacgttcccatcgggtttcaggtcgggtccttcgcggagaactacctcgcccaggagctcggcgttgcccactcgaggcttaaggcgctcggctcaccagaggagtacaagaaggcacttgaccttggccccagcaaaggaggcgttgcggccatcgtcgacgagcgcccgtacattgagctcttcttgtatcagaaccctaagttcgccgtcgtgggctccgagttcaccaagagcggctggggcttcgtgagttctcctcttttttctctcacagtttgacagtgggagatggattatctaattcaggggacatctatcttttcttacatttttcttacatgtcaactaaataaccattaagtttttttaaaaaaattaacaacatgcatggttaaatttgatcacttcaagttcaaaaaaaacaaattaaactaaaaatagttaacatacttgcaattataattgttatcgttcgtagttatacttgttattttattattatttttttagataagtttgttattttattataacttgtagaggttgaatttacacttgcattattctatagtgatatgttttataaatctatattattaaaaaaatatttttttataactatttagatggtatgcaagaaatgattgatatcttcggggagatgaaaacactttccttttgatagtgagttccatgcttttttttttctcatctcatgcaaaacgtgtgtacgattattgttaggcgttcccgagggactcgccgctgtcagtggacctgtcgacggcgatcctggagctgtcggagaacggcgacctgcagaggatccacgacaagtggctggcgagcgacatgtcgtccatgtcgcaggccagcgagctggatcaggatccggaccggctggacgtgtacagcttctcggcgctgttcctcatctgcggcctcgcctgcatcttcgccctcgccatacacgcctgcaacctcttctaccagtactcccgccacgccgcggaggaggaccccgctgcgctgcagccgtccgccagcgacggcagccgctccctctcccggcgcagcaagctccagtccttcctgtccttcgccgaccgccgggaagccgacatccggagggcggccaaggagaaggcgtctggtctgggcggcagcggagggtccatgagcggcgtcagcttcacgtcaagcggcagcggcagcaccaccgcttcatgctaaagccttgataattagttaattttcaggttaattactttacctctccttgtgctgcagaattgtagagatacgtaagcacattggaacttttgctgcgctccggcgcttactgaaacactagtatagcaatatactgaaacacattggagtaacattttgatcgactaaaacggcacgacctactatgatcatggtgcatgatttcacggacagactgtggaacaatatcctctaccctaagccactaactttgggttactaataacatattaatccactttgttacatatttatatgtcagtgatctaaagttaatccgcattgcgtccatagactgtacggcatgaatctggcaaatggattgggctggattgatagtttgggcctctagagttgtacaaattctgacacttgtactcgtactccctccatcccacagtataagggattttgaatttttatttgcaacgtttggccgttcgtcttattcaatttttttttgcaaatataaaaaatgaaaagttgtgcttaaagtactgtggataataaagtaagtcacaaataaaataaataataatttcaattttttttgaataagacgagtgattaaacgttacaagaaaaactcaaaatcctttatattatgggacgggagtagaagttaaggccaccagcttggactcggctgtatctctggcctctgcggcgtttttcccatgtaaaccatgatggatttgatggtgaagccacgcgcccatgatgaggcgttgaggatgggcatgattcactcactcaactgtttcagcccctcttcattggggagctcattctctctcgtcccattggttgcttgctcgtgaccgtgagttgtccatactccataggcgagagagctataaagacgagctcgtggcgccacactattccagatagctggatgatgtacagacaacagcaatcacattcatggctctgcattgtgcaacacatagtacacactctactccgtacgtgtatcctacagttctgcacagtggattactatcatttgcagaagccactgctatactggaaagaaagagagggaaattgcttttttactgctaactccgtttcacaacataagtcattctatcatttctcacatttatattgatatatatatattagcataaatataaatgtggaaaatattagaatgacttacactataaaacggagggagtactaactaacctgacctgttgggggtgttacttcgcagacactggaaaaacatcctgaaagttcattccacaaaaggccaaccagagaaaggccaagagcactatgccgacgaacaatcaaacaaatggctgatgcttttggatctgaaactgtctgaacaacaccaaaatttttcatgtcaagtcatttcgggaattgtcgggtgccagcttcacgtacctgttggtgttgggtttaggtgcatttgcgtgcatattttctcttactccgacatgagcgaagccgtccacatgcgtgttacattagtttagatagcacaaatattcccaagataaaaaaaatagaggacttatattggcacaatatcacaagttaacaaacaaaataatgataattttcacacagacgagaggggtgaccaaccaacgcacgcatcacgttccacggacacgattcgattatgttctttccccggggaaaaaaaacagaaaacgatttgtgtccggttcaaagaattattcgccgtgtctgaaagtgtacaggtaaccgggatgtcaactgcttgattgatcaaaaaatgatttcgttttggggcaattgtgtttgtgcaaagcgctgcagatttgtcttgggcgattgcagcatcggcagttgcattattatatcgatcacgtcgctgcaaattgcagcctcctccatgtgccgggataggggggagagcacagaaacaaaggtccacggtgtagcagcatattggtgtactctgtactcttcttccctctggtttgtctgcacgtatagcctaggtgaaaaggtcatggactcttacgtagttttaatatagacatggagattgtccccaaaataaaattatactaccgaacagattcccagggcagatcactgcgctctcttcgagagaagaaacaatgcttgtgataaactggatggatggcattggagataaggatatctgagcacccaattttgcatactttagaacaagtgtccacatgcaaatatccataggtaattctgtatcattttggacaagactttccgaaaatattatttgaatacttatatttgtcaaatgttatattttgtgcttagtgaactagagattttgagaaactagattatccgactggtcatggttactcaagtccgatcttcttttcagttcagtagctacttagttttagagtttttgctattttagaggtattctaggagtagctatgtcattaatgatttaatcttttattcttctgaaaaatgggaatgaattttttttaagtgaaatgaaaatgaaagggtcttcagattgacagtggggcccaccggcaccaaccgcgattataccgtacggcgaaaggagaggacggcccatgaggagaatccaagaccgaaaaaccccacaactatctcctcccttccacctcgcctccctccctccctcccctccccaagtatccactcctctcctctctcgcctgactggcacaggcaccagcgccgagagggggagaggccagaggaggagaagccgtacgtacgggggcgctcgctagggtttgccacgccgcgccgctgaccccgcgaggacgtccctaccgccgacgacgccgccgccatggcgcggcgtcacgggtggcagctccccgcccacaccctgcaggtgcgctcgctgcttgcgcgccgtctcgtctcccctcctgttgctgtctgtgctcgcgcgcgcaatgtggctacggatctcgctgcgtctccattattccgcggtctgacgagcggagctcgctgttgctggtgctattgcttacgcgtctactactctactactagtagtatgttttaggttccaatgagtcagtatgcgttgtttgatttgatacgatgtttttactctcttgtgtagtctctactccgtaggtatgtgtgtgtttgatgcaattggttgcttcgcctgaatattgtttatgcttctaggcgagttcactctatagtctatgtctagaaccacactagtattccagtacgaggatttgatttgcttctgctgctgtgacacgaaattgtacgtcgatttgattttcttaatggttcccctgatggcatatgctatctgaattttaggcggatgctacgttcctgatcccgtgcgttgtagtatatgtggtgtctgatttgatctggcagtagctttgggcataaaagtggtactttttgttcgttttctgttggtctcgtctgctctttctttctctgatgtgatgtgcgaccctggacttgggggctcccctaggccctaactctccttttgtcttcttcctatttgcactatggattctctggtttgagtttttcttttttttgagggcctcctatttgatttctttctcacacctgagttaaacattaggatatctatggattcgtgatttcctgttgatttttcagatgcagaattttagttactccaacctttttgatgttatccgtttagagtaggagtagaaaagatgcatccgtgtttgaaatgatggagtgctcagttcggtgccagtggctttgccattctggacaacgttcattttttttttccttttctttgtttttatatttcttagtatctctttgttgcatatcgttttatgctagagccaactttcgtttctatcatgaaattcttattacccggcaaaaatcattaaattcttattgtcaacaattagcactgcttcaactaagttatactagtgaaatcaaattagttaccttcaactagagactaaggataataatccgaatgacgttttagcgtcatgttggtggtctgttgggtttcaaaaaaatgttggtggtctgtcctattatgttgttagtgcttttacctttttatcttacggtcccagttatgcactttttcagctctgtttaatgtgtcatgtgcaagaatttatctggattcattgaagaactgtagtttacctgtgtaactgcagtatcccgctaaaatttagatcaacttgtgtgcattcttagtcatggactcatggctctggtctatgttgttttatctgcactacctcactaagtttacatgttttggagatcaaacaagggaagaggctataaactcttggcaaataaagcttaatctttcataaaagcctgtaagatctgagcatgcatgatcgtcttgtgtaattttgttttaagtttttcgcctataaacctcatactcaaagctcttgaaatattcaatgtttgtaagaatcccctaggatcagtaatgttcagccttccttttaactagaaagatggtgtatatatggggatcttggactcttagtcttctactcttctttatctgctgaatttgtagcctcttaattagatcctgtacttcctttcatgtgctgatgtcgatgcatgctatcccatgtttacctcttattaaagcaagtgattgaatattttttttctttttcttttttgcaggtggtagctataacggtgttcttcttgttgtgtatagaattctatgctttcttttcaccatttcttgggaaggacttgtatcaatttatcgcaataggtgtttatagttttctggtaatgttcttcctgttcacgcattgaattttggagtagtagattttgtttgacaagcgtttgatgttcatttctggcatttcaggccttatcagtactgattctatatgtaagatgtactgctattgatcctgctgaccctggaatcatgattactgtcaacggtgctctaacctataagtcagaaggtatctgctcatacttggaactttgatgtaattcatgtagtagtaggcacatgttatactaatgtagcaaatcatcttgttttgctcaaaagcaaaattagacacacaagacgaaacgggcaaatcagaatcgagaacctatgaggatgtccaaaagcacaaatcatgtttaggagctggttgtttgtgttgtgctatatttgtgaaagaggattgtcgcaaagatgacgaagcttaccaacaagaagattatgatgaagaggcactcttttgcaccctttgcaatgcagaggtacttatccacagccccatccttagcgtgtgcataccataccatttttaagacctcgtattcattttctctgcttttgcaacatatatggacttggtattttgaaaaacataattgaactgtaaatacttacctgctgcatccattgattcaagtttacatgtctgtttaacacctgtatatttgacctgaacatagtggtacaaggctattattcatggttgctttacaacagacgcacataacaaagtcttatcgttcatttgtatcacttcgaattatatttgcatgaatgtggcctaaccagagttataatgtttcaagacttctctaacagtcaacaggtgctatgtaagaggcaaaacttttgaaaaagcttttcattacaagttcttcgaatcaatttttgcctatagacacacagaatttagaattcttatgacaatacagggacatagatgcccgggaaaatatgtggtggaaacttggaaactaccgttggatcgaaaaatggacattcgatattcatccacgtcatcacaagtaaacagtaaaatttttactcatgatgatgtggatgaatctcggacgtccatttttcgatccaacggcagtttgcaagtttgcactacatatgtggtttccaccacatattttccctggatgcccagatcaaacagaattaattagcatggtttaacagctaataaagaaaactcgtactaaggatgattaggaatttaggatccaagtatgaaataactaaaaaaaaaatcccctgttgagacattatatcagttattgttagtgccatcaacattttgtgcttcttaactattttggtgcttctgaaatattagtggatcgtgagtagagaccatttaacatatttgtttacagcagtttttattcactgtatatgctaataatccaaagttttggttcatactcagtaccctttccttgtacattgatataggtgcggaaaaatagtaaacattgtcggagttgtgacaaatgtgttgatggttttgatcatcattgccgggtaggtttatgttaaagcttctgtttcataaacttcacttgtccttttgccctttcactttagtttgttgacatggctattctgatgttgttttggtgtttctgatgcagtggctgaacaattgtgttggaagaaaaaactatgtcacatttctgtgccttatggctgtgagccttgcttgggtatgtaaaataatcaaaacaatattaatatttctatcaatgtttatattcttttaactgctgagaaacttgtgtcttgtggatttggtgctctggaagcaatttttcatgtttctaattgtggttgttcataatcttaaatgcata

SEQ ID NO: 12381 - DNA, 505 bp, Oryza sativa
tgtctaacttgttatccggcatagtccaattggcaacgaaatcggcgagtatctgggacttgatggctgttcgtggcacaaagtggacatcaaactggctcagctcgactacccatttcgcaatgcggccgacaacatctttgtttctcacaactttgccaagagggaaaaaggagacaactgtgactctgtgggcttgaaagtagtggcgtagcttccttgatgtcatgatgaccgtgtaaagcagcttttggatctgtgggtatcttgtctttgcgtcgtggagagcttcgctaacgtaatagactggtcgttgtactttctctctctcgacaacaatgacggtgctaacggaatacggtgtggcggcaatatagaggaataattcttcattaggttggggagcaacaagtacagggggtttgataggtagcgcttgagtgcaacaaatgcctcgtcggcttcctgtgtccatacaaatttgtcttgtttcttcagcagagcg

SEQ ID NO: 12382 - DNA, 2838 bp, Oryza sativa
ttttacttcctattatttgtacaggacatgtttgcgggaggcagcgagactgcggggacggcgttgcaatggatcatggccgagctcataagaaacccaagagtgatgcacaaggtacaagatgaggtacgacaaacacttgccggtcgtgacagagtaactgaagatgcaataagcaacttgaactacatgcaccttgtcatcaaggaggcgttgcggctgcatcctcctgtgcctctactactgccacgggagtgtagaaacacctgccaagtcttaggattcgatgtgcccaaaggagcaatggtgcttgtgaacgcgtgggcgattagcagggaccctcagtattgggatgaacccgaggaatttatccctgagaggtttgaggatagcaacattgatttcaaggggacaaactttgagtacacaccattcggggcaggacgaagaatgtgccctggcatcgcatttggtctggcaaatgtagagcttatgctcgcaagcctcctataccatttcaactggcaattgccagatgggatggatactgcggatctagacatgacggaggagatggtggttagtgcccgacggctccatgaccttttacttgttcctgtggtccatgttccattgccagtagcctcatcatagtggtgtatacaactactagttgggatagctcctgtacttgtatggctcgatttaattaaaagtttaaagtccaacggcgaacttctttgaaaaaaagatttgaagtcgaaaaatagagttattttgtgtgtgtgagagagaggggggatctagtaatatgaaagagaaggctcaacacatgggataggccaacataccagtacaagaaagtaagaaagtatgggtatagcaaccaatgaatataaaacattaaaaatacttggactgccttaattgaaaaggtcaaacaaccaaagtttcatacaaggacatccacacattgtccttaattagcaacttgaggggatacctccctgaaaaagaaagatgattttagcagcttattatggggttgtggtattaaaaaatttgaacaattattggtatcttgtgccactctgagacaagataaatgttggtcatcagttcatcaccacatgcaactgttcacaaataaacgaaggcccatacaaggtatattattgagatagtgttagcaagtctttatataaccgaacactttagactcatcatcggaccggacagaaaattaggggcctgaagtgttcggttatactgcgccagaccaacttttacttgttcctgtggtccatgtcccaacacttagcattatttttcccaaccttgcctcctatttgcacgaatctcaaagcaaatccaacgatccaaaatttgaatgttttgccctcaagaaaacttccaacagatgaataacgatctattcgtgtataatacgactagttggatagctcgtgtatctgtatggttcggtttatttaaaagtttaaagtctagcagtaaacttctttgaaaaggagattaaaataaaaaataaacttgtctttttctaaaagaaaaggaaaatctaggaatatgaagagaatagagataaggaagagaatagagataggacattgagcatcaccaagagtttccatatcattccctatgagagaatttgagaatccttttttttcaaaaaccaattccaatagactccctacctgcactcccaaccgatcaaactcccaaatccggatgattcgttttccacttcttatagggaagagattttgctcccaatccaccacacaccgcttttctgtgagtgcttggtgaaatattcccgtgcggctcatcttcggtaacatcggcgtggcggcgcacggccaccgcggcgagtcgggagccaagctcttggacgtgcaagcagagggtttttctcgtgaaggagatcgtcacactgctcccagtcgagaggggcatcgccacgacaaggttcatgcgtgcttggacttcgccgcaccgacatgatcctgcacgctggtgtggcgtggcgtggcgcgtgctgagacgacgcttgaggacctcctgatccccaacatcgatcggcaactttgtggagatgctcaacaacgtggactgcatacatggagcagatgctggagcagttcatcgatcgacgccgaacatgttggtgactgttcgccgcctcgccggacgccggagataaacgtcgacgaagcccagctggtcgacgcatgcatcaagcgagctcatgcagttagaacagtggccaagctcatcgacggatacctctcaacctctaggttctaaaccatctttggtcggtctggcaaaatcaacaatagtcccggttccaaaaagaaacagaacaaaaggttgcttttagtcctggttataaaaattttgatctttagtcccggttggtaacaccaaccgggagtaaagatggttcatagcctgtcagaggcatatcagggggtcgaggatctttaggccttgtttgtttcagcttaagattactgtaatctatattattgagacaaattactataagctgaattataataagccgacatagaataagttgttagctttttgtttctctggatcattagctggttgttaggtgttagcaacccaataatctaaaaaaagcacaattagagtggattactagattatagtaatttggcttatagattgtaataatctatcataataagctatatgtttatttcaatttactcctaataatccagattataataatcctaagctgaaacaaacagggccttagtcccggttggtgtcaccaac

SEQ ID NO: 12383 - DNA, 14737 bp, Oryza sativa
atacatagatccacaaaaacacaggagtagggtattacgcttctcagcggcccgaacctgtatatatcgcccgtgtcttgtgtgtttccattctcgcgaaccttccacacacagactaggagcttagaatctcacccagggcccccggccgaaccggcaaaggggggcctgcgcggtctcccggtgaggagccccacgctccgtcatctggcgcgccaggtagggggctttgcgtgtgtttttctaagctctcgcattctttcgtgtgcgccaagcttttcctgttcagcccaatggccgaacaagcaaaggcgcacaacctctctccgagtgttagcggtgacgacggggagccgaacccacgccgtcgagctcgtactccaccgccccctccacgccaaagtcctaggcgggaggagacgctcgagagggtcgaaggatccgcgacttcgacatccacgggtgatggggaagggcggcgagatggggagcgtcgcctcctcgtctacggcgacggcagcacgccccagggcgcgctccaagctacgggcgcgctcctacgtcacccgcccattgtccctgacccggagtctccagcccaacgttggctggacgacgtggccaacttggtcatgacggcacggcagcgcctaggtgctggtgggcggtcctccgccaccaagacctctggcgctgctaccaccggcttcgtgtcgtcaaggcggagggcgcggcgagcggcggctgttgctcgccattcagccgccactccttcgtcagcgcctccgacccaggaagaactgcgtggggggccggatgcccgcatcagtatcgagcgccggcgtaatggccggcgtgctgcccacgcaacggagggcgcctcctcgtccggagtgtcacatcaacacggacgcggggatcagccctccgtgcccccggttggtggtgtcggctgtagagcctttgtggcaagccttcgaaacgtccgttggcccccaggttccggcccaccatcgccgaaaaatatgataggagtgtcaaccccgccgagtttctccaggtctacacgaccgggatcgaggccgccgggggtgacgacagggtcatggcgaatttctttcccatggccctgaagggacaggcacggggttggctaatgaacttgccacccgcgtccgtccactcttgggaggatttgtgccaacagttcaccatgaactttcaaggcacatatccgcgcccaggtgaagaagcggacttacatgcagtccagcgaagggatgatgagtcacttcgctcatacattcagcggttctgtcaagtccgcaacaccataccatgcatccctgcacacgcggtgatctacgcgttcagggggggtgtgcggcacaaccgcatgcttgaaaagatcgcctccaaagagccccagactaccgcggagctttttcagctcgcggaccgagtggctcgtaaggaagaggcatggacctggaacccctccggttccggtgtggcagcttcggccgcccccggatccgctgctcggacagggcggcgtgacaggaggaggaagaagaggtcagcccattccgacgacgagggtcatgtcctcgccgtcgagggcgcttcgcgggccacccgaaaggggaggcctgcgagcaacaaaaagaaggaggccggcgctcccagtagggagcgcccaaccggcaagtggttcatcgtccacaacacctcccttcacgacctcgcggactgccgcgcagtcaaaagtttggctgagcggacgaggaagtgggaggaggagaggaggcaggagcgccgagagggcaagtcctcggcggttccttccggcaatcggcgaagtgaggccaagcagaaggcccccgccgaggacatcgatgacggcgatgatgacctaggtttccaagagcctggggccaccatttccactgtcgatgggggagcgtgtgctcacgtttctcgccggagcctcaaggccatgaagcgagagcttctggccgcggcccctactcatgaggcgacgcgccgggcgcggtggtcggaggttgccctcaccttcgaccagaccgaccacccaccgtgcgttgcccagggaggacagatcgcaatggtggtttcccccactgtttgcaacgtgaagctggggcgtgtcctcattgatgggggagcagccctcaacatcctttcccccgcagcctttgacgctatcaaggccccgggaatggtgctccggccgttccagccgattatcggtgtgacgccgggtcacacttggccgctaggtcatatcgacctcccggtcaccttcggtggatccgccaacttccgcacggagcgggtgaactttgatgtggcggacctcagtctgccctacaacgcggtcctagggaggcccgcgttggtgaagttcatggcggcagtccactacgcctacctccagatgaagatgccgggccccggtggccccatctctgtccatggcgacctcaaagtcgcgcttgcttgtatggagcagcgcgcggaccacctcaccgccgcgtccaagcccgagggaggcgatgagaggcttggcacctccgcccccgccgccccgaggcagcggatagtcacatgcgacgaggtcccggtcaaggaggttgccctgggcgacggcccgtccaagaccacacggatcggtggtcttctggacggcaaataggaagacgcgctcgtctctttcttgcgggcaaacgctgacgtcttcgcatggagaccggcggatatgcccggggtccccagggaggtgattgagcaccgtctcgccgtgcggtcgggcgcaaggccggtccggcagaaagtacggcggcaggccccggaacgtcaagccttcatccgcgaggaggtggcgcgacttctggaggccggattcatccgcgaggtcatccatccggagtggctggcgaacccggtggtcgttcccaaggcgaacggcaagcttcggatgtgcatcgactacaccgaccttaacaaggcatgtcctaaggacccttaccccctgcctcgcatagatcagattgtcgactccacagcagggtgcgatcttttgtgttttctagatgcatactctggttaccatcagattcgcatggctagggaggatgaggaaaaaactgcattcattacccccataggaacttattgttatacgacaatgcccttcgggttaaagaatgcaggtcctacttttcaacgtactactcgaatttctttgggtagccaaataggacgtaatgttgaggcttatgtcgatgacttggttgtaaagacgcgcaaccaagagaccttactctcggatctagcggaaacttttgagagtctccgctccgcccgcataaaactgaaccccgataagtgcgtgttcggtgtacctgcgggcaagcttctcgggtttttggtctctgcccgaggcatcgaggccaaccccgagaagatacgagctatagagcggatgcgcccccccagcaagcttagggatgtgcaatgcgtcaccggttgcatggccgccctaagtcggttcatatcgaggctgggagagaaggcgctacccttatttaagctcctcaaacgctccgggccgtttacttggacggaggaagctgaacgtgccctcactcagttgaaggcgtatctcagctctcccccagttctggtcgccccggagccaaatgaacccttgttactctacttagcggcgaccccgcaagtggttagtgcggcgttggttgtggagcgcgatgaggacaatcctcattccgcgcacccccaccctgtgctggcttggcccgggagagagcagggaggagaggcccccgagccgaacggtggcccaaggcccccgacgaccggagcaggcactctgcccgcttgtcagacggtgccaggtgcccccgacccccagtatggcccgagggccactgcgggaaggccgcacctatcgccctctgaccccgaggctaactctgtgacgactcgacccgggagagagcagggagaagaggcccccgagccgaacggtggcctaaggcccctgacgaccggagttggccctttgcccgcttgtccaacgacgccaggagcccccgacccccaggacggccccgaggccactgtgggaaggccgcccctgtcgtctccgaccccgaggtcgtcggcacagaagacgagtgcaccccgcgaggccgcttggacaaagagcaccccagggatgtggcccctagcgaagaggatcggccccaccgaaaggtgcagcggcccgtctactttgttagtgaggccctccgggacgccaagacccgataccctcaggcccagaagatgctttacgctattctgatggcttcgaggaaactgtgccattatttccaggcgcatcgggtcacggtgattacgtcttaccccctcggccaaatcttgcataatcgagagggtactggacgggtggtgaaatgggcaatcgaactttctgagtttgatttgcactttgaaccacgccacgctatcaagagccaggccctcgtcgattttgtggcagagtggaccccagctcccgagcccgtctcagtccccgaggccagctcgggcccctcacagctgcctcacaccgcccactgggtgatgcagttcgacggctccctgtctcttcagggcgccggtgcgggggtcacgttgacctcgccgagcggagacgtcctcagatatttggttcgccttgactttcgggcgaccaataatatggcagagtacgagggactccttgcgggactcagggtggcagctggactggggatccgccgcctcctagtgttaggcgactcccagctggtcgttaaccaggtctgtaaggagtaccggtgctctgacccgcagatggacgcttacgtgcgccaagtacggcgtatggagcgccattttgacgggatagagcttcggcacgtgcccagacaggataacacggttgccgacgaactctcacggctcgcttcctcgcgagcccagaccccaccgggcgcctttgaagaaaggcttgcccagccgtcggcgtgacccaaccccttaggggagacggacgcgcctgacaggccctcgatgcccgtcggagtccaggcctcgggacccgaggggagcgctcccagctcccttagattgattgcttggatcgctgagatccaagcatacctcacagataagactctacccgaggaccgcgaagggagtgaacgcgtccaacgcatctccaaatgctacgtgctggtagaagggaccctctatcggcgcgcggctaacggaattctcctgaagtgcattcctcgggaacaaggcgtcgaacttcttgccgatatccatgaaggcgaatgcggatcccactccgcctcgcgcaccttggttggcaaagcctttcgacaaggtttctattggccgacagctctcaatgatgcggtcgacctggtccggcgatgcagagcgtgtcaattccacgccaagcaaatccatcagccggcccaggccctgcagatcataccactttcatggccatttgctgtctgggggctcgatatcctgggaccgtttaggcgggccccgggcgggtttgagtatctgtatgtcgcgatcgacaagttcactaagtggcccgaggcttatccggtcgtcaagatcgataagcactccgcacttaaattcattaagggcatcacagcccggtttggagtgcctaaccgtattattacggataacggcacccaattcactagtgaacttttcggcgactactgcgaagacatgggcatcaagctctgctttgcctcacctgcccaccccagaagcaacggccaagtggagcgcgccaatgcggaaatcctcagaggccttaaaaccaagaccttcaacatcctcaagaagcacggcgattcgtggatcgaggagttgccagcggtgctctgggcgaaccgaaccacgccaagccgagcaaccggggaaacgcctttcttcctcgtctacggcgcggaagcggttctcccatccgagctcaccctgagctcccctcgggccaccatgtactgcgaggctgatgaagatcagcttcgcagagatgacctcgactacttggaagagcgaaggcggcgcgcggccctccgagccgcgcgctaccagcagagcctgcggcgctaccatcagcgccacgtccgggcccgatcactctgcgtcgacgacctcgtcctacgccgcgtccaaacgcgtgctggattgagcaagctctcaccaatgtgggagggtccgtatcgagtgatcggcgtcccccggccgggctctgttcggctggccacgggcgacggcacagagttgcctaacccgtggaacatcgaacaccttcgtcgcttctacccctaaagggggatcgggtgtcaggtttcgggctcgggccaaccccgcacccccctcgggcgtgcagggttggccgggagctaccacatatgcatattcttatttctcttatatctgtatttcaataaaagtattttcgatttcctaaaggctgtatctgtgctgttgtttccttttgaaggatcttgacttgaaataggtcactcgtgttcaatcctgccctcgggggctcgggtcggctaaaatcgccaaacggggcccagaaccgagccgtgccccggggcgtggtgaactccgggggggaatcggcaaaaacccacaatcgggtcacccataaccctcggtcatcacgctcccggcctggccagtctcgacatgtggatctccccaggcactagccccgacccgagccatttgaggactaggacctgggcacgagcccttgttcaagccaagacacaaaaggaccgcggcacagaccatcctcgtctcatacacacaacaaatagaattgacacaaaaaattttcctctttatttgattgcagattaaattagtctatacaagaagggggcccgaaggcctcggaagaagaaaagaagaaactatttaaagattggcgggggcctgggggctcactccgatgcacccgggtcgccagcctcgtcgccattgtcgcccactccgccgtcatcgtcctcctcgtcggagttgagggcgaacgcgagccgaggggccgaaccctcgaagttgtggacgatatggtcggcggcgtcccggacctgcgcgcgcgcgccgtcctcggtccagggagggaactcgtccagcgccgtccatggggagaagtcgggatccctggcttggtaactcgccagtacgagctccaccgctcctcgggcgaggtccctcgaggatgacttaatcgtcctctcgagctcctcgggaagccgttggagagtcccggctatctccgagaggcgctgggcgaggcccccctggttggcggcgtacttcgcagtccgcccgccccagagcccgcctgccggccggcgcggtctagacgggagacggcgtcccgaagcatgccgggccctacctcgcctgccaagcggagggcctcgacctccccggcggacgagtctagcgcgccctgcagatcggcgatggtgtgttcagtagctgcgaggcgggcggttaagtcgctttcacccgcggccgccccgccactgcgcgccctcgcgtccatctccctctcccgcgcctcgagctcagcggcccgctgattcagcgcggccctctcggcgcgggcaccttctagattacggcgcgcctgctcctcccgcactgcctcgcggagggataggctgtccgccagccgttgcgccgcggcctcggcctccttgagagctcgctcccgctcggtgagcgcgtcctcgcggaggcggagcgcggactcctcttcggcgcaggcggcctcgtgcgcagtcagcgttgcctcccggatggcaacggcagcctcgcgatccgctaggtccctctccacggcacaggcacgctcttccagcgccatggcacgggcctcaagggcttcttcgcgccgccgggatgccacctcggtctccgccgcccgccgttctcgggcagcggcagcgtcaaggaccccctgggcggcgtcgagcttcttccctagctccacctcccagctcccgtattgaaggcggagggtgtcctgcgcctcgttcatcacggtggtggcgatgagggcagccccccgctcctcctccacctccttggcgatctcccccagcaccttccgacgggcttcgagctctgagacgtgccggcggtgtgccttgcggcccacctccaccatggcctccaccgagcgtcgcccctcttcgacacgtgcccatgcggcgtcgagctccgcccgctctgcttgcagggcctccacctgggcatttaacccgtccaacaccgtggtgtttgcgacggccaaggcctgcagaaggggttctgcgctcagtggagcaacggaaggtgtggggaagagccgcctcgaagaggatgccgcgcggcttggcccgccgatggacgtgccggactcggggatgttccccggacctggtttgtcctgagcgtcgcacgagggagtgggcccaagcgatgcacccgcggcctcgccgcgagttgcctcggaagtcgttgtcgcctcggcctggcgaagtctagcctcctcccgagcggcttcttcagcttggcgagctcggacggccacctgggcagcttcctcggcttctcgaaggcgatccacggcctcttgccggtcagtttcacgggtcgcctcggaggatgtcgtcgcctcggcctggcagagtccggcctcctcccgagcggcttcctcggtctggcgagcccgggcggcctcccgagcggcctcctcggcttcccgaaggcgatccgcggcttctcgccggtcagatttccgcctccgggcctctgtggtcgccgggtcctcggcctcagactggccggacttggaatggcgggagggacgcgacgggatctcgctgaagcagaagaaaagccagaagacaaacaagatgggtgaatgaaaacttgtgttggaagaatgaatacagccacaatgggcgtgggacgaacctgcgagggggtcggttaaacgaccaccttggaggggaaatgaggtttccccgggatggttctgtcccccccatcttgcggagccgtttcttcttccgctccctctcgagctgcggcgtcggcgcggccccctccgggcgcctgctgctgacacgcgccgccccgccccctcggggaggagatggggaggaagtaccctcttgctttctcttccctcgggcgtcggcagggcggctgccccccgagcccccatcacggggcccagaagcacgaccccctcccggggtagattgttcccccctgcggctcccgcccgagccatcgtggcctcgaggagcccgctcctccgacgccccgaccgcctgcatgatggtcaggatgttggcgcgatatggatcgctgcagagggggaggactccttgggggatgagggatgcctccgcggagctgagattcagcatccgttggatcattaccttgaagtcttcggggacccagtcccatttgaccccccggtgggtcctcatacagtcctcggacccggtgtactcccaggcaccccgggcgcgccgctggagtggcgcgatccggcgacgaaggtagtcgccatacaccatggcccctgtgagccccagggatcgcaggcccgccaggcggtcgaggacggcgtcatagccatctcccagatctaccggcgcccgccagctggaggcctgcgccgggggctggctcggaagtcggaggcgcgcttcgtcggcgaggggggtgtagaaccagtcgctcttccagtcatcccacttcttgcggaggacgcagggaatatagcggttcaacaccggcccccgcggctggaagtagcagccaccaaccaccgacggcggcgacaccgactgtacggtgaagaaccaccgaaacagccgaagggatgggcgcaccccgatgaacatctcgcacaggtgcgcgaagatggccaatgtcattaccgcgttgggggtgaggtgcgccatctggagatcgtaaaactccagaacatccatgaagaaagaagaaaatggcggaaccagccctgccattgcaaaagggaggaagaagacggaccgccccgggtagcatggcaccgggcgtccctcgcccagcgtaactatctcccggccggtggcagattccggcatgaagcggcgcggcagcccggcctgcctctcgctcacgatgcgggaaggcggcagcacgctaccatcaagcaaagcggagccccgtgccatgacgccggaggaagagatgtttaagagcgagcgcgtgtggcgaaggtagggcacaggaaacaaggagttagggcgcaagcggcgaagacaagggaaataatggcgagaggaaggaagcaaatctcttcctcggcgactttatacccttgccaacgctgtgcccggctcctcgtttctcgcgcccactatcttgccccctcgtttctcgcgcccacgcttccactaatcccattcgcccgtttgcggtgcatgaggtggatatgcggctgtggcagtcgagatggaacatctcgtgcgcgcgttaattacgctcgccgaccaaagcgccatcaccatatctccaggaaaaacgaaccggcttgtcccgatttttagaccggccccaccatgtcaccaggccttaggaagtggcgtcacgcccgaccgcttccctcgaggagggcgatcgccctggcataacgccgggggctactgtcggtgacatgggaccgggagtatcatgacttagagacttgaggcagacacgatcacccacgtggcctaaccccctcggggggggtcgggcccgagggtgatacggccgcccttctctttgtctccccgaggggtcggaccgctcccgtctcggccccgagggccgaggcgccccgaccccttgtgggttttgcgccgcgtatatggggtaggtgagcatagcggggctcacctaaccacatttattgcggtttggacgagcgcgtcacgccgcatgtaacgcagtgcagcgcgctcccgatcagatcgtgggttaggtggcgacaggcggtctgacgcacgcctcgccccatcccgtcaggatgagagcctccaagcactcgtccctagccggagccggcgtgttagctcctggagatggcacgttggtcccggtcagatatatataccaggcttcatcctaaccattacaagcaagacattgtatgaagaggggcgaacatgcagattgataaactgacgcgtggtggacaagaatgaccgatttgtgaccggtctgacactgatcatgtcgtcaacagacagccatgttcccacgtcgcgcctgcttccggcggaagtggaggtaggtatgggctgtcccatcagaaggtcattcggacggcaaccatacaagtctccgtctgtttatgaaaagataggataagtccccacaaaaaagagagagatggtgcatgtggtatccccttgaggtataaaaggaggaccttgcccacttagaagggggatggattttcggatccagaacgatcagagagggagagagtaagggctctctggttctccagctcttttgtagcttcttcatacatagatccacaaaaacacaggagtagggtatttacgcttttcaccggcccgaacctgtatacatcgcccgtgtcttgtgtgtttccattctcgcgaaccttccacacacagactaggagcttagaatctcacccagggcccccggccgaaccggcaaaggggggcctgcgcggtctcccggtgaggagccccacgctccgtcagtggtggtggacaaagaagccgatggaggatggtagtatagagggttcgtcggcgagcctcgctggtgttggaggtgacgttagcgatgtgaataggcagcagtgagagggttgggggggaggatggcagcgccggcaactaggccattaagggcaatatatatatatgagaccatggatgtaatctaggtttttaggttgtgatccaatggtttaatatttgcaatatttgtctgcaaatttttctgtcaaattatatacttttttgcaagattcatttttctttagaaaattcagttgaatatttgtttttcttccgattcatgtaggatctgtttataggtggcagcgagacggcggcgacgacgctgcaatgggcaatgtcagagctgttgaacaatccaaaggtgatgcagaaggcacaagacgagatacgacaagtgctttatggacaagaaagaataaccgaggagaccataagtagtctgcattacttacacttagtcatcaaggagacgcttcggctacaccctccaacgccactacttctaccaagggaatgtcgtgaaccatgccaaatattaggattcgacgtgtctaaaggggctatggtactcatcaatgcatggtctattggtagggacccaagcaactggcatgcacccgaaaaattcatgccagagaggttcgagcaaaacaacattgactttaaggaaacaagctttgagtacataccttttggagcaggacgaagaatctgcccaggcatgacgtttaggctagcaaacatcgagcttttactcgcaagccttctgtatcactttgactgggagcttccatatgggatgcaggcaggcgacctcgatatgactgaaactctggcggttaccgcacggcgaaaagccgacctgttggtagttccagttgtgcgtgtccccatcgtgggttaattagccatccacatttcagttgaccgttattcatatcgatcagtgtctcgctgtcctttgtccaaatgtcaaattaatcagccccaataatgatcatatatatgttttgtttgacttttagtttgttcgagcagcagtaagtagataggctaagctttgaacaaacattcaatgtcgttcatgaaatgtatctgcgagtgatctccaatggtatcttgacagtgatgttttccaacctgttcagacaatatttttcaacatgttcagacaatttttgtccctgcttagaaacttatcaagatcagaattcagattattagaaccaacttacaacaatgaacaaactgcaaatgatctgaagtccaaaaaaacaactatgcctatgctgaattagcaacgactgaatgagaacatgcaaagcgagagctcatctgctcaccttcctggatactcacacgtcgtatgcatccattctcctcccgtttcatccccccctcaaaaacttcttgtcaacatttggcagagcagcggtgatttcaccgtgccatgttttggaatttcgacatcctgtctcagtgtctccacacaaaatgtttttatttttgtttttgttttgttttgcagaggccaaatgagtatcagctccacaacctcagggcagtaggacactctgtttggctgggctataacttttcagataaacagataattagttaagataatatagatgcttagatttgatttggtcaccacatgactaacactagtacatgccgataaaaatgctgctttgcaatatgagaacgataagtatcttgatatgaaattaaatactcctactaaaataacaagtaatatgaagaataaaaaagaaaagtattttttatgataacgaaaagaaatccggtctctatgttcacacacggccctttcagtgtagtatgctaaaaccttgtcacggcccagaattaacgtcgtctgaatgtcaacatgaaagaactcatttgctcatgggcttcaccttcctgcacactcacgggtcagatatatccattctcctcccatttctttccaccctcgaaaattttgtcaacatttggcacagctgcagtgatttcactgtgccatgttctggaatgttggcatcctatctcactgttgtgtctggctgcttggctggccaatgaattgtcagatataatagactagtattagacaaaataatatagatagttagatttaatccattatctaaaagagcttagatttgatcaggtcatcacatggctaccactagtagatgtcagtatcactttggacatttggacaaacactttcttatcggcacagcttctgagctccttcagttcaatccacccattcgatagtccaaaggagcaaaagccatagccatggcggcggcggcgtcgtctgttctggcctacctgctcgtcgttgctctccttgccatcgtgcctctcgtctacttcggctgggtggcgcgccggcgcggcgagggcgggcggctgccgccgtcgccgtgggggctgccggtgatcgggcacctgcaccacctggcgggcgcgctcccgcaccacgccatgcgcgacctggcgcggcgccacggcccgctcatgctgctccgcctcggcgagctccccgtcgtggtggcgtcctccgcggaggcggcgcgcgaggtgatgaggacgcgcgacatcgagttcgccacgcgacccatgagccggatgacgcggctcgtcttccccgcgggcaccgaggggatcatcttcgcgccctacggcgacgagtggcgggagctccgcaaggtctgcaccgtcgagctgctcagcgcgcgacgcgtccagtccttccg

SEQ ID NO: 12384 - DNA, 6217 bp, Oryza sativa
ctttcacagctatttacccagtagatatgtcagcgccaatgaagttgacgctgaagtctcctgacgtggcgattttgtgccaccttggacaatatcttaacaccaaaaaccttggcgctgagacgttatatctcagcgccaaacgccaaacccggtggcgctgaggtcgcggcttatttttggaatagtttttgacacggtctattcttataataagtttgttaaaagggtcaatttgtcaaatttttggtccaggacgtggtggtgtcaaaggataaatctcactggtgtcatccattaaagaacatcatagatacttgggttaaacaagaatccattggtgccaggtgacaccacacctaacacgaagaatattatttaaattatattgacaattgtcggtgaataggaacggggtacctatttatccagcaaaaggattattattaaataaacaacatgctcagaatgtctttgaaaataaaaataaaaccctagggtggcgtcgctaggggccctttccagagggcctcaggcccacgtaagatttcatatacagcgttcctcctggatgggggagaacgttgcgtatatggctcaaaactctaagtattgaagtagcttgcggcctggtttgggtcacaaataaaccgcaaacgtgccttaagaatatagcttagggtcagcctcgggcatggccatgttctgggcctcgggcttgccctaacccttgcagtttttatggtcctcggcaagaggggcatggcaacatgcaagtcctatatcttaagaagatgagctaagatctgcctcggatgcggtctaactctaggccctgggctcaccttagcccatacaggtcgcacgttgctcgaggaagaaaagcaacgaggcttgccaaacataaatgcgtgatcccatgtgtgctttgggcctggccttgcctcgggccctaggctcccccgagatcttgtatagctcacgtcccctgcttagaggggcgtgagaaggtacaagacgcacaatctcaaaatattcttccatcgacgacgtcttcaagaagctcatcaagaaataataaacattctttaagcgcggcagggcgcgacctcaaaaactctcaggaagtggggcatgctccccaccataaataaaacaggtttacagggggatccccggccagtctgaattgaaaggacgtggacaagacgttagcgttgagtcactttggatggtggcgcctgggacacgtgtcccgcatgactcgcgccacttgagttagccaaatgggcgttgtttcaggcaggtcgggcctcgtcgggcccaccatgcaccacatggtgagcgtattggtggaggcccaactgtctcgaatggagctcgggagcccggggctgtgaaccgtatagacttgaaaggttccttgatggttgcgttagaaatctggccggcagcgacaagacggctcataagacaagactaagagtagatttgtaataatgtgagcccctcctagactggaaggggattatatatggatgaagggttgctttctgttaggttagtacttccgctttgtagcctgaaaaaaaggcctctcttatactgagctgatctagagaagataacgaacatcaatacaggagtaaagtattacacctccgggtggcctgaatccgtataacctcatgcctccttctccttgcggggtggccgggcccacgaaaccaccgtgatcgcagatacctcgcaccgcacgcggactaaccccctggtcgaatctccactctcggggagggatctccactccccactgtctgagggaccgccccctcgacaacaataactgaaggatacttcgtacttggttttattattgagggaggaaaaatcggagcgtgccaatccatagttaagggaggtagtatatatataggcattttccttaggaatatgtgaattgacaatgtgcctatttttttttaagaaatcgtgcgttctacttatcgtagagagtcaaaatacatattgcacgagtgatatatttgtagcttcagagctacgacaaggctattgagaacagcatgatttgcggatggtcccgtcaaagaagtctaaattacatctagatccaacaaataagaaaataaggactccgaaagaaaataaaaaagcaatccagtccttgagctcgctgcttcttcttcttccagagttccagtgtgttcaactcgatgcatatggcaatggatacagtagcgaggctagctacaggagaagatgacaagccacaaacccgataggggcctcccaaagttggatgttaaagcaagcaaggcaagaaaaagaaaactcagctaaaccttagaacttaacttcgttgctgcagacaaaggccctattcatttctccaacaaatgttagataaatttttcgatactcgtggcatactttttaaacggctaaacggtgtgtttcgtgtgaaaactttatatatgaaacttgttctaaaatatcagattaatctatttttcaagttgtaataattaaaacttaattaatcacacgttattatcgtctcgttttgtatgaatcacttaatatttatctttatcttcatcttaagagatacaaacaccaccaaagaaacactagaggaatagcaggaacctcatcgaagaaagtttgattggccagtgcaacctcttcgaatcctactttcgcagcagatatgttgcttgcccttcaacaattgtaggtgtgagagcttaaccctacaaccgttggccagacaacgaagctagtgcaaacaccagctatttcgtcgatgagccatggttgccacgatgaggaagacagacacccgcatcttcaaactatgcaagagggagagggaaggaacaacaacaacaacaacggaacgagccgaactatgagataaacccaactgctcaccggccagactccccccaccccggccaccaacctgatagccaacggccaccagagacgtagatggaggggaaagggagtctcatgggaggaaaagctggtcgcgtttgggatcgcctctcaatctctcatgttagaataggtgtcgaatatactagtcctatatatgatcatagttggacttggagttgtaataggtggtaggggtggagataaagttggactctgtaacccggcaactctcttaaatagagagggggcaccacaatatagcgtagatacgcagggagatgatggcagcgtagccatggacttatagcggctaggagctatgttggttgaggagaagcgtccataatcagagccccggagatgtagccttcggctgaatttcgttaacaaatatagcatatctcgtatgatcaatgattgaatcgatcgagaaggttagtcgtcgttacgctatatcgactaacttttataacatctcatagccttaggatggatcgagagaggagcttagtttgtttttcttgtgtgacatatggtgacataggctgttacttcacagttatttttgttgggtggggacgtggggtggggttcatggagtggttgaacattagcaaacatcttccgaaaacgttcgagatcgaacatgtgattaaaaaaggtgattccggtcatactcaaatgccggccgccagttctaaagtaatgtcgtcgttctcatcagccattagcgcctagaataatccaaggtcaaccacccattcatttatcatgatgcatgcatgcttaatactgacactggatgcgtgtcaaattggagttccaatataatgggcactatgatttgctctaaatattggtcattacagactaataatccaaagactcgacacattttcaccatggctggatttccagtctacctgctcttcctcgctgccctgatcatccttcccatggccaacctcatccgttctgcacgccaccggcgtcttgccggcgcacggcggccgccgccggggccgtgggcgctcccggtgatcggccacctccaccacctcctcgccggaaagctcccgcaccaccacaagctgcgtgacctcgccgcgcgccacggcccgctcatgctgctccgcttcggcgagctccccgtcgtggtggcctcgtcggcggacgcggcgcgcgagatcgcgaaggcgcacgacctcgccttcgcgacgcgccccgtcacccggacggcgcggctgaccctgccggagggaggcgagggcgtcatcttcgcgccctacggcgacgggtggaggcagctccggaagatctgcaccctcgagctcctcagcgcccgccgcgtgctgtccttccgagccgtccgcgagcaggaggtccggtgcctcctcctcgccgtggcgtcgccgtcgccggaagggacgacggcgacggcgagtgtcgtcaacctgagcaggatgatatcgtcgtgcgtcgccgactcgtcggtgcgcgccatcatcggaagcggccggttcaaggacagggagacgttcctccggctgatggagcgagggatcaagctgttctcctgcccgagcttgccggacctcttcccgtcgtcgcggctggccatgctcgtcagccgagttcctggccgcatgaggcggcagaggaaggagatgatggagttcatggagaccatcatcgaggagcatcaggcggcgcgccaggcctccatggagctcgagaaagaggacctggtagacgtactcctaagagttcagagagatggtagccttcagttttccctcaccacggacaacatcaaagctgccattgctgtgagttacaatctaaaacttacatggatgcttttattttttttccgggttttctaattaacattcaatactccatccgttttatattacaagactttttagcattgcccacattcatatagatgttatatgtatagattcattaacatcaatctatataaatgtggacaatgctagaagtcttataatatgaaatggaggaagtagtaaataggaggagaaatattacatattttgataaatccgattcactagaagattcatgcgccacgcctcctctaattttactgactccagcaactccaacggtgaaaattggtggtggcctgacctgttagggttcgggtatgtggtcgaggtaggggagaggggagagtggagataggggcattccccaccttagatggatgctgggggaaggggggagggagggcagcgatagcgaggcggtggcggcatcaccaaagccgtggggtcgacaatgggcaatgagcagggtaggcgacagggcaaattaaggctgtgtttagttcacactgaagtttggaagtttggttgaaattgtaacgatgtgactgaaaaattgtatatgtataaaaggtttgatgtgatggaaagttggaagtttagaaaaaaaaactttagaattaaacagggcctaaaaaaatagctggatcataagatggtgagcgaccatagcttatccgcctgcgataaccactggagatagggagaaggcagagcagggcaagggagacgacaaagatgttaggtggttgtcggtgacatgggaccgggagtatcatgacttagagacttgaggcagacacgatcacccacgtggcaccgggagtatcatgacttagagacttgaggcagacacgatcacccacgtggcctaaccccctcggggggggggggggtcgggcccgagggtgatacggccgcccttctctttgtctccccgaggggtcggaccgctcccgtctcggccccgagggccgaggcgccccgaccccttgtgggttttgcgccgtgtatatggggtaggtgagcatagcggggctcacctaaccacatttattgcggtttggacgagcgcgtcacgccgcatgtaacgcagtgcagcgcgctcgtttatccggtctgtgaccagtcacagacatatcagatcgtgggttaggtggcgataggcggtctgacgcacgcctcgccccatcccgtcaggatgagagcctccaagcactcgtccctagccggagccggcgtgttagctcctggagatggcacgttggtcccggtcagatatataccaggcttcatcctaaccattacaagcaagacattgtatgaagaggggcgaacatgcagattgataaactgacgcgtggtggacaagaatgaccgatttgtgaccggtctga

SEQ ID NO: 12385 - DNA, 12621 bp, Oryza sativa
  unsure (1)..(12621): unsure at all n locations
attcctgcagcccccagcagacaggctgcagctccttcagtttaagccatggcggcgtttctggtctacgtgctcgtccttgtccctctagccgtcgtgcctttcgtctacttcaaccgcgtcgcgcgccggcgcggcggcgacgtccggctgcctccgtcgccgtgggggttgccggtgatcggccacctccaccacctggtgggcgcgctcccgcacgtcgccatgcgcgacctggcgcggcgccacggcccgctcatgctgctccggctcggcgagctccccgtcgtcgtcgcgtcctccgcggaggcggcgcgcgaagtgatgaagacgcgcgacctcgacttcgccacgcggcccatgagccggatggcgcggctcgtcttcccggagggcggcgagggcatcatcttcgcgccgtacggcgaccggtggagggagctccgcaagatctgcaccgtcgagctgctcagcgggcggcgcgtccagtccttccgaccagtccgcgaggaggaggccggccgcctactccgggcggtggcggcggcgtcgccggggcaggccgtcaacctgagcgagctgctgtcggcgcacgccgccgactcgtcggtgcgcgccatcatgggcgatcggttcagggaccgcgacgcgttcttggcgatgctggagcgcggcctcaagctgttcgccaagcctgcactgccggatctctacccgtcgtcgcgcctcgccatgctcctcagtcgaatgccgcgtcggatgaagcagcatcaccgggacatggtcgcgttcctggacgccatcatccaggagcaccaagagaacagatcagccgccgccgacgacgacaacgacttgctcgacgtgctcttgaggatccagagggaaggcgacctgcagtttcccctgtccagtgaaagcatcaaggcaacaattggagtaaggaccttttaactacgaaataccacgtcactttctaggaaatgtaatactacttgcctcaatatatagcaatctagaaccgaatatgatacatcctaatgttataaatctgaataggcctatggtttgaaacggaggtagtaacgctaatgaatttggcttcgtgttatgtgtgtacaggacatgttggttgggggcagcgagaccgcagcaacgacgctgcattggatcatggcggagctcgtgaggaatccgaaagtgatgcagaaggcacaagatgaagtacgacgagagctcatcgggcatcgtaaagtgacagaagataccctatgtagactgaattacatgcatatggtcatcaaggaggcactccggctacacccaccgggatcattgctgctaccacgggaatgccgacgcacgtgccaagtcctaggatacgatatacccaagggagcaacggtgtttgttaacgtatcggctattggtagggatcccaagtactgggacgaagctgaagagtttattccagagaggtttgagcatagtgatgttgactttaaaggcacacattttgagtacacaccatttggagcaggtcggaggatgtgccctggcatggcgtttggtctagccaatgtggagctcacattagcgagcctcctgtaccatttcaactgggaactgccgagcgggatacacgctgagaacctagacatgacagaggagatgcgattcaccacgcggcggctccatgaccttgtccttattcctgtagtccacgtacccttgcctacaatataagctcatcatagcacactgatttttgtacaacacttaagcaatctttttgactggcaactcaaaggtgcaaccacctatggtgaagcttgaggctatatgtgaaaaataaattttcataagcggcttcttataagatttccacctacactaatcgtactttgatatgcaccttatcatgaaatgtatttggaagctttgcttgtttgatgtgattgttatgttaaactttttcttgtaatttctttgtggaaattttgtgacacatttggaattcctaagagctctcatgtttttcctatgatatacatatatctcaatgtctcatgtgtaatttcttatgcaaacctaatctaatgagaagatacaaccttcaagactatctcttttgtgaaacccatttagggctatcaacgaatcgagctcaaacgagcttgattacctaggctcaagcttgacaaatgctcaagtcaagcctacgtagttcatgcatctttgtacaagtgtgccggaaagatcaaaccaatagaactgctcatatcacagtagtcatagtatctattgaagacctcaaataggaaggcctataaattcccccatgcagcccaattccttggggagagcccacatatgcctgatgcatctggaaaagctcttgagcacgttggcgtgtgagcccagctagctgcacgaacaggctcctttctatttttggctatctttcggatttagctcgttcccttctttgcccacccccgacttctgtcaattgtttaaagagcatagcccatgaatgaaccatatgagcaccggctctatgaagttcgaatcaaatctttgggttcccgtgaataagaattgttgggtgcacaaagcaagtgcttctagctgtttcacttgcttctttcttatcgtggccccaggtttgccacaattgtagcaacctcctttctttttcttctaaggttatttctgagtaatctattcaactaggagcctgcgctataaaatagagataaaaggattaccatatgctcattcatcaaaaactatagagacatgaaaagaaaaatgatatttttatcaaatcaacagaaggaaagatcctttaccaggtttgaattccaccgtcctactggcttgcttctctcgtctatcctcccatcgattcttcctcatgttgtgtcatgcaccacctctaccaatctatggatgcttctcaaaagctcttactcctctcaatcgaggaactaaattagaagaaccagagaagagaagtaaaaagcatgcaagtgactacaagctaggtctactattgatacgccttgaggaaggaagtggtgagacccaatgacagatcaaagtcgaagtaagtgaaaagaaaagggaccctctgctgaccggaggaagcattttggaaaataaaaactcgatctatacctctataggtagcagagcagagggaatgtcgccctcgttcccgaggaataattctcttaatgaactacttccgaatatagaagtgaataccaattctactagttgttaggaagagctagggttgttttgctagagctcacgtgtacgggggtacgcatggagaaaaaggtctagaaggacaattttcaacacaaacccataatcttttacaaatttgagccccccccccccacctaatgtaaaataagcatggaagaatatctttggtgacaattcttcgagggaagaacaacttgtcgaaagatctcaatacctagaggaaaggatggtacaattagccaagagagtgaaattttccgtaaccatcctgaaatcggttgaccattctggttctaatttgaaatcgtagtgagaatatctagcatacatctgcataagacaaccagtcaatccggagtttagtaaaacacgttgtctcatggcctattagtagaataatatatatgctaaagataatcccctactaagaaaattagattatagttaaccacattaatgaaagagaagaaaaagaaaacgtttagagtaactcgagacgatgccacgttgctacatgtagtttttttaacctatcgctatatattggcacttccgtgtgatgtggcaagattcatccatttaatgacatgttcatttgctaccgctcataagctcaatacacgattaatgacttgttcggtttggagcaaattccctcccttttgggatttaaccaaacaggatctaatggttccactacaatatataatagcaactactccctttatttttcaatagatgacactgttaacttttaaacacataacaattcatcttatttaaaatttttatgcaaatatataatatataaatcatgcttaaaatactgtgtgataaaacaactcacaaaataaattatatttacataattttctttaataatacgaaccatcaaacatttaaaaaaaatcaatggtttcatttactttaaaaaaacggaggtaatatattatagagagagtactaacgaaagcaagttggttggacgtatgtccgctagacgcctggcacagacacaaggaggcatgggcggagatggagatcggccttccgccgtgcagtgatgccgaacgcttctgtcatgtcgagcttggccgggtcggccaagccgggcacctcccaatcaaagtggaaaagcaagctggcgagagggagctccacgttggcgagcccgaacgccatccctgggcacattcgccgcccagcaccaaacggcaggaactcgaagtcggttcccctgaagtccaccgccgccgtcgcctcaccgtcctcgaaccgctccggccggaactcctccggcgagccgccgggccagtaccgctcgtcgaggccgatcgcccaggcgttgaccagcacctgcgtgccgcgcgtcacgtcgtagccgagcacccggcacggctcccggcactcgcgtggcagcagcagcggcagcggagggtgtagccggagcgtctcacggatgacgagttgcaggtaccggagctcgccgagcgcgtcctctgacacggcgccggccgcggcgaaggcacggcgaacctcagccatcaccttgtgcatggccgtcgggttccggatcagctnnnnnnnnnnnnnnnnnnnnnncgtcgccgacgtctcgctgccggcgctgaagatgtcctgcgtgcacgcgacatcatcgtcaaaaatactctcgaggaatacaatgatcacaccacatcacttacaaagatgatggatttgatgtcgtccatggcgagcgggaactggagcccaccctccttctgtatccttagcagaacatcgacgaggtcctcgccgccggcgctagttctctcttggtgttcctggatgatgccgtcgaggattttgtacaccgagttgcggcactcctcggcgcggcgtacgacactgctcagccgaccggcgagacgcgacgactgttggaaataaacacgtcatggtgtattcctggcgtggttgagtcagtgtgtgtgtgtcgtgctgctgcatgtgtgcgtcgtatgcgttctgttagtttggttgagtcgtgatcacgagtgcatggctgctgcatggttgtttgcatggccgttgcagtgttgatcgagtcgtgggtgtgcatggtgtgcgtggcgtcagttcttgcggaggaagccgcgtcgtccgggcgagcgtgtggctcacggcgacgtcgagcgggttctgcggaacgtggcgcaatggccggcatggaggctagctcccggtgtgtcaccggtctataagaggcccctgtactccttcgttgtttctttgcaaggttcagtgagtaataaagccaagatacaggagcgatcggctccgcggcgttcgtcgctgtaaaatccattgttcatcgtctccctcaccggcgtttgtgttcgtgagtgtgagagtgttcctgggctgagccaacaacgacggccacaggtcggccgggttaaaccctcccgcgaactcgatggtgcgctcgagcaggacgagaaactccccgcggtccttgcaccggttgtcgaacacggtgcgcgccgtgatgtcactcacgagcgcggagagcgcggcgcgcatctccacggtgcccgcggccacggcgaccgcgcgcagcagggcggcgacctcctcctcgcggatggagcggaaggagtggacgcggcgcgcggtgaggagctcggtgacggcgatcttccggacctggcgccagtagtccccgtacggcgcgaagacgaggtcccggccgccgttggtgagcacgcgcagggtggcgctcagcggccgcatcgcgaacgccgtgtcgtgggtcttcgtcacctcgcgcgccgcgtccctggacgacacgacgagcgtgggcacctcgccgatccggagcagcatgacgggcccgtggcgacgagccaggtcacgcatcgcgcggtgcgggatctgccccacgaggtggtgcaggctacctatgatcggcagcgtccatggccccggcggcagccgtagcccgccgtcgccatgcgctgccggcggcggcgagcgcctgcgcctggcgagcagcacgacgaacagcgacacgagagccaagccgacgtagacgtagccatgagacgcgtcttccatttccctttcctttcgcaaaggatttatgtggcagtgtgggtgtacatatcgagacgacatttatatactacctcattactagtagtactatctaatcttggataaaacaagattatcaagaacaaaaacaagattatcttgtatgcacgaaggcgtccatggcgagagctgttccaagacgattgggttcattacatagattagtatggtatactaagttattgacatgcatgaagcgcgcacgcaagcatatatgcgacataaaaatgcccattgaggaaatcaagttgactttgttaaattaaattaataaggataaaattcagtagggaaaattaaatagggtaaggtttatcgtcttccgttaagaatgaacgaatacacaattcgatgtcggtccctcgacctcaacagcatgctcgtgcacctcatggcaacaattaataacaaccttcccgctgacttatctcaggctaccattagctccttcaaagctactcccccgtctcaaaataacttaatctaaaagaggatatgaccagaccactctaaagacaacgaatctcattccctcttaggttgagtttttttgagacgaagggagtaagtttcagtttccccctagtgaacaaggtatcgacaaggctgacacattggcaaggaaagcttctgaatcaagccggtagatccgcccttgtaaggccctgtttagttcatgaaatgagaatttttggatgccacatcaaatgtttgaccggatgtcaaaagaggtttttggatacgaataaaaaaaactaatttcataactcggctggaaaccgcgagacaaatctttcgaacctaattaagccgtcattagcacatgtggattactgtagcacttatggctaatcatagactaattaggctaaaaagattcgtttcacgatttccatgcaaactatgcactatttttgtttttatctatatttaatgctccatgtgtgtgtcaaaaattcgatgtgacgttgttgagaaaaaattttggaaactaaaccaggcctaaaggtggtgctaatctcgcaacccatctaccatctcacctccatcaggtttccaaagcggtgttagaggcgctagacaagctcaggagaaaattcctttgggctaggggagagaacttatcaggaggaaaatgtgaagtgaattaggaatggctttatcgctcgaaatagcttgggggactcggggtcctcgatctataatgcttcgcaaacatataaatttaaattcaacttatacaggtagaaataaaaataacaaatttaactatgaaaagaacatgtaattcactgccaaatttgtttttttaattatataaatcaaattttaactcgcatatttataaaaagatataccgtatattaacctatcttataaagtatttaaaattttttgataacattttgattgtcaagcataaaacaagagaatgtacccttaaggaaaaaggaaacacttccatatacctccataaatgtttgacggtggtcagttgaattttgagctatccaaacgtatggagagagtactctagactagatgtgtgtcgtggcaacatagagaaggccgtcgtcgtccagcgaagccagctagacgccgggcacagacacgcggaggagtggccggagatggagattctccttccggcgtgaagtgataccgaacgcctcagtcatgtcgagcttggtcgggtcggccatgccaggcacctcccagtcgaagtggaagagcaggctggagagagggagctccacgttggcaagcccgaacgccatcccggggcacatccgccggccgccgccgaacggcaggagctcgaagtcggcgcccctgaagtccaccgcggcggtcgcctcaccgtcgtcgaaccgctccggccggaactcctccggcgagccgccgggccagtaccgctcgtcgcgaccgatcgtgcactcgcgtggcagcagcagcggcagcggagggtgtagccggagcgtctcacggatgacgagttgcaggtaccggagctcgccgagcgcgtcctctgacacggcgccggccgcggcctaagcatgcatgagacggactcgaaaaacgaagaatctgtatcgtttggcacagtttcagttctagataaattggagttggaagctaaagttgtgctgaccggggcctaagcatgcatgagacgggactcgaacccctgatccttaacgcggaagcagcgaccacgcaagccaacacaaccacaaatcacctttttttttctaaatgtacttgttacatgtaagttatgtgcattacattataattacactctatctatagtataactttatttcaatttttttcaaaaaaaaattatcgaatgttttataatctcaacatacgggcaaaagaacacatcacaactttttattaagaaaaaagcctcaaccaaatctgtcgagaaaggccacgaattctgacccccacacacgggctcacccctatagctatagattggtccttgacttgtgttttaaggcctccacccctacacgagaataggtccttcgtatatcgattcttaacatgtaattttacaagggactagcttgtaaaattttaattagatatgaaattcgttcctataagaaatcgaacccatgaccagaaggtagtgtaactattacatgcactttggctcgaagctatatttatatacctcataactgtctaatcttagataaaacaagattatctagaacaaaacaatattatcttggatgcacgaaggcgtccatatcatgatcagagctgttccaagacgattgggtagactaatataaattagtatggatgaatcacacatgcaagtatacgtgccacatgaaaatgccctttgatgaaatcaaattgactttgttacattaaatcattaaattaataaatgtaaaattcagtacggaaaaataaataggataaaatggagctttatgataagaatggacgaatattcaacattattgatggcggcaatatatattaaaactgggtctaaaagtatgtattactccatccagtcatttatatttgaaatatgggatttactagatttcaggctcataaaaatttataaattttcagtcatctaaaattacacacattgctaaaactaaaatcatagtgctatgcaatgtgaaatttcaactctaaatattttgttatatgtgattttactttatttttatctaaatttgaatttctctgcgatgtattttttttaaaaaaaattgttcaaccttctaaagaagggactataatttgttaaataaataacaaaagagtaatgggaaccattatattataatacaatgggtgacaaaagtaactaaaattttcgaaaaattctatgtgcctcaaatctatacactcccttgaatatacatgacttatgggagtagcataccgacctcatctgatgtactatctcattgattttatatgtcctcatcgatttatatgtcgtatttcgattttaaattcctccaattgacctgacaagtgaagtaggttgaagaaatagaaaacggccatgatcggttattgaaagtcgctctatagcttgcacctatatattttggatgcccgcagccacagccgctgaagcaagaacagctgcggaacatgcccaaggtcatcaccttcaaaatatatgggatttttgcaacagtttgttgcaagtttttgggacaaatattttcaagtgtttcatagctcatttggaaccttacaaatttaactaatcattgctctcacggatttataggatgttgaatcctcttgttgtgttaaatgatgctcacattattttggattctgcaataaaactttcaaattaacatgttgttaatcccttctgttgcaactctatttattttgtttcaatacaatctagtactatggattagtagtgatgtttcaccctcaacctttgcttgatttcttttttgtgtgtttgtggtttgatgtttttccactgcaggggtagacaggtcaaacgcgctcactattgaattctcatcattagaatattgtttgaattcttgatattgttaaattcaattttggtaatttgttgtgagggtgaggtcacaatagtagtgccacctctattgattcccattgagttccgtgcaccgccattgatgcctatggagttccacgtggcagtgagtctatagagaagagacatgcagcgccatgacccgcataccctctccttatctctgcttgcatcacgtatccgctcgagggtgcgagtatttggtaggagtgcaacccagaaggattcgggagcggggactgattttaccccattgttcactggtgccaaggccgagtgaactcgtaggggagcaggggcagggtttttcctgtccaacttgcccctgccccaccccagtgccaatctatgcttgtttatactatcttctaatctttatatctctagtttgcttactattgttgagaaactttggtttatgtcatgatgatttatgttaatgtcgtcattgtttacgctctttttttattaaatattatggtgaattgtcaatatttctaacaaatatttaaaagttacgatttgtttggaaatccgcaaaagagttgctacgtgtttaatgcaaggagtcaagtgctataactaattaaagccaaaatggaattggttttgtgtatcttggttatgcagaggtcgagagtattctcagtcggtggtatcacttttatataattagctaagtttaataaagcttccattatatgttaaagaaattggaatatgtcaatgactacagaaaaaaccacttagtttaaaaatccgagcaatagtcgtgtactattaatagccacaaacagcacattctactatattaattagctgagactatctagtcagaattcttgtcacgcaattgcttggataactctccttaatagttttagttttattggtatcaatcctttctgctgcataatttggagaagaatatcaggttcatctgctactgttcgcaagttcatttgtactggttcatctcctaagtaaccaactttgtttgatttgtactaggtatggctcattcgaagtcggatggcacgagcttttggtggcacgcaaaatgccagtaatatatgaataattaactgttataaacttacaaatgaatttgtttaattttagaaaagaaaaactttatatataaagctattacaagacgtatcgtgtaatagtttgggatacgcgctagggagaagaggagagtagagccaagctcatataaaggactagatctgtatggtggcaagcatacataatattaatcaccgctccgagccggccggcaacatcagctagacgccagacacgagcacgggcacacgaagtgtggggcggagcgggaggtcggccttccggcgggcggtgataccaaatccctcagtcatgtcaaactcagcggggtcggccacgtcgggcgcctcccagtcgaagtggaatagcaggctagcgagcgcgagctccacgttggcgagcccgaacgccaacccagggcacatccgccggccagcgccaaacggcaggagctcgaagtcggcgcccctgaaatccaccgccgcggccgcctctccgtcttcgaaccgctctggccggaactcctcgggcgagccgccgggccagtaccgctcgtcgcggccgattgcccagacgttgaccagcacctgcgtgccgcgcggcacgtcgtagccgagcacccggcacggctcccggcactcacgcggcagcagcagcggcaacggcgtgtgtagccggaacgtctctcggatgacgaggtgcatgtagtggagcttgccgagcgcgctctccaacaccaccccgtccgcagcgaaggcacgccgcacctcggccgttgccttccgcatggccttcgggttccggatcagctccgccatcacccactcaagtgtcgtcgccgatgtttcgctgccggcgccgaagatgtcctgcatatggtacatttttgcgcgtaggtgtgtgaaatgattagcacgagacaaaaaaaatccgaccaaaataatttatggtaaaactttttttatccacattatttagtggtaaaaggtcaacattgtaaaacaggtgaaataacttaaaaggaaaatgtatga

SEQ ID NO: 12386 - DNA, 509 bp, Oryza sativa
agcaacgctaattgggaaaactgctggatgttgcgcaggagacgagaaatctgacagctaatgaacgcatctttcgcgatgatttaaaagcaaagatcctaggcttggctgtccttaataagatacagattcgcaatgatcgaggttaacgtggttaaaggaaggtgatgttaattccaaattctttcatatcaaagcaaactcccgtaggagaaaaaacttcatccagaccctgcagtccccaaacggtttagcagtctcggcctaggataaggctgatactctttttcgcttctttttggataagctgggaactccatcacaaagacagtcttgcctcaattgggaagcactcaacttcacatccttcgatctagacgatcaagaagacgatatcacagaagaagaactaaaacaaacagtattctccatgcccgtccgaaaagtcacccggccagatggtttcattggagctttttttaaaattgcttgggagataatcaaagaca

SEQ ID NO: 12387 - DNA, 638 bp, Oryza sativa
  unsure (1)..(638): unsure at all n locations
tatttttctttaaaaaaaatgtttcaacagtatatcctttcttgttctaccgttcggttctgtttccgaaaaggaaaaaaaaagcaaaggaaatggtctgagcatttttctatccgttttcattcctagccctttagccataaatattaaatattaatatttagcacaagttttggtcattttttacaatatttatgactacgtagagtatactagcttgggagagactacaatcaagtaaacactgtaacatatcactgcatgcgatctccaagggaagcataataatcttagttagctgcgtgatgtgcatgctacaaaaactcgctagtcattacaatgacaagcattctcgcctgtatgcacaaaacagtatgcaacaacaaatgtaccgacatataaaaatggccatggcaatggcatattggcatcagggatactctgtttgaattctgaagctagctttgtatgtttaaggctagaaccaaaaaacagcaaaattacatacgccgaatctgtaatcctatacaactcagcagcatttcttttcctctcaagtccaatgccgctatggctcanggccaaaataatcaaaaacagcctgaaattaccttgcatgtcacagctttcgtactact

SEQ ID NO: 12388 - DNA, 762 bp, Oryza sativa
ccattacaagcaagacattgtatgaagaggggcgaacatgcagattgataaactgacgcgtggtggacaagaatgactgatttgtgaccggtctgacactggtcatgtcgtcagcagacagccatgttcccacgtcgcgcctgcttccggcggaagtggaggtaggtatgggccgtcccatcagaaggtcattcggacggcaaccatacaagtctccgtctgtttatgaaaagataggataagtccccacaaaaaagagagagatggtgcatgtggtatccccttgaggtataaaaggaggaccttgcccacttagaagggggagattttgtttggaagggatccagaacgatcagagagggagagagtaagagctctctggttctccagctcttttgtagcttcttcatacatagatccaccaaaacacaggagtagggtattacgcttctcagcggcccgaacctgtatacatcgcccgtgtcttgtgtgtttccattctcgcgaaccttccacacaccgagagcttagaatctcacccagggcccccggccgaaccggcaaaggggggcctgcgtggtctcccggtgaggagccccacgctccgtcagtgtgattgggaatgaggggtgggtgatatgtgaatgaggggttatatgtgattgtgaatgtgaatttgggaatgtgggtgatatgtgaatggaattgggagggtatgttcaattttgcaggatatgtgaatttgtcaaattttttaaataa

SEQ ID NO: 12389 - DNA, 686 bp, Oryza sativa
ggcggaaccagccctgccatagcaaaagggaggaagaagacggaccgccccgggtagcgtggcgccgggcatccctcgcccagcgagactatctcccggccggtggcagattccggcatgaagcggcgcggcagcccggcctgtctctcgttcacgatgcgggaaggcggcagcacgctaccgtcaagcggagcggagccccgtgccatgacgccggaagaagagatgtttgagagcgagcgcgtgtggcgaaggtagggcacaggaaacaaggagttagggcgcaagcggcgaagacaaggggaataatggcgagaggaaggaagcaaatctcttcctcggcgactttatacccttgccaacgctgtgcccggctcctcatttctcgcgcccactatcttgccccctcgtttctcgcgcccacgcttccactaatcccattcgcccgtttgcggtgcatgaggtggatatgcggctgtggcagtcgagatggaacatctcgtgcgcgcattaattacgctcgccgaccgaagcgccatcaccatatctccaagaaaaacgaaccggcttgtcccgatttttagaccggccccacctgtcaccaggccttaggaagtggcgtcacgcccgaccgcttccctcgaggagggcgatcgccctggcataacgccgggggctactgtcgg

SEQ ID NO: 12390 - DNA, 624 bp, Oryza sativa
agctaacaataagggtcacaccgccgagtggataatgaaagaacacaagcgtctcttcatagattggttgcgagacctagacttacctgagggacaaactactgatgaaataactatgaagcggttggcttgtggtccatcaactacagtaaattcttggcagggatatgacattaatggatactcgtttagtacaagagcccgagataataagatctgtacgcaaaacagcggtgtccgtgtggaggcaattgatgaagccgaggaaaaacaatcatacttcgggtttattgaagaaatatgggaaatcgactatgggcacacagtgcaattccccatatttaagtgccagtgggtaaaatacccaaacggggtcaatgttgataagttcggtcttactattgttgacctggcgagtgtgggtcacaaggatgacccttgggtactcgccaatcgcgtggcacaagtgttttacgtgaaagacccatcaaatttgaagaaagatatagtgctacccgggaaacaaaagatattgggagtggatggggttgaagatgtcgaagattacaatcaatacgatagtatgccactttatagtcagtttgtacagaagattaagaatgt

SEQ ID NO: 12391 - DNA, 519 bp, Oryza sativa
gaatttccccccctaaacctaaaaactagacattactcaccctaaactttcaataccggacgaattacccccctcgatcaaatctagagcagttttgtcctacgtggcgtacgcgtggcaacccaatcagcattttcccttttcttaacatggtggggcccacttgtcaatctctcccatctcctttttcctcttcccctcttcctctctctcgtgacttcaggcacggccgcgcgggcggtcggcatgcgagggggcggtgggcggcagcgcatcgtcaggcgctgccgcgcgggcggtgggcggtggcgcgggtattcaattacggatagtatgggcaatctagtagttagccaaactagtgaggaaacaacaacatattatcaagaaaacattcacatcacgaagacgaggaaatcggaagaacacctagagtctcctgaacgcgtcggacatggcgtcaggccggccacacacggcacatccaatcaaagtggggatcctctagagtcgacctgc

SEQ ID NO: 12392 - DNA, 675 bp, Oryza sativa
  unsure (1)..(675): unsure at all n locations
ggcgaattcgagctcggtacccatcagagctttgcgtggatctttcgcactaggtaaacctgtattcttattgtgtaaagtagttctcaaggttttgttgctatcatgtgaactaagttttggtgccctttccttgtgctgcgcttaatacttcagttcaatccaccttaacatagctggatgactaatatatatttaacatgtactacctacaagtataccctgaggggactcactttatgattccatggtttgagaggccaatcatttatgatgtccgtgctcgtcccaatcttgtgagccttcttcacctagcacttgccttgtgttccggcagcggagacttccagttcgcctatcatgggttcaccggcaccaacctcacgctcgacggcaacgccaccgtcatgccagatgggatccttgtgctgaccagccgcaagaccaacctaaaaggccatgcgttcttccccgcgcctctgcagttccgcacatcgcctgatggcacagctcggtccttctcggcccccttcgtgttcgccatcatctccgactacaccgatttctgtgcccacggtatggccttcatcgtgtccccgaccaagaacttcaccaccgcactgtcggttgggtacctggcccttctaacgtncagaacaacgcaacacgaccaac

SEQ ID NO: 12393 - DNA, 2052 bp, Oryza sativa
cacaagccttgccttgtacttttcaattgtaccatcaggcctaagctttttcttgaaaacccatttgcatcctacaggcttgcacccatatggatgctcaacgacttcccaagtaccattagacataattgagtccatctcactgtgtactgcttccttccagtagtcagcgtcaggagatgaatatgcctcttctatggttcttggagtgtcatccacgaggtatataatgcagtcatccccaaaggattttgcaaccctttgtctcttactcctacgagtatctacaatgctatcctcctcacgatttccctcaggcgtttgatcattgtgttctatcggtgcaaagtgctcataggatatgacagtttcttgactagaagtgctaggtgtatttttcatgggaaattcattctcaaagaatgtagcatccctggactcaataattgtaccaacacgcatgttgggtactctagagtttactattaagaatctataacccacgctgtgaatagcataaccaaggaacacacaatcaacagtattcggtacaagtttacgctttttggctataggtacatttaccttagccaaacagccccatgttcgtaggtatgagagatttaatttcttcctttcccatttctcgaatggtgttacttccttatgcttcattggagttttattcaggacatgacacgcagtcaaaaccgcctcaccccaccattccttggaaagtccgtagtgtctaacatggcattcaccatctcagttagagtacggttctttctttcggctaccccatttgattggggtgaatagggaggcgtcctctcatgaataattccaaactcctcgcaaaaggatgtaaactcattggaaaaatactctccacccctattagacctcaaccgtttgattttcctttcaagttggttttctacctcagctttataggtcttaaagtaatgcaatgcttcatcttttgttttcaatagatacacataacaaaatctagtgcaaacatctatcagtgtcatgaaatatttctttccccctttagtcaacacgccgttcatttcgcacaaatcggaatgaacaagttctagaggtgccaaatccctcgcctcagatgccttgtgaggcttgcgaggttgtttcgattgaacacaagtatggcacgttcttcagctgcacggtctttcccaaagtaaacttcagatcgaccgtaccaacaccatgaacagccgtaagtgacccgtttcccatcaacaaggaggaacctctcccgacctgataagaagaaaacagggaaatatcagcacatacatgaatattagcaccagtatcaacccaccaatctggtgaatgaaaaatagagagaactgtaggtaaaattttaccgtaccccgatgttcctctgccctcgctagtgaccatgttggcagacttcctatctttgcgcttaggacagtccttggcccaatacccagacttgccacacacaaagcagtctccctttgcctttcccttgcctttcttcttaaaattggttgtagccatgggtttaacatcaggcttgaatttcttgttgttgtgggatgcatgagggttcttcttctgtaccatattggcactagaaccaccctcaacctttttgtccctgttgtcctttgccctcgcgttctcttcaacacccaaagagctaatgagatcagaaacactgaactcttgtctcttgtgctttagagaagtggcaaagtccgaccaagaagttggcaatttggcaataatgccacctaccacaaacttgtccggcaactcacaattgttgttctcaagttacttagccagcatatgaatctcaggagcttgttctactacagaacggtcatcgaccatcttgtagtcatagaactgctccatgacatacagctcactgccggcgtcggaaactccgaacttggcctcaagtgcatcccacatgtccttccctgaaggcatgtgcatatacacgtccactatattgtcagcaagtacactgatcaatgc

SEQ ID NO: 12394 - DNA, 18909 bp, Oryza sativa
aaatggatttatttgtatttttagaaaacttctataataaaaaatattttgtaaaatatgcaccgtttaacaattcggtaacatggtcatgataaataatgaagtagccactccgataagcactttagaacttaaccataaatttattacttatgcagtaaaactaaatatgtagtgtataatatactttgtgaatctagaatagtataatatatcaatcgtatgtccccgataaattctatgtaataagttctatatacaaaccagtgtcaacaatcgtcaagttatattgtttatgatacatccatgcacaatgcacttaataattagttgacatccaataagcacgtacgtaatcaagcaccgcagatatatgatgatacttagtgggaacccattaataaaaaaaatgatagattagtagaggatgacacaaaatcacaacaaacaatagttgactacaaatagactatgagtttaagcaatagcgttcctatacttctacaaacacttgtgagatgtcatgtgatgctctaataaataggaggaaatttaagaaaaaatataaggagaaaacaaaacatctacccatcgatttgcacttaaaccgatgaatccattattttcaaccattaaattagatttattcaggtaagcccttgcttctataaactagctaatccctctctatacacgtacatatacaagagatgacaaaaataaaaaaagaagtgcgtgtatatatgcacgtacatatacgagatgtcaaaaataaaaaagaagtgtgtgtatatggtccaccacgtctggtatttttcaatttctttctttgtagcccttaggttctccttaaattatacatatatgtagcgaccactctttgcgaggttgtcgaagaagccacgttgccatggcgccacttcatgtcacccttgccaattttcttgaaaataatttttttgactaacgatataaaacgcaatcataggcggtcgtttaaacgtgtgcacacccaccctatgaatacacatacgcacaccctacctgctatgagagagaaatatttgtcaaaaaaacatgaaaaagaacgaacatacgagagactaccattcggaaaaaaaaacttacatacatacgtacaataaaaaatgtcatatggaatcatattttatcccttttaattatgtcgttctcatataaattgtgttaacaattagtacaaataattttgataatatagagtatttctttgtacattacccatgaacatgcgtaagtgaattagatgtataataaatgaaaaaaaacatcaaaactcatattatgtttgcaaaggatgatgataggtaagtttacatataaccaaaacaaagtgattttttgtttgaatatgatagacactatcatttaccttatcaaattcacagtataaatatttccttcttttatggaaaggttacgaggtaatatactgttcttataattaatatgatgatatatgactttttttcagatttttttatataaacataaaataaattgcccgcgtatctacgtgggctaccttcctagtttacttaattgtcagattgttgcaatattaactacttccataacgattgtgcataaatccctcatgttatggatatattgggcccgtatgtcataaatgtcgttttggacttgggtgagacggtgatacaaaatcagcactccacgtcatcagtagtactgaagcggtcccacgacactccatatcatcatacatattgaagcttgaaatttttttataaactattttggtcgaccatcaacttagcctggcaaaaatttttaaactccaggcatttctatgatttgccctgaacaacacagcgcatgtagcctaggacctaggtttgcttgacacctaacacttggaatctagtggacagcgttagccactgttagataatgaaaggacaacgatggccaccaaggtaagggtggatggttggccatgtctagagactacatgggtggtgcatgttggcacttagggggcaacagttgagatgaatggaaggtggtaggacttggtgatggatggaaggtattggggacttgggaggtggatcgagggaaggtgttagtgctgcaaccatgttggacatcgttgggagaattggagacagtgaggggagcaatggaaacctaattttggaaccgataaatacgtcgactatgttcaatttaggtaaatgtacgattttcctaaaagaaaacaagtaaatggacaaagtaggcatgtgtatagtgatcaccaatatatatgttcataccagtttaaaattgggccaatagtcgtacccacaggcataaaattaaaaacatgttggacctaaatatagtcgtaccttgtgaataagtgataataatctggtaccattgccatccctaattaatatgttgcagtacacttagaagagaaagcaaaagctagcaaataatataagagaggacaaggaataatcctcttatcacctcatgagcccacacccttgtgctaagatggcgatactacatgaataaggcctgtaaatagcatatagcgacagttagtggtggggtccaccgcatgctttgcacttagagattccttttgttgagtttgattcttggtggatgcatggttgagtggagctatcaaattaaaaatactaggcaaagttaattctcatgagtttattgcaccgctacagaatgacacatttgtatcacctatctggtagggtatataaacctagcactgataagagattccccgcccacccaccaagtccgtgctctccaagagcaagaacccagcactaatgacaccaccactgcgtcggtttactaaaacaaccagcattgatagcatcagtattggtttgttaaaaaaatatctctgatgtcctagtaatcagtattggttttttcttttttgaaatagctggtatagaaaaccgctgagctctggccgctgcgtaatccatccacgcaaagccgataaattctctctcaatctcttcgaatcatctcgacctccccatccacctcgcatctctcaccggccaagcgtgctccacatgatatcgtcgctctgcgctcatctctagccatccatgagtttttgcatctcttcgacgcggcggccccaacaccactccctctcccgtacctcccctcttcagcacaagcatcaatcccctctccccctcacctctcttgccagcatcagcgccactgtcaccacacatcctccttgccacctcccatcccctctaccagcatggtggttgtttgaagctctgggcctgatagatccggtcacccagagttgccacaagctcagcacgacttgatccgattggttcaatgggtttgacagcagcaactccctccctcttccatagcaccgcggcggctccctccatcttccttattacaacgggcatctgtcgggtaccgttccttctgccttaggctgctagatccaaccgtatggagattggggcctccaggattcggaagccttgaggtcccatgcctccgacttcaccaccgtcctcaacatccctagtggcctgagtttcacggtgagcagagacggtggcagtaggctcgtcctccgaccaactccgaccagcaacggcgcaacagtgtgatatgatgttattcgtttatcttcttggatttgtgattgattctgggacttgaatgattctcagacgtgaatgattcatgtttggttcagatccactaggattagtgattctgtgattttgagaatgatttcatacgattttgggatgctgtgattttgtgattcacaagctcgtagagccatctcggtttgaaccgtctcagtgctctgttatttttgaatttgttcaaaaggcgtgagtgccagttcacaaatttggcaatgagcacccctcattagtgctacaatattgtagctccaatcctaaaactgacaccgatggtaatttggatctgatactgactagatttaccaccttttaatccttttgaaaacttattgtacaaatagatccgtaaaaaaagttattctagaaataggcttttcacggcgccaacaacattagcattatggttcgacatgacgatgccaatgacgttggtatcattcccctatctctcgagtggaagctaagtcactaatgtgacaggggacggcgcaggggaccattttgtaaaaaaaaaataaaaggaccaatttgtagtagaaaaggatatatttgtaataaaaaatatctacaaataggtcctcagcaccaatgacaatggtactgaggacattattttatcacaacttgatcatttttattacaccttggagccaataatattggtgtcgtccccttcacattagtgacttagtttccaccggagggttagtgaatggcaccaatatcattggcgccgttacgttggatcacggcgtcaatggcgttggagcagcgaaaaagatcatttctaaaatatgtttttttgtcaatttgtagaataagttttctaaaaggatcaaaatgtgaaaaatctggctgatactgatggtcggatctttagtagtgttggctctgttttgtattgcaatccaatatgcttctcgaatttgaaatttaattttcaagaataatttttatttgcttgtttttaggtaatcatgaaaagctatggaaatttttatttgcttgtttttaggtaatcatgaaaagctatggaacggaggtgatgaaaaaaaaaaaccctaaaattaatccggaagtcaaattcaaaataactaagggaaagcagtcgtacatgcatctctgaacatcaaaccaagaggtgagcagaggcgttcccatataattagaaaagaaaattagctatattgaaccactttatattgaaaagatcagttgaattactgccatactcaatcccaacaatcactgtatattgtgtgctaaccattctgtgttagttaattatagcttaatatgtattgagcattcaattatcaatcctttaattccatgctgctgtttttcaagtgtaatatattagggcaagggcaataaaagagcccttgcttactctaattattatccaactcatctcgagctagctttgtagttaatgtatactctataacttctctaaatttataggactagtatatgccacatctaattttaggttgctatattgtgaaatagagggtctctttcctacagaaacatttgtcagggaaacgtgaagaaactcttggaaacaacacagcatctattcagcatctattcaaggactgcacattcacaaagggatgtttgggatatatagggtcccttccagattgaattgcaatcacgctttcatgctaaacattgccgacgttgccttacttgattggtgggaaagaagaacgagttactgccactactacaaaaaggcttttcccaggcggccaaatcatattttcgcaagcggacaagccatccgcttgcacctcaacgccttcgaaaatagttgattttcgtaggcgcgcaacaggtccgcctgcgaaaatagcttcgagcgctaaaaaaacatgggcagccaccgtcggacggcggtagcttcccgttcccaatccaaaacattcccaatccatcccgttcccatccattccccattcaatccccatccaattcgtccacttcatccccatccaatccattcaattcatccagttcatccaaaatcaccgaatcaattctagcaaagaaagcaaataaaaacattcgaaaaaatcacggccgctgcctagccgttgtccgccgcccagccgtcgtccgtcgctgctgccgcacgggcgcgggcgcggacgttgtccgttgccgccgccgcacggccacggcccgcccccctccggccagatctaggagggaggggccgggagccaccggccaccgctctccccccgccccctctggccagatctgggagggaggggccaggagccgcgctgcctcgactctcctcgccgctgccgccctacgccgcgggagggaggggcgcgcccgccgccgccaccgccgggagcacacgccgccaccgccccgcgcccggctgccgaccaccggtctcccctcttcgggcagatctggaggggagaaagggaaggaggggagccgccggcggccgccccttctgccgtggggagagtaaggggagaggagaggtgaaggggaggggaggggatgggagaggagaggagagtgaggggagaggaaaggacttagaaaaattttagcccatatgccacatatatataccacgctaattttcgcaggcgcacctcatatggtccgcctgcgaaaatgattttcgcaggcgccacttaagtggtccctattttcgtaggcggacatcaaatttaaccccgatttatatttttgtaggcggttatttagctctaagcgatatgttcgtctgcgaaaataagacccctacgttgggaaaaatgttttttctagtagtgtacgacaagagcaaaacaaaaggaatacactccattcatatgcttctccgctgggagatttggtgtgaacggaacaaagttttcacaaacaacaaactcacaatgtcgcatctagtgatgaaaattgtggataaaatcgagtggggcaaaaggccgaggcgctgttttgtgaggcaatccattagttactacaacaatcgagcttgtttggctgagggccagccgacaaggcccaacttgtgagaaaggaagcaaacgcacgccgtcatcgatgtaggctactggtgggccggctgcaggaaataagcagggccgtaatattggatagaggaaatagtaatcctatttaaaaaaaacaagactttgtctataagtcccatgtgccaacaaagaaaaagatactaatggatataattttaccatgtgcatcctcagtaaaaaaaatgttttgtaaatagacctttgatacctatctacgtaacgtttcccgcggaaagaaatatttacacgttcatttggaaaaaagaatatttacaagtacctcattgacttatatttacgagatctgatagccgagagaattaggagaaaaatataaaattgtgcatataattttataattcacacttgttaatcatgactatcttacaaataaatttcattaagcttcaggtcattcaaagtatatgatgaggatgttaggtcccgatcttccaataggtactgataaacagtcgatttgggcgaagtcgcgatacaactcaatccggcttctgaactaacacactacttaggcccgcaatcacagcactacgtctcctctggttatcaaccgtgttgaaacccgattgacctaaccaagaaggctaatccctgcatgcgaatcgaagagcacaagcaacaacaaaatgcatatgaatgattaagcacacgaatttggggttccacaaaccgatctagcggcgaaactgttattgacagaataatctaagcaaaacccgactctaaacgatgacgaccactgattaagtatgattagggacgttctagggttgccctaggatgcacacccccttgggctaagccacgacacaattataaggcccaaaacctaaatcagattcggactggatgagatacgcggcctgctttgtagattcccagcagctcggtaggaattttgacgtgggaccaaaaccatctgtaagtagacttcataagcattccaacaagtactcatgggccccgaaattccttctagatcagtggctaggtccgtttgaagttgatgctgttaggaggcccgaatccgaatccaaaatgtatagaacttgatctcttgtcttctatggaccaaaaatgacgtggtgaggtagaagtagacttgtagaaggttttgatttggtccccaatcaacttctttaatcatccatacattccttatgcccagtcttttttctttcgcccaagcaaatacctctacaaagaaaaacacaggaacttattgtgtagcaacgtttgttcaaatatataacaattaaatctaatatagaacatatgcacctttggttgattaatacataaggtagtcatagttatatccgagctagttgtgccctcatcatcctccccttcttgattggaaaccgtcatcggtttcactttgtcatggagcgtagtgaacttatctttatttatcacaacatctagtgaggaacatttcttgatggctatatggttggatcctgaaatctttatagtcgaagaaccacgtcactccccttcttgcaaaccaacatgtaactcatttaaacaattagaggaacaagatagagaattacttatacgcatgcggtcctctagacaatacatttcatcatgaaaaggaggtatagataaattcgaacaaatatatactcgatgcacattatatactcgtttactatcataattgccaataatatgaaaaatcacatcagaagggcatggcaattcaaatcatcaaatttgaatataaccccaagtatttaaagaagatagcaatttaaattcttcattctcgctagcaatgtgaataacatgtttaaactcaacacatggtggctctactatagaactaacatgtccattcactagttgtggcatggatataagtgaagcatcgcacaactcttctttatcacgagaaacatcaagcaaattgttttgtgacaaaagtatttcagcaattgattccactatgggttgctccaatgtagcataagggtgtgttcgcaggtggaggatgggaacccatccctcctgcacgcaaacggagcagccttttaacacgtgattaattaagtattagttaattttttttgaaaaaatggatcaatatgaatttttaaagcaactttcgtatataaaattttttgtaaaagatgcaccgtttagtagtttgaaaagcgtgtatgcggaaaacgagagaggtgggttgggaagagggagtgccaaactcagcctaagtagtggacatagttggcacatcataaatatgcataccttgagtagttgtagcaccattatcattaccttttttctcatcttcagaaattatagacgcttggtcaattgaacattcttcaagcatgcatggagctatagataggtgttgacgattgttaagtgccaaaataatgccgtcaatacctgcataaaaccataaatgtgaaacatccaacatagtggtagggtttatttctaacaatttccacgagtattggtgtatatttgtatgcaggtgatcaaccactaaagttgggagagaatgagcataaagaaaggaaatatattttgctctgacaaactcacatggttttgagctacaatatataaaatgtgcaatcatttggagccaaaacatggagtatcatgaagtggggcccacatgtcagcatcctaaagaaggatgtgtgccaggggagccaaccatggttcggccgaacccccagctggcccaatccagcccgacttcggtatgacggttgtgctcctcattctatgacagttacgagcgttaataccagtagaaaccatcatcaagaggacacatggcaagaggagaaggaagatgctctttggattctatggagaatattcctagcatctccactctcccaaggcaactatccacctataaatacccctctcctctccctcattcacacacaccaaagcatgagctgaattacaagaggctctagtgtactttattgtatattagaatagggagagaggaaggtagaaggaatcggaggaatctcggagttgtcggtaatctcctcctacttttgtatcttgttatttactctgctttaatagaaatatcattctgagtaattaagatttgcttagtgagaattaattcttggttagttcctaattagcatacgggatcattgttcactatagtccatttatttatagtgattgctttagtgtttgatcggcactagagtagttattaattgcgtagacgtggtgtctaggaaattaatctccagtggttgctgcgtatcccacagtacgtttgaggtgggtgtagaggtggtgacggccctcaagagcacttaagtcctccctgtccgggtacgtagtagagtgacatctgggaacagcaggttgccagtgcctgaagtattacgttaggattaaacttaagctttccctagacactgtttcttattaggaaatcctctctgccctctgcccacattagctttgttattctcagatgtcacacacgttcccttagaatcgatacccttggaatactcctaggggaagtgctacatcggtatatccgtgcgcttgtggatcttatatgtgatcgtaagaaataccaacaataggtctttttcctcttcatctttcttctcttcctcattaccttggttgttctcagatgcctgcaaaatattagtatccaaagcaataggcacaacaatacattcgttttgtaataactcagacttagttgaaggcatcgcaatattagtatcattcttggtatctctgaaaatctcatcaattctattcctcatcctttcaagactatctttgtaaatttcatcgattccattcttcatcctttcaagattatcttcgaaaatttcagcaacacttattggtaccaatttcattttttgaccattatgtctaaatgtgtatgtattagcaatatcattatgcaaagcattattatcatatatccatggttgaccaaacaacaaagaacatgcttgcattgggacaatatcaaaatttgtagtatcatggtaatttccaatcgaaaagtttactctcacaattctattttccttgaacttaccacaagagttgaaccatttgatgtaatatggatgaggatgtggttgtgtaggcaactcaagtttctcaaccaaatctaaactcacaaagttattgcaactctcagtatcgattataacacgacatgctctatcctttacctcaaactttgtttcaaatagttcgtggtacgacctttgctctgctttatccatttgagaacttagcacttgttgcaccaaagtactttcatcacgtgcatctgtggaaggtgatgtagcagctatggtttgtctcccatccaattttatctaatttccataagagatgtaacctgccattgacagtagaaaagagagaacaacagaacaatattgttcctattaactacataacatggattgtagtggaggctagcaattggaagctgttggtggttcttaaatgccgattctataccgccaacatctgcataaagtccagataataaaacatctaacatagtgataggtattaaatctcacatattccacaagtattggtgtatatttatatgtaggtgtcaaaccccgaattgggagggaaatcagactaaagtgaggagaaacatgtatccatacaaggatgggttgtgaacttcatcaaaataccagagaatcagcccaaaactccaggaaatggatagaggagaaccaagagagaagatgagccgtatgccaggccaagagggcccagcctaggttctgcataccggacagaatacaagacacccattggaatgtctccctatcagatagtctacgggaagtcatgctgactccctgtagagcttgagcacagagcatactgggccatcaggaattggaacatggactttgaaagagcaggagaatagaggaaaatgtaaattgctgaacttgaagaatggagagagaaggcgtatcacaacgctaagatatacaaagagaggatgaagcgctggcatgttaaaaggataaaaatcaagaaattcaagcgaggagacaaagtgctgatgttcaactctagggttaagctttttgaccatgggaaattgcgcagtaaatgggaaggaccgttcgatgtcattgacacctcttcgcacggggcaatcacactccacgacgattcagataacatatttaaggtaaatggtcaacgtttaaaaattttccttgagccggatgaaactttagatgaagaagtggatattattgaattaatcgattatgaatcataatgatctcatctaaagcatgcttaatttcctgtaaaattgtcatttctgtgcttagaataagttagcttgagcatgtagaaaatttggaagccacacaggcccaccagggttctaatatatgaggaagattaaaatagataggatttgaattggtggaatttagatggtcagacattcgggatagaattaaattagatcaaaggaattattcgagggatgatatgcactttgcgacaaaattaaacaagaaagaaacactggaaacaaacatggaaaataatattttttaaataaatgtctaactcgacggttatatttttagagaatcaaagcaaactaaatcggttttaaaaagttgtcaaattctagggatgttacatgacgtgcgaggcgagatgacgaagaggaagctagagtcaatgccaatttcggagatgcgcagaaatcgatgaggcgatgggtgacgcaaacccaataattaattgaaaaaaaaagatactagcagcaatcagtaccactacaggagcaccatgtgtcaacatcctctatgccctccatggccggccatgaccaagtcaatgggccataaattctgcagccatttatggtctctctcctccctctcttggtacgagggcacaagttcacaagaacgagggagacaaagaaaaagcagaaagaacagtccgatgaagagatccagaccggtggcctattgtcatccagattggtagtagaggggcgtcatttatactaaataaaataaatcgttagtcctacctaaaatcgtattgtcgttaatcactaaaataattgggggcctagatgcgcttttagttcctcccggattagcaatggcggcctcaactgtggacatcaaagagaggtggagctagcctgcaggggaggttgcgacagaaggagcctagcgccagctggcaagggcggggctgaagcacgacgaggaaggatacggtggtctcgagaagtgatgacctttgggtggcccaccagatcggtggagagaaccctcaacggtggtggccatggaggggatggccgaaggtgggcggtctaggctatgcgtgcatcgcgtgatggagtctagggtgccgacaatgggaccaatggggacagttgtcacgatggaggttgaagagaatggtggtgtgcacatgctactgactcgacgcaaagacgaatagagcaatgaagaactagcccagctgaggagatcaatttactcgaaggtgtgaacgacgatgacaaggaaaacgaaaaaactaatggccaccgcagaagatcgctagtcgtagggacagcatgggcagaagcgtgcgagcggcgactagatctcttgctttgataccatgttggacagtagagggagagggatattatgaatattggacgcattatattgagtcttagggggccggtatatataggagatacacagatagagataaggaaaaattacatataagaaaaaaaagtccacacaaatcaatcctatcctaatacatatctagccgtctaactaccatatactataacagtttggtggcggagaaggatggcatgaacgaggatttgattgctggtggtagtgacaacgctgccatgcgacctgcctcgggaaaggatagagctattctagtggcttttatagctgcggcaggcgcttgataacgatattggtatttcttaacgacattactagaaatataattcccaccaatggcgccagaaatactcctggtatattatggttacagatttcatctgcaagcgcgcggatataccattgtagcatttcacccaagagtattccaagggtatcgtatttatttaatcccgtggaaaaatcatagtagagagaactatactaataatttatatgttacttgtaataattatagtctaagcaagggttgaggtaaatcaaagggtagagtgacacacaagcaggaagctactcattctcatactaaaatatctaagctaagtggaaagaaaatagaaagagaatctattcctatacttctagtatacatagtatacatacattctagttatatgattaactagctaataccctttttccgatgccctcttagtactacgagaagttactcctgactgtcgagttccttacgacatctcgtcttaccatacaaccggggctaaatacggaggagtaccctccccagggaattaacttaggactatatacacgcgcggaggaatacccatactgagctgtcaccatcagcggaccacctctcatccgcagcatataaccccaaataataatatcccgtaatctagacaccacgcctaaactaccagatactactctaatatcatcgtcatgacatagagtaattgcataagcaaacattatacccgtacctatgtatctccaagataagctagcagtataatcagtataacatggacataatgtaaagttggcactcatatactcggaaagtattccaacaccataaatgtataaagaagagtattctattaaaagtgcaaagcttacaaaagaggaaaggaaagctactagagccatacccgaactcttctgaaggcttccggactccgatttctattctattcctaattacctagctagatactactaaactaaacttgagagaaatgagagagctattacttgaggtgtgtgagtgaagtgagaagtgaagtccttatatagaggtagttatgacgattgtggaaggggaattgtctgaagtgccctccaaccgtcattggaatgcaatcctggacgtccacatcgaaccctgcatccaacggtgctaggatgggttcggccgaaccatgggctaggtcttcccggcccatcttcggctggcggcctgctctattgctttactttgtagacttgtgaattttggcccaattcatcgtgtcaattttgagtttgtggcccattgatacataagtctggttctcgacatcgtccgattgatttatcgtttgagttgatgtcgattatcctccactttattgtcattctctgcaaaaggttagtatacctaatactagtggaatattattattctaacagatatatgcattgcaagcattactagttctcctctattttggtaatactgacggtcgaaactgattgataacgaccgtcaacaaaaccccccaaccttgaaactttgctcgtcccgagtgaaggacgaaaggaaacaaagacttgttgttgatcaggagttgctactatgctgcatatctcaaagatataggtgcaaggtatatgtactctctctcagattaaataatctttggcacggtggcttacccttacccctgattcccacgagacactgcttctccttgtcttaggcagttgaaagatagaatagtaattagagcaccaatcacccaatctttattcaactcttattccagaagttttcaaatgattttgcaaaagaaagccaagttcctcaaatgatttactcagtctctccaagtgtatcaaaatgaatttctcaccagttgttgccttgttgattcctactctaaggttttgatatgtggagctcggtaaggatcaaacatggcatacttgcattcacatttattactgagtcaaaaacttagactaaagcagataactaaacatactcaagatcaagatcatgcaatgtgtgtgatatatggtggaaatgatatatgaagaataaagaaaattcttctcctttgtgcttactttcttctcccaaaaatccttcttttattgattaggagagggcatgattacattttttttcaacatcatgctcatgcttgatggagcataacttttatttttcataaccatgcctttccctcctctttttttttctttttttttcaaaaggatatttttttctctaggagaagaaagcacatgaaagcatggagaatttattttggtggtaaaatgggaatgtaatggaatatttcttagctcctagtgtaggagtttagcatgtgtataaatgtggatgtatgatcttgatcatagagcatgaaaagtatccacacaagtcacaagagtttgacaaagttcaatggaatgacaagcaaccaaaatatatatggtttaatcatgatggcacatttttggctttggtaggaatttataacaaatgaggaactttcaattttatcattttgaaaaaaaaaacaaaacatccggaattcaagtcaaactagtatcaggatcatagcaactcatatttactatctcatatctcgtaataacttagacttagatcagcaagtgcagctcatttacgtcaggttcccggataattgttggccacttatatttgacctttgagagagcacttaccaagaacccatatatcagagatataaaacagagcaactattcatcatttcaacaatgagaactagcttgtcttacctagcatgactcacacctatcctatctttttggtattttctattttgcaaatttttatgttgttttcaaggtttacaagatgcaattggaaagcaaatatgcaagtgaaaagggaaagtgtgatacaagttacctcggttgggggagagatatctccccccaagcttggctttcgctcagggtccttgataaggattgaacccctgaaagcgagagtacgcgtgaaggtcatcgtgctgttgctgcatcatgttgttgatgttggcgaactgagcatcagcagatcgttaccattcttgcgtttgtgctattagttccatgaggttttactggatctcctctgtctgcatatcaagggtgtccattctcctagtgatttcacccaagtcccaatgagaggaacttgagtgccattcacttggagatgaaggcacaccacttgagctggaggcttggttgtccccccattggatgtcatgaggcgcaagccaccggtcctcactggcacttgcccaggttgagactccgatgttgtgacgtggagcttgggtccatccggatgcatccccaattgctgcccaacctgcctcatacatctgtacgggtgttgaggatgatgaactttctcgttcattccttgtcatgttgtgcgtctccctgtatgctccacctacacgagattcttctatggtctgcaggggaatggttagttcatggcagttgtacaaatgataccccgcatttggcaacgggatttcatttgtacaaccggggaaaaagtaaatcaaagatccatctactccatgtttcagaatatgcccttgcactagataattctcgtcaatacacggacagcggctgagataaaagcaatttggtcactaccgacccctagcccttttgctatccgagtaatcagagaagtgcactcaacaggagcagagaactttatactttctaaccattaccttatcatacatttcacaggagcaattttcatctttctaaccatggcaaacatgataatcaattcatctcccctaatgggcctttgatcacctctaggaaacaaagtcatagcaatccatttgtgcatgagcctaagtgtaggattatggatttcattcattcttggtttcttgcaaattggagcaccagaaatgtcttccgaaaacctatttttctcgaacccagaaattcctttctggagatcgattttacaggtatcgtgaaaaccaagaagtgtacttaagcctttccatctaagtgtgtactccttatggaaaaagcgaaaggaaattccatcttctatttctttcaaagtgcacagaaattgcaaagtaagcagacgaaaaccaggctcatctaccacaacaaatctctgccaaccaacagctttccaaatagtacgaaattcaacatccatacctatcatttttagcagcttcggtgagtattctcgcgtgtgagcatactcccggtcgctcggcatgtagtaggcctgtctctcccaatcaatgacaaggtcgaggtcggtgtcgttcaggagtcgtcgtggagcttcggcgtcttccatcgagacatcggctgatgaacgagtgctagactcgtcataatgacttgatgaaaagccggaccccttgaacagacgagacagtcgcctcctgattctgcacaatggagcaagaacggactaactcggcggggttaggaatgacaaaaatttcacccgccggttagtttcaccaaagcaacttgtatatatgtaactaaatatttgaatttgagggaaactatcaaagcttgaatgaacttgagagcaaactttggaggggaaatgaaaatgtgatgaaatggggtggaattccctctctcggccgactagcttttataggttactcacaacgatcagaaatgacatgtgggacccactagccgttaccctgccaaaagtggcaaggaaccgttgcctggccagttcggccgaacccacagtgggcccaaccagcaccactttcggccattgggttccaacggtcagtgtggtcgtggaacagcgaagtttcgttgaaaacttcattttggtttgctctgaaaaattcatttgaagaaatttcctcaaaattaaaaatcctgaatgcaattttgaaattcaaacatgtgatgatgcaaaaattcaaattgttgaaagcaaatatacggatacataccaatgtacctgttggtgaaggtcgcgtcatttaaagtctgacgtgcaagactgtacctccttctagt

SEQ ID NO: 12395 - DNA, 591 bp, Oryza sativa
tatatcctatgtatgtcacaaatcgaaatcaaacaagaatttcaggcataatgtgactttcaggagctaaaggcatgcgcacataccgatctggggatcaccagtgttggcatcaatattccccagcagaccattaattcttgcagtctcaagctcatggtggcagctgcaaattttccatggagatatgacactgcctctgtaagctaccttgaatgacgttagggaagcaagaaactaacctatgtccagatagagtagcgtggttgcattcaacatttatcttgaattctcctgtatatggtgaaaaagaatgtactttagattatttcacaatacacggttaactccagacagacagcagtaaataaaattgttcaaaacactaatggtgttaatacatgaattcctgaaatccaaataacagttcaactttcgaaatcactgtaacccaataacaaactacatatgtacctgttagaccatatttctgtaggaaagagaatgtggttgcaacatcccaatcgtacctgggagaggacaaacaagggttaggattgtttaatcctgtgacattttgttaatgtaaac

SEQ ID NO: 12396 - DNA, 563 bp, Oryza sativa
aatatgctttcagatttacttacattaggatatttcgatccagaaaggtcggtagctcaattccatctatgtgataatgtaaaataccttgtccatttggtacaagaccaaataaaaatattgttcttataatcggtatggatggaaggtgagttaaattatgataatattttctcaactttttctttcttagtttagatgaaaaaaaatctgacctctaatgtttgtgcagtttttaccggtgtcagtttgatccagtaaacggtggagaaatgaaacagcttgagtacacgaattttttaaatatgtagggatgatgatctgttcaaaatcagaatatgtattgatattatcatagttgacagagaagttatcatttttttcacttgtcttatttcgatttggagtttaaaagatatttttgccttcatagatttgatttatttgggtatatagtgtcatcggattattctctttatagtgtagtgacacgataatatacaataatacttagcacactttgaatcaaacttaaatctcctaaactgattgatttaatttta

SEQ ID NO: 12397 - DNA, 4032 bp, Oryza sativa
caaaagaacgtaacactttactccatgctaaaaaattacctcagtcctagaataaatacagttttatgagtagaaggataaattaacaacgagggaaaatcatctagctgttccctatcaattggggggtggttgaaagtgtgaagatagttgggtgtaaattagagaacatttaaattagttgttattaatgggacaagtaacaagtagcactataagttttacttattttgggacaaaattaaaatcgagaattgcactttttaggacggatatagaataagacgtaaaatcgatcttgaatatcgtaatttaaccatttatttcttttataaattattatccacaacaacaaactttacatcatatgaaacttaccagttgattttgctaccgaaccgctatgggaagcacggctgctccggtatccaccattaagataaaccctgatctctaccagtactagtattatagtactagtcttattattagtagaacaatctaaatcatcgatttatactacaagtaaaaaaaatctaccacaactaattgaagctatagtataaatagaaattattcattagataaaataagacaaatgcttacataaattgtgctacctctatagaccatcatgaaaattaccatgttaatatgcatgtaaccacatttttaggaaaaagggaaaggttatatgtataagtggaattcatgttaacttcagttgcatttgttccattgaagcgagagcctatagattaggaaaacccaacaaattaaccctcgtagcatagattttaacaaaaagaaaaagatttaagatgcggagaacaaataaaataaaatcataattaaaaatattagtaaaataaaagcctcaatttcataaatcataatacaactcggagattaccgtcggtcttatgcgacaaccgctatcgattatatagttttggttgtgatagtgttctcctattaaatatggaagatcaacaaatactatgagaaataaagtaacgaggacggaagtaatggtaacaactatgcacaactaaagtgaagtgcatgggcatccaaccatagagaaataaaccaaaacccagctgagctagatggtgtaaggagtatttaagaagagagcatatggagcaaccccgccgtcccttgggcacatagagctgcgcgccgcccttgttggcgaactaccggacgtagaagacccagctgagctagatggggtaaggagtatttaagaagagagcatatagagtaaaccctccgtcccttgggcacgtagagctgcgcgccgcccttgttggtgaactaccggacgtagaagacggcgttctgaaatggcagggtgttgagcgtgttgccatcgccgaacttggtgacgggcgcaacccggtgcccatcgccacccatcgctgccgccatggaccaactcaacaacggtcagcaacgccaatgctacagccaactgaacaacgccattgccatgaacacaacaacaattagcatccattggggaacaaatcaaaacagtccttccagatcaaaacctccaaaattcgggaccaataaaactaagacgcgacaatcttaaagagaaactaaactatcaagaagcacggaatagatatgccattttctccaagagaaaagatcccgatcacatgaagaatcaacaggccaagccagttactatcgattatatagttttcggtgtgatagtattctcctattaaataacaaagcagaacccagctgctagatggtgtaaggagtattaaagaagagagcatatggagcacaacacacatgtctacatctagcgtaagatttgtttcgctccactatctcacaacagttctatctccactatctcacaacagtcctaccttaatttcaaagtgctaattaaccatacaaatcctgttttttttcatccatctatacccttcaatttatatagtactccgcaatgaatgacatgaaattcttcatccaattcttccgagccacccgcgtttaatttggtaggtggtcatgcattcttgcatacatggagtcacctagcaagtagttacccggtcaagggccaaggctatcacttattagttcctactttgtctttattccgctgttcttcatgtgtttgtttcatcgaggaagcatacatgcatacatcacgtgtgagttggatgaggaacccctgacctacaatgatgattgtgtggctctaacgtgagaggctctcctagctagccttagcccgactcatagccagggttcaccaagggcctgtttagtttccaaataaaatttttcatgccatcacattaaatgtttggacacatgcatgcagtattaaatgtagaaaaaaaaccaattacacagttagccaggaaattgcgagacaattcttttaaccctaattgcgctatgatttgacaatgtggtgctacagtaaacatttgctaatgatggattaattaggcttaataaattcatctcgtagtttcttggcagaatctgtaatttgttttgttatttgaatatatttaatacttcaaatatgtgtccgtatatccgatgtgatatgcaggggcacaattttttgccaactaaacaagccctaaatcgttttggatgtggttaccatcacctcacagtgagacggttatcacgataacagcgtggttactatgaaaaccgtgcggttaccacaaggtttatagtgattaaaaactaagaaaattgctggacgtgataatagtgataatcacacgattttgtaaaccctattcatagcaagatcagttaaaaagtactccctccatcccaaaatataagcattttggctatgaatctggacaactgtatgtctaaatttatagccaaaagttgttatattttaggacgaaggtagtagaacgcaattatcctcaaagatattagaacagactgaatttaaaactaaaatttattgtctctaaattttaaaggccctgtatggtcagatactctctactgatgttaatacacggcgctggaaggccagggcaccaagccaagcttgagttgcagcccatgtatggtaagccatttctttaatatcttgtcctttacttctattttatttttatgtaaggaaaaagtgcgaattaccccctcgaactatcgcggtcctccaaattaccccataaacccgaaaacctgtcatcgtccaccttgaactttcaataccggacaaattacccacctcgacctaatccagagcggttttatccaacgtggcacacgcgtggcaatctagtcagcattttatttaataaaaaagggtgggacccacctgtcatgctcttcttccgctcttccttctctgtcttctctctctcgcgcagtgcgcacggcgaggacgggcggtgggcgtgggctgtcggcggcgctcgccggcgccaacgagctggtactggtagcgccgtgcccgtggagtacctcgatgacgtggagcttcacggacacggcagcgtgcacgccatgatcatgatgcccatgtactcctgccccgtgcccgtggagtacctcgacgacgtgaagaactatagctgcgtgagcccggcaccgaagttgacgccggcgccggtcatgccggagatgatgccgagcgagcggcgggagacgaaggggatgacgccgaagatggtgccgcaggctgcctgggcgcagaaggagaagaggaccatgcagacgacggaggaggggagagtggaggcgcggccgagcaagaggcagaacggccgtcggcggtatggaggatccagatgttccatgggcgatggactccaaaatcgagttccagctgcagtgggtgacgaagccaccgacggcgcggtgcgacaggatggcgagctgcggcgcccacccgcggaccacgacgccgcgccccgccactcgcgccttcagcgcggacagccattcttgcacctccggcgtggccacctccgactccttcaccacacagatgaa

SEQ ID NO: 12398 - DNA, 1300 bp, Oryza sativa
gacggcgcacgacgcccgcgccgtgaggtcgctccgcgcccgcatgaacgccgacgtcgagcaggtgctccgccgcgccagggccgtaaaggggaggctccaggcgctcgaccgcgccaacgccgccagccgcaagctccccggccgcggccctggctcctccaccgaccgcacccgctcctccatcgtctccggcctcggcaccaagctcaaggacctcatggacgacttccaggtgaggaaaaaaaacagcagctaaaaattatggctaaaacttttatatctttgagtgtattgttagtggtttaaaagttaatgctggaaaatagactacaatgtaaaaaactaaaatcaacttcaaatttcagttttaatattggtttcgatcagttttaatagtggctgttgcgatcaggtttccaccatattggtttgcacatttcttttcacaagggggacgatcgaaaagattttagaaattgaggaaatttcggaatcaaacaagttaaagctttaacaaatttatgttgaacttcaaaaatgcttgattaaaaaaataaatatttcagagatcataatgtcctatcgcggactataggacaataatctctaaaattattgaaattaatatccgaaacattaaacctgaccgtgataactgataaaccaataagaaaacgatgaaaaacaatgcaatacgtgcaggggctgaggagtcggatggcggaggagtacaaggagacggtggcgcggcgatactacacggtgacgggggagaaagccgaggagagcacggtggaagccctcatctcgtcgggggagagcgagacgttcctgcagaaggcgatccaggaacaagggcgcggccaggtgctcgacaccatctccgagatccaggagcggcacgacgccgtgaaggagatcgagcgcggcctgctcgacctccaccaggtgttcctcgacatggcggcgctcgtcgaggcccagggccaccagctcaacgacatcgagagccacgtcgcgcgcgccaactccttcgtccgccgcggcgccgtcgagctcgagacggcgcgggagtaccagcggagcagccgcaagtgggcatgcatcgccatcctcgccggtgttgtgctcgtcgtcatcatcgtccttcccatcatcgtcaacctccacctcttgaccattagatagactccctttctttcaggaaactattctaatccctctcgagtgatgtcctctcattacatcaaatagttgtaaaagatttgatgaaatagattagtatgtgatatatgat

SEQ ID NO: 12399 - DNA, 5027 bp, Oryza sativa
ggcgtatgtaaacttctatgttgtggcttctatgtcgattgtgttgggtgttgatcctgtcgattgtctcgttgtgggtgtccccctgtcctcctaggggggcttgtatttatacccataggtgtccccttatcaaagtagaactagggaaaccaatatggatacaatccgagtagtccttgtcgttttcatgtagaactctagttgtctttccttatccggaactccctccatatctgaagtcgatttccgtataggacatggcatgtggtgggtcctgccgagatgtaatcaactactattaggtatgtggtatccataaccatgacagtagcccccgacttcgatgcaaatgaacgaattcctattctcaaccgcgcacaggcattggagtaactgttatcaagctcatgtgactgttctcggtgagtttagagataacgttagacttcctttgtcagccccgtgcaggcaccgaaagggtttgtctaagtcaatctctgatgtcaaccgaaaaagtacagagcgtacgactaagtctcccgtcttgctgtagtcgagaatttggattgaagtcaagaaattttatctcggcgggtacaccatctcttcattccgtattccttgtcgagatccagcaaccgttcccgagcgatcgagaaggcgtagagtctgcgacggagccttgtcgacattggtcgtacttgccttagtcgatcttggtgtagaaccatagagacatggagtcttcatcaatgtcgaataggattttcctgaaatcaatactcagaaaagaatatcaaatagaaatagcccccgagcgaatgctcaaagcgtgacatgttataatatgtatggtaaattgaaaatgaattaaatttaccgaccaatgttttgtgtaagagtgtcttctcagttcacgactttggtcagtcgtttgagttgtacactctctctagcccccagccttgtcgtcggagaatcgttctcggaggagaaggctcttggacccttgacctgccttggttgaataagcattgatcctagcccccagccgtgaagttggaaaagtcaattttccgattacacggcttggttaatacgcacggcgaaaactcttacacaaccagatcttacatggtctttcgtctctgaaggatccgacaaggccttatcggctctgggcgtccccagtcgaagatcccttaggttcctcggaggccttgtcaagacggcgtaaagggacagcaggataggtttcaacgctaggtgtcgtcgtggtaagggatctctgggtaaaacacttggcgatattgtgtacctgctaccaactttattgaagtagaggtagtgggagaaatcggtacatcgctggtcgaggaacaggcagtagccgcaacttgaccactgaaagtggaagtagtcggagaaacgctacatcgctggtcgaggaccaggcaatagccgtaactcgaccactgaaagtggaagtagtcggagaaacgctacatcgctggtcgaggaccaggcagtagccgtaactcgaccactgaaagtggaagtagtcggaggagtaaccgtaactcgaccactgaaagtggaagtagtcggaggaacactgcatcgctggtcgaggaccaggcagtagccgtaactcgaccacttgaagcaaatgtacgagagatcactacgatcaactggttgagaaccggtgagtaggtgtccctcgatcacttggagtcgtggtaagaggaccgctacgctgctgtagtcgtaccttgaccatctgaagtaaaggtgcgagagattgctacgtactagtgcgagaaccagtgagcgagcagaattatctctcgaacaccgatggaaggtgcggtgcgagagattgctgcgtactggtgcgagaaccagtgagcgagcagaattatctctcgaacaccaatggaagttgcggtgtgagagattgctgcgtactggtgtgagaaccagtgagggagcggaattatctctcgaacaccgatggaagttgcagtgtgagagattgctgcatactggagcgagaaccagcgtgcgagtagagttatctctcggacaccgatggaagttctatctcaaccttaatatttaataaataaactaggtagaaatcttatattttaaaatagagtaatcatcaaccggtcattcatttttgatattaccaccactacacaaaacatcaaataggtatcggcactatatataggccttttcctatttccgcgggttgaaatcgaaaaaaaaacagcacctttaatcaattataagtaccggttctaaataataactgacacctattctataggtgttggtttgacacccacagaaatcgagccgagccggcaatcagatgagccgaccggcgggccccaccacaacaaggcgatgaggagataaggtttgatctcgcgtctctctcgtctcgctctcttctctccgtctccctcccttctctctctctatctatctatctatctatctatctatctatctctctatctctctcgctgctggcggctggccgatggaggcggcagcggcgaccgcgccctccgatcccctccgccagatccggcgggaggggaagcggcagtggggtcggcggtaggcggggcggtgtcagcggtgggcgggggcagcaggctcatcggtggtaggtggcagtaggcagagggctcgccagcgggaggcggtgatctaccgcagggaggagccctcccctccgccagatctggcgggaagggtggcggcagtcagcgggctcgccgacgggagacggcgcgacgggaggtggcgcgacagctcaaagatgaccaaccatgtgacggcgatgatggtggatctaaagaggtgtgtgtcgacgtttgatgtctcgactacggtatttggacagtattgggatcgttggtgctagaatatacgcgagactgaggtaaaaaaagatggagacagggatttttatacaggttcgggcccctgagttgtcaggtaataaccctacatcttgttggccgaagccggtattgctcttattcaccataatcacaccaatacaatatgtgggtagcctatctaactgttgtcgacatggcggtctgaaggtctgactcgtagtcgacaacagggtagccttcctcctcgaatccgtgtccggcgagatcagagatagcgctttcgtatctcctgacggtatccggagataccgtaggggaatagccatgcctatccctgaaatcgatatccggcggcgtgtcttggcgtatgtagacttctatgttgtggcttctatgtcgattgtgttgggtgttgatcctgttgattgtctcgttgtggatgtccccctgtcctcctagggggccttgtatttatacccataggtgtccccttatccaagtagaactagggaaaccaatatggatacaatccgagtagttcttgtcgtttccatgtagaactctagttgtctttccttatccggaactccctccatatctgaagtcggtttccgtataggacatggtatgtggtgggtcctgccgagatttaatcaactactattaggtatgtggtatccataaccatgacagtgtgattctttttttattgcataaatttgagtgccaaaatttgtgttgtgggatgaatggacagtgatatgtggatgaatccatctgtggatggatgatgatattctttttgttttgttcattcttgttcttgttgtggtgtggatggatgcggatgtgtgaggaggaactgctcggctcaatcgagccgacgcatcgagccgttttttttttattcgtcgaacctaaaaggtgtcggaccggcacctatttaattttcaaatcagtaccgtctctcttgtgccggttgagaaaactggcacctaaaagggttttctaaccggcaccaatttatgttttttaagtagtgcactcgccggcgagctagctagcctggcaagtggtgtaccagctgaagctctccggccaaagcgcaacctcgccgtaatccgaatctacagcttaattaatttgcttgtctctatgttccacattataagttattttgaatttaaataaattcatatatagattcatatatgtgtttatatattatccaaattcatatgtatgttagcgaatctagataagtactagagaaaccaaaatgtcttataacatagaaatgagagagacctatatactatctctagtttctaagctagctggccagctacctaatctcttcatatcaaaatattattttctagtatttaaaatttattataaaatatagtaaattttgtacatgcattctctttttaactaatcataacagtcctcacataattttttagttttttttgtcttttcaactaatcatattttattattttattatttctattttttaataaacgtgtctaattttaaaaggttttatattttaggatggaagctctagctgcctacgaggctacgacgactgaactgacttcatcgctggttttaaatacggccaaagttttggacatgatcaagccacggccaagctctcaccgatcaccagatcgatcgattcagttctcaccttctcagaagagagaggagctagcacgaggcctggtcgatcgaccatggctgctgctgctgctcgttggcctcgcttcttcgtgctacgacctgctgtagcgctcctgctgttgctgcttcttctgccgctgcatgctaccgctgcttcccccaccactgaaagcagcgccggcaacgacactgttgctcgacctgatccttgtgagtagtaacgatcgatataatttattttcttatacttctatatatataaaagattcgcgagtacaagatagattttcatccctcaaggaacatctacttgtttaatttcttgtatttcacctaaataattaccaaaagattgaaaataaaatgacaaggtcgatagattactccatgattaaacat

SEQ ID NO: 12400 - DNA, 21941 bp, Oryza sativa
ttagactatcatttctccatgatccccaactttccatgaacaatgcccacatccagtgggtaatgtctgtccagcaaacctgacatgtttcccagcatcagttttcccggtgcaatgcagaagatgcattagaaggcaacataaggcggcatattgtccacatatatcaaagcaatacatttgataatgtgatgctaaggacaggaaacctgatgattgcggcttcaaaggatcaaatgaagatcctgattaaactttaggaattgcaataggcaggatactgctctattgtttagtattccataacaacggttactagatatcacacacacaatgtgaacttttggtaaatgctagaattgtaaaatattatcattatataagccttagcagcaagttgaaggtgtaatgctagaacataggaaaacgaaccaaccaaaagtgaaaaaaaaaagaattcaaggaggtaaaatacactagcattacattgctactagaagagcaaattttgtaccatgttcaggggagcttcttgaaagtacttgtatagaagaggaagactttgtttaaattggcgttcaaatgatgcaggtgcactacaagtaaatgaattaaagtcataacgaagacaattgaaaatatggggaaaatcctcataaaataaataaaaactggagttgaaatcagtaaagccccaagttacctgtatggaacaaaatagggagcagcaatgatgcacttaacttggaacaattctgcaagatgccaaccttcctgaattgtgagaaagatccaaattacgtatataaccacatataggacagactaacaggtatagtcctggagctgttctagtgccaaatatggatagtgcagagcaaggttctagaattatctccgattcttgcaacttaatggagtattatgaccatagaaggcatttaatagatacaccatagattattcctagataagactgactgactgactgagattgtactggaaatgttcgggtgcatcctcaaacaatgaaattccatattttcaacatgaattggtgtggcaggactgtattattacctccaatattttgaagaatgaattaagctacataaggactaactgaaagttgaaccaggagctccacaactcaacttatagcaagctttgttaatgggatcctcaccaacgcaaagaagttgatcacaatgaaatcaccatgagtgctcatgtcatttccaaaaacattttcgacggcagacaagcactctctcctgtgctccacttgaatggtctttttcctctgcgaaaaggagtcatgctcaacatttgattgaacagaatcacctatcaaaaatgcttacatgataaaccatatttgcaaaaagagaaatcacgaacatgaaattggacagacttcacggcacttacatgagatgctctcgagctgttcggcagcaaggacaggtgggcttgacacaggcatatatctaacattacagtctgctagatgtgtcgacaagctctgcatcaaattcactatgtgaaactgtgatcccagtaaagctaagccagctaggcaagtttatattgagttttagtttctacaagaatcaaacctgatgtgctgaatgtgtgatgaacactacaccatactgtcgttggtcctgcgcaaaagctgcagcaagtgcctaagaaaaagggaaaaaatatatccaaaattaggcgtatagactctaaatgggttcatcccgagctgtaaactgttcgctgtctgttcggtgacatccccatccgcaagaaaatcaagtgggattgcatcttgcgctcgaatccccacggacaaagagacgaaaaaaaatacgaagagagggaagagcgcgtacagctatggggaagacgtcgccgcgggtgccgaaggccatgaacacggcacgaggccgccggcctccgccgccgccgtccatcgcctcgttgagccgccgcaccgaaggtcggggtctctgcggcggcggcggcggctgtggcctgtgggcctttccaggtgaaaatatgggctctaaccactttccgtttgggcccagatactttcggcccagtacgtgcgcgtcctaataagctttcgcgtcgtctcctcgactctcgttcgagtgctcgtcacaggcggctccacttctccgctggtgcggcggcgacggcgacggcgacggtgccccgcgcgccggagaaggccccgcgccgcatctacgtccgatggcctcctaccaggtttgttccgtggcgctgtttctctgtacgcatgtttgcaatggcggcggcggcggcgggggtgtggcggtggaggttggtgttcgccacgcgtgcgcgtggtgtgttcgtggaaatgcccatgagggtgtcacgcgcctgcacggctgcacttggacattccagcggcaaatcaccatgttagtttctaggatttaactaggaaaacgataatgatgcaattagcagaactgcagaaacgcgtcgctggattgccgtacctttgtggattacgggggacctgaactttgggggcaaacaggggtggggaactggggattatattgctgtttcgcattgcatctgtatggtcaattgcacagggggttggattagttggcaattttggaaaaccataggctcaacaactcaacaggttcttatatcttctctttttgtcatgttttcaggatctggttaaacaacataggctatacaatatgaataatatcgtacagactaataaagtttatcccaggaacaagaatgccattacaccataccattttatggaatctcaatctaattaagaacgatagttaaaaacagcagcatacaagctcagataggaatcttaattgcaggttatggaaaaaaacagaataattggcttggtggaccaatattatttttttaataccaaatggaattcgttacaactctcaaagtgtattaaaagtagttgtacaaacatccaaattacagctgaaactattggtactattaggtggggaacaaaagttggagctagaatttttcatgcattcacctctatctgtttttgtttttatttcttcctcataaagaacaagattgcacgtcccattatgatcatttcaacaaaaagatttctgcaattgtcagtactatttaccatcgcagctagctccttgttctcattgtaactcaagaaatgactgtcttattgtgcccatttcggcagaaacctgtgacattcctaatcggtcttttggtgatatggacgaacacaacagacccagcttaaccattggtatgatgcaactctgcattatttcagtatgatattttcctccatttaggtcactctgcagcataatgggatccaaaatctcatctagtttgtgtggaaatgctgactccacgagttcatgaaggcttaagccatccttcaatttgtcatcacttggacgcttcccagttaatatctctaataagagcactccatagctgtaggcatcgcccttggttgagataggtccacccattccgtactctacatatgtatttaaaaacagaagtattcatttaataataaggaaaatcacttgaatatagtattggataagtaaatcaagtgggaaaaccttatataaattagaagaaaaatagatagtgaatggttcgtctcacctggtgcaatatatccgatggatcctttcaaatcagccaaactagttgaattggcgcatgctgcagttgtagtgcacatgaatcttgccaatccaaaatcactgacatatgccgtcatctgtagatctaacagcacattgcttggcttaaggtcacaatgtattagtggagatgcagactggttgtgaagataatctaaagcatatgctatatccagagctatgctaatccgatcacccaaagttaagacttgtttctgattatgatcatagactttctgatgcagccatgtttctaggcttccattaggcatatattgaaagatgattgctttgaattcttctcctttgggatccaaggttgaacataaggtgatgactttgacaagattgcgatgtcggatgtttttcaaggcttcacactctgcaataaagcttgaaggtcctccatgcctattgagattgaaaactttaatagctactagatcaacctcaagctccaaggtgcccttgtaaacatctccaaaggatcctgaaccaaccaagttttcagtagagaaccctttcgttgcttggacaatgtctttatatgaaattatcttcgtatccatgctaatgtctgtcaatattggcttttcttctcttcttttcaagcagacagtgagtaaacagatcagtgaaattacaagaacaatggcagcaattggaaccactatcattaaaataatggacttatgctttgttcttctgtctaatgcaggacaatgaggcagccctaactctggggtgttggcacataaaccgtcatttccttgaagggacaccctgctagcatttctgaaaatgccggttgatggaacaggtccatcaaaatcattaaaagatagattaagatccttcaaataattcatggatgcaaaaaaatctggaatgctccctgataagttgtttgaagagagatccaactccttgatgcttcttaaattcatgagaaaatgtggaatgcttcctacaaggagattttcttccatgtgaagggactctagaagcacacactttccgagagtggatggaatgttgctagtgaggcggttgttggaaatgctaaggctgccaagatttatgagacctccaatctccagtggtataggcccagcaaaggaattatgcgacaagtccaagctttgtgacagtgaagaaatattaaatacctcgcttggtatgcttccaccaaatgaattgtgagaaagattcaacttctctaaatgtctccattgccctaaacttgctggtatagtcccactgaagttgtttccatccaaatataactcggttagttttacaaggttgccaatggaatcaggaacatggccagagagattattttgtgcaaagcttagaaccagtaagttgcttagatttcctacggaaggagggattgtaccagtgaacaaattttgatccatatacagcacttcgaggctcctaaggtttccaatctccaagggaattgtcccagaaagtttgttttgcttgagccagagccacttgagctccgagggaagattaccaactgagcttggcaagtgtccttgcagtccattcccatccaagcagagtctttgcagctgagtgcagtttgcaagggatgagaggaagctccagtcacccgcctcaagctggttatatgcgagatcaagttgttgcaagtgtgacaaggaaccaaaggatggcagtattccagtgagcccaatatcaacaagatgaattatttctagcttagaagcattaacaagagaagctgggattggtccactcaaacgtgtttttgataggatcaatctctgaaggtttggaagcttgtagccaatatctggtggcagtcgtcctatgagtgagttgttggccaattctagatatttcagagatgatatattgaaaatagactggggtacctgacccgacaagttgttgattgagagtattagcatctcgagagttgggattctacttaggctctcagggatgcttcccacaaggttatttgctgcaagggaaacaccaacaagagaggaaaggttccctattgaggcaggtatctcactagtgaggttattctctgctagactgaggtattgaataggtgcagcaactgctgtaacaggtggtatggaaccaattaatttgttcctgtcgaggtaaatggctgtcagagaggacgtgttgaagagagctcgtggcagcgctcctgtaagtttattttgtgtcaggctaagaaattggagagatgagctattcgccaagaactcggggattccttcagagaggccatttcctcccagatcaacatacgtgagagatgagccactgcccaacaaccacggtatgttacccaccaaagtattggtggcaaggttcagaattttcagctcacgaagtgtgccaaacccactaggaatgcttccttgcagcttgttgtttgacaggtctatgagctggatatgaacgagttgggctaggcttgcagggatctcaccttggagggagttgttccacaagctcaggacttcgagacggctacaggaagataactcggctgggatgcggccatcgagcgaattgacactcaggttgaggtgtcgtagttgttccaggcggctaagctcagctggtatacgcccgtgaaagctattgttcgacagatcaagcctctcaatggagctcaagttggctatgcacggaggtataaggccatcgagctgacaggagctgaggtctagcacggtcacgcggcctggcatcgtcgtactgcaggtcacgccatgccagtggcagaagtcgagagaggtgatcctccatgactctagggctctggctggatcagagaccagagacctgaaggaaaggagagcctgccgatcaatgtcattgccgtcgccatgacctgctgatgatgacgatggccatgaacatgtcaaggcaaggaggactagaaacagtgcaggactagttgggctgatcatactactggtgtggctgcagctacttgtgcttgtgatgtaagcttcaggaagcatgcgtgcttcttttatatggctaagcaccttgctcacttgactggctggcaacttgttcagatcaacggtatcatctgctgggattcataaaccagcattgtggattggttttgaatgtttcgatcaaagttaggtacgtaccccatcttccctacaaatgttttccgaataaattacgctcttcagtctcggatggcaggctgggcacttgggcagctcaaagattagtactactcgacagaagaatggataccaatgggctatcaagacatcaaggggagtacatttgctgtgcggccgaaactgctgtttgctcaatgacgctgcttccgatcgagcggccgacgccgttgataagccgcttgtattgaccggtgtcagtaggaaggaggccagggagcatgggggagagaggaaagtttgtattcgccgcgtcccagcgccactgacatcgagacgataagaacctagggaagaaagagacagaaaatttagaggattggaagtttctctgctaccttcccggtagagaaaaaagaacaaagttaagttaacacgctatgtttactgaaggtaactgtatgtatgaaaatttagagcagttacagtcgaaattaaggcccgctaggagagctagagattatgagaagctggtgcatattataatttgtaaattctataacttcatagaaatggaccgatgctctgcctcccaatctggttgtgagggtattggggatccacatatccgtgtgatacctatagttactttgaacatggcttatatttttacatattcataataaattttgaatagatgaatggtcaaatgtttccaaagtcaaccgtgttaaatatttgtgactaaagagagtaaaaaatatatatatgtgcgctgagttaggttggaccattaccactcctatcttcaggccgtcgaacataccgcgcaattcatgtttgacaccttctttgtcttcaaataattaagagcttgtttggtttggttccaaaacttgccctagcaaaacacgggcaacttcagtagtatcttttgtgtgttttggttgaagccaatatgtgctaattaaaccaatataagctaggaacccttgtcctaccgtaattttgatagagccaaaacttacccaagctttgacactatcagtatttagtactgctatacgtacgatgcagttgtataactcatattgagtactgctatacgtacgattcagttgtacaactcatgtacaactagagatatgtaaccatatatcaatcaaaagagaacatgttcttatgcactatagtcgtttacaaccgttgatcaaattcagtagtacgtgagttgtgtcgtatgtatagctattttcatcaatatttgatagggtaacaatccaaacatgacttattaagttcataactatttatcttcaaacttgatgtcatgttttcattttcaaaataaaattcataaaaattggcatgttatgaaaatgtattggctatttggctattaataaaacttccgtttctatactgcctcaatttccaatgcgataggtcgcatcgacgatatataagtggtagtataggatttaggatgatccgcagatcattaaagaaccatgcacgtgacttgtttgggattattcgtggcgcccgccggccgacgatgtgtataccgacggctggaactcaccggacggagctgaacatctcccgtccgagtccacaggtttcaattaattgtactactttagccgtacgcccacatcgatctatgcggtacgacgctgttaactttttaatatatgtttgatcatttgtcttattaaaacgattacgtaattattatattttatcgtgatttaatttatcatcgaatgttcattaagcatgacttaaatttattttatgtttatacaaaatatttaaataaaacaaagagtaaatttcacctagggcctaatttattggccaaagtttctcaatgaacgaggtctaactctaccttttcacttaacaccaagaacgattaccttgttttacagtttggaccgggttttaatactttgtgccaggcttgagcctagtgaactcagttcagggaagaggaggtattgagggagactagtgcacagggaggaggaagatagtgccgtggaggtggagggggttcacatcctctaccttaatggcactatcattacaggcattgacgtgtggggtaataggagggtgggaccacattatagtgattgtaatggtagtgacattatattagaggatcctcacccaggtggaggcggacttgctcaactcctctgtctccaccctcgccaccggcggctcccggccgcgtctcccgagcggaacggcacagcggcggcgtgctcttctccggctccgacatggcatggcggcgcgctcttcagctccggtgtggtactggctgaatgaatcagttttgtttgtttctgaatatgtgtgcattgtgcaagtaagatggagctgtaagttttgccactaaacacgagcaaaggggttccaagttccatatgtacatgtacctgatgaggtacaacgaattatcgggacaacataacacttgtgatattttttttccagtgccttctctttagtggtacttacctacaatacacagagataataaatgctactccaacttggtgagacttttggaatcctctcccatcctgccacgagctgagaaggagcactgcatgcaccccgttgccggcaccgcggtcgagctggagaagagcatgccactgccgtgccacgccagagccgaagaagagcacgcggccgctgcgccatgcctcaccggagctagagacactattagaaaaagcattttttatgtgaggatctttttttccgcaggcagacataacccttggagccaaatgaccgcctacaaaaatataaatcaaggtgaagttcgctgtccacgcaggcggaccacttaagcggtgcctgcgaaaatctattttcacaggcgaaccttatgttgtccgcctgcaaaaatcgcacctaccaaaaaaaatcttaagtctacccttatatattctcctcccacccctccccaccactcatttcctctcaactctctctatctctctctccctcaacactcagtctcctctcatgtcctctccctcaacactgtggcggtgcggtggggacggccactgcggcggcgcggacagcggcggggcgcggcgtcgcgcgcggggcggccggcagcgtctcccctccctcccttcctcacagatctggccggaggagggagggggaggccagcgggggcggcagcgacgacaacggcgcggggcggcggcggcggcgggggttcccctcccccctccctcccagatctggccgtagaagggaggggagaggctggagggggtggcggcgacgacgacgcgcgggacggtggcagcggctcccctcccccctcccttccagatctggccggaggagggagaggggaggccggcggcggcggcgaggacatcgtggggtagcggcgatgacggcgcggggcaacggcggctcctagcgcggctcctctcccctcccatcccagatctggccagggagggcggcggcggcgaggcgcgtcccgcgatttttttttgttcgttcattgcattttcccaggcgggccattgccccgactgcgaaaatcgattgtgctgcaggcggtcctccctcccgtctggaaaaattagttttgcctgcctgcaaaaatatttttttagtagtgagaagagcacacggctgccgcgtcgtgccacgccgccgctgcatcgtgccgctccgtaggcgcgggagccaccggcggcgagggtggagaccttggcgttgagcaagtctgccaccacctccacgtctccacgacactaccttcctcctccccgtgcgctaatttctcttcctgaactgagttcactaggctcaagccaacgtggtggcacaaagtcttaaaacccggtccaaacttcaaaacaagttaattataccttacaaatttgctatcaatctgtcgacagaattttagttagatatttgtcgatttatagaccgtatgatttgcgtgaagatttgtgctaatacggtcgataaaaaacacatgcgtgtgcatagcgggggatcggttcgaggatcactggttgccctgttagccgtataccaagtagcagttaagctaaattggttgaagttatggtgttaataaactaaaatatacgttataaatgtaaatacactgtattatcgggaaggctaaatggctgtcgaatgtttttttgatagctaaatcattcatgtttcaatatatttagaactgttgtatgatacgttgtagtaaaatgtttcatgaggtgatttgattgtgtttcagcttttttaaaagattgaaatattttcaatctacttgatgaaacagcgttcgattggcttcaaaatctgtatgatgaaagcctaaaaaatcatgcgaatcctatatagactttttctcgatgtactcggatttgtttcatgtttcaatatattcagaatcgttgttttataagttgtagcaaaatatttcatggggtgatttgattgtgttttagtttttttaaaagattgaaacattttcgatctacttggtaaaacactgcatgatggaagcctaaaaatcatgcgaatcccatatagacagccccaataaactatgcaatatatctactagatatcactataaaattacagtcctatataactaaaattatatttgtaaattcagttgatatgatatgtgagtgcactgtaattttgatagaaatattacgtaagtaaatatgtatttttaattttcttttatagtttattggatataaatctaatagtaaaaaaaatctcgctgattttttttagaaatcacccaacaaatgtaccagggcaacaagagatcctcgaatccatcccccgctatgcacaagcatgtgttttttatccgccgtattagtataaatctccacgcaaatcatactgtctaaaaatcaacaaatatctaacttaaagatatgtcgctagactgatagcaaattcgaagtgaaaaggtagagttaggtttggttcagggcggaactttggtcaataaatcaggtccaaagtgaaatttcctctaaaacaaataatcaaccggttgacttcatcgttgcctttaaatatgtgggtaggttagttttggactaattaagaatcaggcaagcaagcacgtacgttcgtacgcagacaatttaaggttcaccggaagcggatttaagcaagaagtgtaaccgatcgaccggccggcggtagatcgccgtcgatcgaccatagtcggagtttctcgatcttcttcttctctgcgcgcgaggcggacaagcagcttagtttgtgcaggctgcaggcagccatggaagctgctcgtcgtgttcgctcctccgagctacgagcggccatagtcgtggcggtcctcctcctcctgctgctgctgctccagctgcatgctatttctgcctcagccgctactaacaccagttcttcaggaggatatggttctggtggtgagtatttaagcagtgtacgatatcaatatattggcattgcctttcgcccatgattaattgctctggtatgctgtactgtaggagtattatattgcacgggcgtgtatatgatatatctgctactgagtaaatcaaaggcaaattaaatatatattttgctaatatttcaaacgattttatttgtgaaaaataaagcattttaattaattgtggtatagtcggttagatgtcatgtttgtagggttcattcagaatacatgattgaaaatacgtagaaatataattgtaaaacagataattgaaaaaaaaaatgtgggatagttgattggatggagtaaaggaaaaaacataagaataaaaaaatgggtgccctgtaacaaatcatgacagtacatgctagtgacgtgaatacattaatgaaatcaaaattgtcctttgtgccttgattagttgcttgatagcctgattttgcctctcgttcccacgtgaagaaagagaaaaaagaggtcagcgtgcatggatagattttgtcctatagtatttcccttgtatcgctaatgtagcaaaattttccagagcttttcccgtgacccgattcctactatccgaatgaagctgtacagtgactcaatccataggaattagaacccttcatttttcccatgttcttactccatttcaaatgagcccttagtaacttgttcatttctcttcagaacaagacaagccaggtagacatgacgacgatctttccctatcatatactcctagctatacgcacccatattaaccctaattgtgtaacatagatttttttaaaaaattatattaatctctactattataaaaattgaagatgtttttgctaaaattttgatacgtcattcatgtttaaaccgtttttttaaattcattgatcatattttgtatggaatcggacacggacattttgttgaacggacgaggactttttgaaactgtgagacaccaataatggaaaccatgcaaggcaccggtgggaaacccaatcatactcaaactcatgcatggcctggcagccacatcagtgatcgatttagaacgagtgaagttcgtagtagtaattaaggatattaaaataaaaatcaatgtaaaactgagcacatgcatggttaactaaaatttgcaatctccatttctatctttatcttctttactattataaaaataaattgaagatattttcatcgatactacatcgtctatatttgatcagtttttaagtttattcgcttttaaaaatacacaaagagtcgtataagaaattcttttaaaaaactcatatgccaacttgagatgagagtcagagtcctaattgctttagaattcttgccacgttataagaaagtaacatgcatgatatagccattaaggattttagattaaatatgaatactatcaaaataaaaatcgcatatactttttagacaaaacaatctagcaataatacgattaaaatagccttcacccgttgcaacgcacgggcatttttctagttaagaaaaaattaaaaaaaatcctaactatcaaatatatttagctggtagtatatcctacaaatagaaatcaatctctttaatcagtgtattatacaaaggtcattaattaagatgttgagttacattcaaattctacatgaaactttagcagtatacactacgatatttttttccaaaggataaaacaaacaaaccaccatacaaacatatacatttagatattgttgcccaagtttgttacagaagctattgaagaaagcatgagtacatgctactcttccatgcatggttggaaagtaattttattattacatactgtatatgccaaatcattgatataataaacagattgaaatccgagtatcttgacagaataaacattctaaggaaaatcaaaatcccaagatacatatgccgccaaaggttattgaagtcgacgtagtctaaataaaacatgttacacgcacgaatggatgggttaattgataactaagtttgacataatgatatgcatatgacattatttggtgttcataggacctgtacttatcttactaatgctaattggtggctattattatattctataaatttcctcgcgtgaatgtcttactcctattagagagctaagaattctcatgttaattcaaaactattgaaatttgttataaaagaaaatacctgtcaagtttatataactttaatttgtacgtgtaacttgtaactttttgcaggtggtgggtgcggacatcctgttctagtgtctccgataccaagataggcacaacagcctagctagctgcacacaccggctagttcagtcagttgtaataaaaaaaacaatacctaaataagtgatggaactatgaactaccgatcgatatgaattatgtatgtgcggatgagaataaggaaaactgcataaggccggcgtgcgcatttctggatgatgtagcacccatgcatgtgtactcgatcatgcttttaggccccatttgaatcgtaggatgaaaaaacagaggaatatgaaaaacacaggattctggcaagaatacaattgtaaaacagaggattacaaaacataggaaaaacaaagaaataaccatttgattggaccacaggaaaaacgcaggaatcagatgagagagatagactcagaggaaatgttccaagaggtttagacctcttgctaactttcctccaaaatgtacataggattacccattccataggaattttaaaggattggataggattcaatcctttgtttcaaaggccctcataggatttttttttccatagaattaaaatcctctaaaattcctacattttttttctacaaatcaaaatcaaaggggcccttagttaatgaaaaatcctatggtagggagggggccttaccctcccgtctatctaaaaaataaacattgtgcatgactcgaacaacatatatgggtgtttttttgagctgaatagctgagtggatgaataaattaatgatttgagataattatttaaggatacaaatgaacgaattaactataaggttgaaaaatagatttcaaacaatgttataagaaattcagggtctgtttagataccaccccaaaactttacaccctatcacatcgaatgtttacattcatgatgtattaaatatagactaaaaaaataactaattgtacaaattgtgactactttgcaagacgaatcttttaagcccaattgctccataatttgacaatgtggtgctatagtatatatttgctaatgatggattaattaggcttaataaatctgtctcgcagtttacggacggaaattgtaattagttttttattagtgcctaaacacggggcttctaatgggcgattgggtagcgatcgatccccctccctccctccacctggtttcttttttttggcaccgtattactttcctattttagtaaatttatgcacctaaagtttatacacctcaagtttacacatctaaagtttagagaccaaaaatttatatgtcaaaagtttatatatccgattcaaatttgaatttgaattcaaatatttttcatatatagtatttctatacatctaaagtttatacacctaaagtttatagagctaaagtttataagtcaaaagtttatatacccgtttcaaatttgaatttgaattatatctgattcaaatttgagtttgaattcaaatattttctatatatagtatttctatacatctaaagtttatacacctaaagtttatagacctaaagtttataagtcaaaagtttacatacccgtttcaaatttgaatttgaattatacccgcctgaacaccctatgtgacaatctatataatacccggtgtgacatgccaaaattttacacccctgaatctaaacacaccctcagatacagaaattgtgtaataccaccatgtttggtggagcttcttgaaagtaactgtatagaagcggaatactttgtttaaatttgtgttcaagtgatactggtgcactaaaaacaaagtaaagaaaaatcgggcaataatatcctcatccccaagttattaccggtatagaacaaaatagggagcagcaagccagcaatgatgctaaatagaactgttccgtaacatgcggggagagaatccccatccgctagaaaatcgatttggattgcattttgcgctcggatcttacggacaaagagtccaaaataaaacgaagagagggtagcccgcagtccgcaccacttcgtcgggtctctggctgactgggctctctgcggcgtccgtggactgtgggccttttccattccgctttagagcccagctacttttggccgaggcccgatccagtccagcacgcgcgcctcctcgccctcgcgtttcttctcgttcgagcgctcgccacaagcggctccacttctccgctggtgcggcgacggcgacggcgacggcgacggaggcccttgcgccggagaagcccatgccgcatctacgtccgacagcctgcgaccaggtttgtttcgtgcgttgtttctctgtacgcgtgtttgcaatggcgtcggcgtcggcggtttggttgtggtgggtgttcgccacgcgtgcgcgcggtgtgttcgtggaaatgcccataagaatgccatgagcctgcacttgcacatgcaatcggaaaatcgccggtgttagtttcaacgatttagctaggagaatgattatgacgcaattagctggagcgcatcatcggattgccatacttttttgtggattatggggatctgaactttgggttttgttcatggttccatcatgcaaataggggtgtattattctactactctttgacatggcatctgtatggtcaattgcacagggggagtaggagtggattagttttcatcgaatcatccgttgatcggaaaaccttgctcagcaatgtttcttatatattttatttttttctttcgtttgggtttttagggtctggttaaacaacagatgccatacaatatgtataatatcgtttagaccaataaagtttatcatgcatacaaaattttatggaatctcaatctaattaggaatgatagttaaaaacatcagcaaacaagcttagataggaaatttaatggcaggttatggcaaaaacagaatagttggatttggacaatttaataccaaacgtaattcattacaattataaagcatatccagggctatacaactccgatcacccaaacttaagacttgtttctgattatgaccatagactttttgatgcagccatgtttctaggcgtccattaggcatatattgcaagatgattgctttgtattctaaaccttttggatccaaggtggaacataaggtgatgactttaataagattgcgatgtcggatgtttttcaaggcttcacactctgcaataaagcttgttggtcctccgtgcctattgagattgaagaccttaatagctactagatcaacctcaaactccagggtgcccttgtaaacatctccaaaggatcctgaaccaaccaagttttcagaagagaacccttttgttgctttgacaatatctttgtatgaaattatcgtcatatccatgttattgtctgtcgatatttgatttcttctcttcttttcagcggacagtgagcaaacatatcagtgaaattactacaacaattgcagcaactggaaccactatcattgaataatgaactaatactttgttcttgtgtctaaatgcaggacaatgaggaagccctaactctggggttgggccgtcccttggtagggccccaccctaacggcccaatgagagatacccaagcccgcagcagctgcagcaccgttcgctccgagagtggctgcgcgggagacggcgcgctacgagcgtgagaaaacgaagggttggtttggtttgtggtctaaataggccttaccaaattttaccaatgctaaattttggcaagttttagcatgactaattttggtaaggcaaagttgtgtttggattgaagccaaaatagcctaagttcactattgaaatggcctattttcttaggcatgccaaaatttggcttcaaaccaaatagacacactattgaaattgccaaatattgatatccctaatttaggcctaagccaaaccagcccgaagaagccgggcccactactgcccgaggttcgcacgcgggagggagtggagcgatgtggacgcaaggagaatcgagcacgtcggcccgaattcgcccggagcgcagcaattcgccatcatctttaatttaccccgatgctataatattattatgaagtattcaaattactccggatcttcactaatagttgcatataatgttataatttataatataaacatgtaagtgtaacttacgtgcccttacccttatgatatgttatttccgatggtttattcaactaatttcattttttttattttatagtgtctcggtagagtaccgatatcatttttgtttctagctctaatgtttcaattgtttccgagaaaaagatctacttgggaaacgatttttagatctggtttacaacccctttaaatgattcttagatccggcttacaacctctttactaccggttgtagcaacccagttagcaagtgaaaaacatatgtggggtgtgagaatcgaactcaagaactctcaccttagtcctcacgcgtataaccatcccacctactacacacaattgacttgaatagatatgctttccttttgaactaaccctcgagacatctttattaccggttggtaacacaaatccgaactaaagcgatctttagtctgggttggtgttaccaaccggtactaaagatgcattgttagtactggttggtaataccaactgtgactaaagatgtttatagggatttagatttttagaaccggtattaaagatactttagtaccggattttaatctaaccgagatatttttgattttgggtatcacgtcgaaagatcaattctctggtagtgaatacggtaaaagaaatatagtttcagggtatggtacgccgagaattggtggtgtacattgatgatattgttattatccctcagctcgaggaacaacatctcctgaatctgaggaaagcattcgcagtataagtttcaaatgaatcctttgaaatgcgcttttgttgtttcggctggtaactttctcgtattcccgtcagaaggggatcgagaaaattaaatataaactaatggtttgcggcatatttttatgcgggtcttagcaaaaaaaggattgagttatttcgagaaatatattaaaccaactccaatccttttaccaattaacatattagaagatttcacaaaaccattacgcttagttttcgacttttcgggatgtggagaagattggagtagagaaggcttccttctgggctttttgatttgagtgtcagggcttttcaacgactagaaagctctctatgacggcggctaagtcgaggagtaggcaggcaagagtgctttttttgggctcaacctgtataggtactgtgtaaggttagctctattgggcgccgcacttacttattgtaaagcatgcgccagaatgcccagacataaactatatatgataatatggtttttaacaaacttgtctctctttatattctaagaattgtccgtccttgtcattttacttcttacgtgggatttatagacaaaagttagcccggattactaaagagctttgttgcgggaaaaggagggatttgctgagttcaaaagcaagagtacgggagtatttttctggccattttcgtccctaaagacgcatttgcgcatggcggccgaaacagctgtgtatagtacgtactgcacacagttgctgcctccgatcgaggggccgacgacgtcgtcgtcgtcgatagctagcgcagcctgtattagccgcggccaatgggaggccggccggcgagcatgggggagagaggaaagcttgtattcaccgcgtgctcgtgctactggcatcgaggcgataagaacctatcaggaagaaagagacaaataaggaaaactacaggatcgacgtacgactgtgtcgatcgagtctcagctttgcttctctttatgtactgtatgttcttttctgcaagatcgacttggaatgaaacacctagcgtcgtaattacattacatgagtatacagtgtgccgttcgttcattggtaaaacatacagctcgattcaaaaaccagtgactaaataagaagctgcaggattcgacagtacaagctatagctagaagaagcaccaaactgtctcatttccaatgtgatagcctgcatccatggtacgtggtactccttcagttataaaatataagcatgtctaggattaaaaataacataaacaatttctgaaacattgattctgatacatagaaatacatacattttagaatctaagcagttcaaatttcaaaatttgatcactatggtaactagaaaggagattctgtctcaactttaatatttaataaataaactaggtagaaatcttatattttaaaatagagtaaccaccaaccggtcatttattttttatattaccaccactacacaaaacatcaaataggtatcggcactatatataggccttttcctatttccgcgggttgaaatcgtaaaaaaaacagcacctttaatcaattataagtaccggttctaaatcaatgagccgaccggcaatcagatgagccaaccggcaggccccaccacaacaaggcgatgaggagataaggtttgatctcgcgtctctctcgtctcgctctcttctctccgtctccctcccttctctctctctctatctatctatctatctatctatctctctcgctgctggcggctggccgatggaggcggcagcggcgaccatcccctccgccagatccggcgggaggggaagcgacagtggggtcggcggtaggcggggcggtgtcagcggtgggcgggggcagcaggctcatcgggggtaggtggcagtaggcggagggctcgccagcgggaggcggtgatctaccgcagggaggagccctcccctccgccagatctggcgggaagggtggcggcggtcggcgggctcgccgacgggagacggcgcgacgggaggtggcgcgacagctcgaagatgaccaaccatgcgacggcgatgatggtggatctaaagaggtgtgtgtcgacgtttgatgtctcgactacggtatttggacagtacgaggatcgttggtgctaggatatacgcgagactgagataaaaaagatggagacagggatttttatacaggttcgggcccctgagttgtcaggtaataaccctacatcttgttggccgaagccggtattgctcttattcaccataatcacaccagtacaatatgtgggtagcctatctaactgttgtcgacatggcggtctgaaggtctgactc

SEQ ID NO: 12401 - DNA, 1315 bp, Oryza sativa
attggacattgttacgagacacttcgttgattcaggtttgggactatcaaacgaagagctgtgttcaacggcttgaaggacatgcacataatgtctctgctgtttgtttccatccgaagttacctataacacttactggctccgaggatgggacagttcgcttgtggcactctactacctacaggttctcttgctctctccccctataatagaactcataggatacttcatgcatagtttgaattttgagataaattcatgtacttgttactctcatagatgtgatgttctattgatggcaataaaaactctgttcggtggcataaaatctggttcttaaataatcattggtgtgtcatatctattgatgaccttacaagtgtagtttctggtctccatgtccttgtttcttttggaattagtttgtgcatttagtaatttattatttagccatgtaattttgattgatgcagcattacagtctttaatctagatataagcttttgagtgaaagtgttacatttacgcctatagcataagtttgtattacaactcagtcctattttagtaacaatataggtcaatttacagcttgaagtacgactaactaagaggaatattttctattaaccctgtcctgactggtatcagacctggtagtgatggttgggggttaaactaagagaatttggagttaatggaaacatgaaaatattcaactatactacttcctaacaattggtgatctctgaagtgaagcactgtgtccagagaatttgaagctaccattttcctgtggtgttgagaacaaggagattctcttgccatattatgaaactacttcgtccgtttcataatgtaagactttctagtattgtccacattcatatacatgctaatgaatctatatatattataatgtctagattcattagcatctatatgaatatgtgcaatgctagaatgacttacattgtgaaacggagggagtagcattctacaccaggatatagataaacattttttgaggggtgcgaccaggatgcacatcacgcccatgccacaaacgttcactttcgcgtcgcagtttactatatatgcttatgcttagttggcacctggcaagatattcttatctctgtgcattggtttgttcttttctttttcttttttggaagactgctttggattgttccatttttgtcaatcattgttttaggccttttattcttactgtagacaggaataacacgttgcttgtttcttacaggcttgagaacactcttaactatggccttgagcgagtgtgggcttt

SEQ ID NO: 12402 - DNA, 1210 bp, Oryza sativa
cagcacaattcaacacctccggtgagtaaaatgtctattgtaaaccaaagctcttcttccaaagaaacctgcaaggatcagaacttaaaggaaacaagtcaaagttaacaaagtctgaagaaccgtttgccatgacagattcaaaatcaataaaagttgcacattctaatcaaacttcacgcaatctaaataatgagctatttgaggacagcacaccttttgctgttaaaagtggtatgtctgaaccacctgaaaatcgatcttctgaacaagctttggatttggctgaacctgcctccagtgatttggcctactttcagactacagctgtaacttcaagctcctcaaaggcttccggctctcagagaaggaaacaaaacttccacgttgcaaaaacttcaccaattgagtctgtctcttcatcaccacctagaatctctaacaatgacaaggtctcccatgacaaaatactgggaaaggaggatctacatgtgctaatacaaacaacatgcagagcttggtaaagaatactgaagttatagtagataatgtcggcaggccaggaagtcacatgagagcatgcttgctagtgaacctgttatgaatggtttttcacaagggaactctgataaagataatgaattgcctcagttaactcaaggccatgcttccaatgggattattcggggaaggagtttggatgatgatctgcagcatgcatctgggaggaaagattcttctttgaaaagctccaatgcagctagaagtcatacccacttgcattatgttaataaaaataacttgcttactgatggctcttcaatccaacataggatggcagtcttggatactaaaggtgattccatggtacatgaaaacaagagaagtgttacttctctccaagacagaaatggatcaactcattacccaccagatggaaatccccaatcagaggtgtcattcggaaaagaaaagtcacatcccaagagcaacaagcatgatatgcagaattccaaagcccaaatgctccctcacctctgaaagaaagtaaagtggaatcccactccgctccattaagatctaatgcatcaaaattgacagcacagttaaagcggggcaatgttgaaaatggagggcaacatggcattacaaaacaagcaatttctaatcctgcagacacttccagtccagttaggaaggataataactc

SEQ ID NO: 12403 - DNA, 583 bp, Oryza sativa
ttatatacaatggtttaagatgccgattctctgtcccctcgggtttctcgaacactgcctattctggtgacaaccaacttagccgattcctcctccacctcgtcgacatcggcgtgatcgatcccgaattctgctggcagggtaaagaccatgttaaccggtgccgtcacaacactcttcccttttgccaacctctttgcctcatcggctgcaacatcatcagctacaggaacctgattcttaacacgccactcctgccttggctttgctttcttcagccgatgatttatttcttgttcaacctcctgaaggcgctccctgttactcaatctttgaacccttctcttctgattcttcttgaaaataccagaaggacaccattgattcttcctgattacattgtcctcttggccatgatcttgatttactggacccaatctttgatgaacagaaactcttgtctgccttagccgattacccctattatatgatcggcttgagttctcgacgatgtcactacacccagggcagttttcaatagatggcaacctcataccttcattccagtagaatctaaagaact

SEQ ID NO: 12404 - DNA, 621 bp, Oryza sativa
atgtgctattgaagtttcccacacccaaaatgaatcacagtataaagatttgattagtttagcgtatatgttctctgctccatagttctctccaatgtagctataaactttttcgttgtctgctaaacagtcttattccacaatttgctcttcacagaaacccttttcttttcatgttttcattaacttcttccttttcaagttaatttagtgatacgggaaaaaacttgacttgtgcagggttgtgatcggatatgatgaagggacaataatgataaaaattggccgtgaagttcctgttgctagcatggacagcagtggaaaaatcatatgggcaaaacataatgaaatccaaactgttaatatcaagaactattggtgcagaaccaatgagggtttttcttgttcaccatgctaatatgttgaaaacttgaataactttcttatacgtcttggttactaacctgttccattttttcagattgcagatgggtggaagcgcttacccttggtctggaaaggaagttgggaaaccctgtgatcttttatccacaaagtaagttcatatttgctattcaaacgaatgcatcattcgcataattgatgttttccaatagaacc

SEQ ID NO: 12405 - DNA, 1035 bp, Oryza sativa
tttcggatatattccacctgcagtaggaaatctgagcagcatacgcgatctaatatttgcaagaaataatttctttggacatattccatctaccgtaggaaatttgagcaacctctctattctaagctttgcacagaataatctctttggacatattccagagttcgttggcaatcttgtcaaactaaccaatctttttctacatggcaacagcttcagtggaagcataccttaagtttgagtctattctctaatagcatacactcttttataatttaaaaaataccgcaaaaacaatatctttctttaatagctttgctaccatgctattctggtagaagacactcaactccaatgctctctccaattcacattcccaacatagagacaaaggcaggcctactattgagacaaggtgcactactgattcaagaaatactggagacaatctgttgtagcaacaaagatgctttaagagtttgcaagtcgcgtggctgatagttttaaggtcatacatttggtccatctgtcaatatgggagttgtaccaatggtgtcataagttgtgatgtattgcatatagaatatagaagaaagtctacttggtcttgtgaactttggtgatccatgacatgtgggaccatgacaagcatgtattgtgaatttgtgatatgatcatatgagcagcaaatcctcaaatggatcaatccttcaactgtatgcttccactgagccaaggatcatatagcaaatcaggaacagtggcggagggagctgggtacatgtaacttcaatactgtacacatgtacacaattatatactcaaataaaaatctagctgtccaagggagtaaaaaattcatttgtattaatctatatcatatgaactagtttgataattcgttgataaatgtcactattttctaatcatgccacaaatcgggccgccactgaccaggaactagaactaacacaaggataattttggtcggtgtcgctagctctctggcccctattgtccctagaatgaactgat

SEQ ID NO: 12406 - DNA, 3013 bp, Oryza sativa
tgtcttaacatctcgcctgttaaactcaattttccatggcggtcggctaatcgccagtgaaaatgcattattttcactggctttagttcgctcgcggcaccgtcggccgccagcaaaaaactattttagtcactagcaaaaatgattttccacgatatagattgaaagatgtacgcacgtatttggttgagacaagaagggaccagatcaccagatgggacaaagaaactaagaaaactgaaaaaattaagtacaggaaacgcgacgtgcacatacgtaccgcttgtgccacgagcatctttaacgtattaagcaggaacacccatgtgtggacgcggatgacatgttgctttacgcgagaattgagatagatgcgggcatgtgggattcggtatccatgtggtaattcgacaacataccgagctttggcaaaaacaacttatatttttataatggcaaattttgctacagaacatcgtgacttcgtggtattagctgtaagataacacacgaagtaacttttgggggaagacactctataaacgtggtaatttatcagcggacatcgcactcattaaaataataatttctgattgaagagaagagaaaaatcacgtgaaatatcagaaatacccctggacccatatgtcaacccttctctatatatgaccacctcgcattcttcctcgaggtgcctgaccccttctgtcgagcttgacccgtcggccacgtcgcagcgggaggtggaggaggggcacgaggaggagtttcgtgctcaaccaaccccctcaagtcgccgtcttcggccgcagcgcctccgtgctcccgctcgccttcgtcctctttgttacagcatatgacgcagacggtcgcggccctcaccctcacggcgagctccctggtatcgcgctccttctctgtccttggccactagaagaagtggcggaacaactccctctcccgcccacccgcattgcttcccttcagcggctgcgacctccacgaaatatttttataatggcaaattttgctacagaacatcgtgacttcgtggtattagctgtaagacaacacacgaagtaactttcattctcctctttcacagaagggatagagagagaagagagatgtgatagctgacatgtctgggtccaggggcatttgtgtacactttatactattcttctcttctcctcaaccaattaattattattttaatgagtgcggtgtccgctgacaaattatcacgtttatagagtgttttcccccaaagtcactttatgcggtgtcttatagctaaaatcgcgaagtcacgatgtcatgtagcaaaatttgccttttataatagataaaggttgagagaatgcttgtaaaggaaaggattcgtgtccgtcgtaatatgaccgttgagggttttcggcttttagggccgatttgggccctgtcttatttaatccatggaaaatgttcacttcaatccatagaaaatgttcacttcagatcctttaaatataggcccaatttgaatcgtatctctcaacgaccgttgaccctaaaatttctcttgaaataaatggagcgtaaagtcggcgctattatttcatttagacaaaacaaaagggagctaccccccccccccccccccaattgaagggactagctaggtacgcaatatactctgcagcatcaatgtggggatatatgagaaacacaaataatctgttgaattttatttagtattgtataacaatggttatattgagagaaataagattctttagaagcttaatttgcctctgaagattaagatctttatgtggtacttacttaaaggggtagtgttaactaaagataatttggcaaggagaaactggaatgggagtttgaaatgttgtttctgtatgaagaatgaaactattcagcatctttttatggaatgccattttgcaaagtttatttggagagctgtacagttctcttttggtctttaccctcctaatagcatatctcatattttttatgattgtcttctgggggtggacaagaaaaataggaaacttattctcataggagcttctgctatatgttggactctatggttgagtagaaatgatatgatttttgacaaatcaccatctgtttatatatgcaggtaattttcaggacaacgcactggctcaggtcttgggcactgctacaaaagtgtgatgaagagggcgagcgtttaaaagttgtatgtcgtaattttgagacaacggttatgcaaatgtttaccaattttggatggagattcacaaacagaattcaataattgtgtactccttatcttgggttggtaggtgtcttctttttttatgtgagaaactttttattttgtgtgttactctgtaataattggctgtagctcgttgagcaaaggctgggatattctattccattatctaaaaaaagtataataactatctcataggatataccccatccatttctaaatatatatataggacatgttcggttgtgctttgcacacataaaagtactgtactgcaacacggtggcacggtgcaaataaagacagccgaacacgccaatagagtatggaaacttgtattacaagttagtaaacctaacctccagaattatatctggagagctttattttatcttgataattcgtatttttactcttattcctaaacgtagttctaacacctggatcggcctgcttagttctaatcggttcttgggtactctcatagatccattgtctagcctttatccattgttgccgcgtccggaagagataggaggatggtgttcaccgccgggacctgaaatgaaattagattctaggcatcaaaccaaatggaactcaacatatggtgctacaagatatgcccattattttgaggaaaaaaacacagagaccgggctatcatctattctaactattgctaaaattcttttaccaattaaattgctactttctaccgatcatgattattcgacgttg

SEQ ID NO: 12407 - DNA, 4229 bp, Oryza sativa
gtggtgacgcccgtgtacatcctcaaccgctcgcctaccaaggccctagacggcaggacaccgtacgaggcttggcatgggcgcaagtcgacggtctcccacctgtgggtcttcggctgcctcgcgttcgccaaggagcttggccacatcggcaagctcgacgataggagcacctcaggggtgttcatcagctacacggagggctcgaaggcctaccgcattctcgacccggagacacagcgtgtgcgcacggcgtgcgacgtagtgttcgacgaagggcgagggtgggcatgggacaaggcggtggacgatggttcgactccaacatacgaggacttcactgtcgagtacgtccactttgagggagctgggagagtaggcagctcttcttcaccgagcgtgtctaccccagtccccgagccaccaccgactcctacaccgacacaccctcgagccacgacttcgactacaacgagctcttcgctgacaccaccacagccggcgaccccatgcactccagcaccaacagccactcttccgggcacgtccactccgacgccagctcgcgttgagcacagcccagtggagtttgctactcctctctcccacaacgaggagcgcatcgacgcgtaccacgacggcgagctgctgcggtaccgtacgatgaaggacctcctcggcgaccagctagtgccgggactggtgcctcgcgacctggaggcgcagttgcaccttgcgtgcgacgacagtgagcctcggtctttcgtagaggccgagggacacgcggcatggcgcgccgcgatgcagtcggagatggacgcggttcaggagaaccgcacctgggagcttgctgacctccctcgtggtcaccgcgcgatcacccttaagtaggtgttcaagctaaagagggatgaagccggagccatcgtcaagcacaaggttcgcttggtggcatgtggtttcgtgcagcaggaggggatcgacatcgacgatgccttcgcccccgtggcacggatggaatccgtgcgactcctccttgcgctggctgctcaggaaggctggtgcatccatcacatggacgtcaagtcggcgcttctgaacggtgagttgaaggaggaggtctatgtgcaccagcagcggggtttcgcgatccccggcaaggagggcaaggtgctacgcctgcacaaggccctctacggcttgcggcaggcaccgaggagcacgactcaaggaggatgggcttacgatgcaaagcccggcacgagcgcgaccatctaccggcagggcaatagaggaaatgccttgctggtgggtgtctacgtcgacgacttggtgatcaccagcaccaaggatgcggaggtggcgacgttcaaggaagagatgaaggccaccttccagatgagtgatctggggcctctctccttctaccttgggatcgaggtgcaccaggacgactccgggatcacacttcgacagaccgcctacgccaagcgggttgttgagttggctgggctcaccgactgcaacccagctctcactccgatggagactgaagctatgccgcgatagcacgacggaggaggtacatgctacgctgtaccggcgtcttgtggggagctgtcgctacctcacccacacacgaccggacttggcattctccgtcggctacgttagtcggttcatgcagcgaccgatgacggagcatcagcaggctgtgaagaggatcatccgctacgttgcggggactctcgaccacggtctctactacccgaggtgtcctggcaaggcacacttcgtcgggtacagcgacagcgaccacgccggcaacatcgacaccagcaggagcacgagtaggattctcttcttcctcggcgagtgcctcgttagctggcagtcggtcaagcaacaggtggtggccctgtccagctgcgaggccgagtacatagcggccttcaccgcttcgacctaggcgctctggcttgctcaactgcttggtgatctcctcggcagagacactggagcggtggagctcagggtggacaacaagtcgctctggccctggcaaagaaccccgtttttcacgaacggagcaagcacatccgggtgaggtaccacttcatccgaggctacttagaggaagggagcatcagggcgagctacatcaacaccaaagaccaccttgcggatttgctcaccaagccccatgggaggatcaagttctttaagctttgctccaggattgggatgacccaactttcccacgagacgacgcacaagacttagggggagaatgatggaataagctaggtctttggtctttgtggtccttcccttacttttaggttgtttttctcctttttaggacaacatcctttcagttttgcttttagcatctttcagttttacttttagcatcttagtacaacatctctgctagcatctactttatgctttatgcttccaaatttcgaattttagactagcttccagccatccagccagctatggctatatatatatatgtatctaacctcccccgggacggcatggctttgagtttgtgaacggaagaaaaccagaaaattgccccatcttgggtgccatcctcttatcaatgagagtaaccattgaaatactaacacaaaagaccctatctcgcctttgtgcgtatttccatatcgcgcgggacaaagtgacggtgcaagatttcgtgcgcgcgtgccgcacgtgccaacagaacaagacggagcacctccatccagccgacctgctgcaatccttgccggtgccttcggcggagtgggctgacatcgctatggacttcgtcgaggggctcccgcgagaacatggcaagacggtcatcgtaacgttgcccacttcatcccgttctcatccgtacacggcgacatcggtagcagctgccttcttcgcggagatcgtctgcttgcacggtgttccggtctccattgtcatcgaccaagatccagtcttcagcagccctttttggcgtgaaattttccggttggcgggtgtgcagccgaatctttcatcagcccttcaccctcaatccgatggccagtccgaggtgactaacaagatcatcgtgatgtatcttcgatgtttcactaggaatcgtccgtgtcaatggcttcgatggcaaccgtgcgcggtgtattgctacaacatgtcgtatcagtcatcacttcggacatcgccgttccgcgtcgtatattgtcacgagctgccgacgctgcgtgcctacgatccgagttcatctcgtctgcccgcagttcaacagacgttacaggagcgggatgacttcctaagggcgtttcgcgatcgtttagaacaagctcaacagacttacagtttcgcgatcgtttagaacaagctcaacagacttacaaggctgcgtatgacggcaagcatcgtgcattggagttcagtgtgggcgactgggtttggcttcgtttgcttcaccgtccgattgcgtcaatcgctgtcaagggacgcgacaagctgggatgcattggcattggcgctgtggcgtatcgccttcatcttcccccgggcactcgattacttgacgtgtttcatgtggggttgttgaagccatttcacggagttccgccggagctagtaccactgttgccacccactcgtcatggtcaagtttgtttacagccggccaatgcttcctagagccgtttggcgcgtggtgttcgcgaagttcccattcattggaaggataaaccggcagctaaagcttcgtggatgtcgctggatggatttcggtcttggtatccagattttcaactcacggatgagctgcttctccagggagggagagatgtcatgtggggattatagtataaacgacaccgcaacaggagcagcgacggcaatgcgttacgaggaatagtgtgtggtccggtttagagtttgttagggagtttgttagttctatatctcttaagttgctaggattttattccttagatttgctttaaatttgtaggtcaattcaattgagatcagatcacatctcctgtatttcctgcctcgctggtgtggtgccaaacatggcttcgccgcgctgacaaggtccagggccatgcccagcaactgcgttcaaatactctcttcgccgcaatcccccttccaatctcctcgcccgtgacatcttgtccgtgttcaatctattatcgcgttgacttctatgcgctttc

SEQ ID NO: 12408 - DNA, 9341 bp, Oryza sativa
tgttgttttcaagttttaaccatgtttaaagcatatgttaggaaagaacaccctacaggagcgactggcggcggggagggcgacggcgatggcaggggcacgccgcgctgggcggcggtggctgaaggtggaggggatggcgatggcggcggggacgaagtcggccgagggcgtggaggcggcggcggcggtcccgtggcggcaacggcgcggtgcccagcggcgacggcggcggtgtcccccaaatccacgcctctcggccggatctagagggtggctagcggcagtcgcggcaggtggctgcggtgtcgactggcgacggcggtggaagacatggcgtcgaggcggctgctagctgctcggtggtggagggtgacgacgcagtggcggtttgtggaggcagtggctggtgtcggtggcagtggcgacggcggccatgactgtggaagcggtggtgatgtcggcgtcggggaaggagtcgggtgcgaggtgaggatggcgacggtgaggtggctgggtattcggcagcagcggctgtggtggtggtgagcgtgtctgcggtcaccggaggcatggcggcctcggttgactagccgagggcatgggagacggctgcatctggccggcacggcatcgttcggtggaggggtcggagactggcttggtgcaaagaagtgcagccgatggcaccggaggccggctcggcgcgagaggcgcgggcggcggagatggaggtcggcttggcgcgagaggcgcggccgatggagagaggccggattggcgtgagaggcgcgtccagtggaggaggccggcttggcgcagagaggcgcggccagcggtggaggaggagacctaggtgtgaggagctgccggtgggtgtgacgcggccttcggtgcgcgaaggctagctggcgggggacgccggtgcaggggtcccacatgtcggcaaagcttgtgtggtggtggagcatcgatgcgtcagccgtggtttcgcaggtggtgagaggcgggtgaaaacccagtctagccttggccagaccgacaacgatggttattccccctcctgaggcgttgttgtgctgtctctctcctcaagggtgattgctggtcgaaagcccagtcttggctcttttgagtcccgacggatggcggcggcggttcttccgtatggcgcgatctcgtctgtgtctctttgttggtctagtggcggtcggtcacgcttagcggcggccggtccggtgctagtcttttcctgggcttgtgtgttggcgatgtcggtgtgtgggtggtggtatatttttttctttttcctggttacgaccctccatggttgtaatcttgtaattttttccggctctatccatagaacttcgcaccgtctcgtgcgagtcgttcaaaaaaaattagtggttagactacaaggtgaaatgagcaattgccccttcttatattggaaggaacacactaaaagtctaaaactatatactctctctgttacaatttacttgtcatccaggcaaataccgtgcaaaccatgaagatgtgaaagattacatggttacccttgtcaaatagtactccctccatactcataaaggaagtcgtttaagatagcgacacggtctccaaaacacaactttgacttcttgtttctataaaaatgtttattgaaaaatgatatacgtatatttttatgaaagtatttttcaagacaaatatatttatataatctttacattttcaaactcaacaactttagagttattcatgatttatattcccaaagtttgacttgaacattgtcctaaacgacttcctttatgagtatggagggagtacatcttaattaattatcttttcaaagcagatgagccaattatgaccgcatcaatatgtattgctacattactataggtagggagggaataatatcaatcacctttaaaagttctttggatcgtgaaaacgacaaataatttaatacaaaattaaatcctagaacgacggtgatgagcaatatgaaacagaaggaagaacatgaataagcagtgcacattctagttgttcatgcctctgcttaaatccttccatgtcctttctccatttgagttatgcatgtcccggcgacataggaggattgtgtcccccgtttgggccgcctgaaatgtactcatattaagtatggacttgaagagttggagtgacatcaattccaattaatcgtatgtacaaaagaaaataatattcactctggttaaaaatacgcgtccttttggttttcaagaaaggtaatgtattttctaatgtaaaatttagtatccttaagtacatcagttacctagagatattagatggggataaacgaagacgatgacctgagggagagaggggaccgacctgagaggtgatgagcagcaagcggccaaaagctccattggatttgtaccgtcatctaggtttggagcccgcgacaacagcgaggttgagcgaagaacggcctggcaacgtacggctctcctcttgtcgctgcagccaccgccttccttgacgtctgttctgtcaccaccggcgtttcttcgatggcggcggcaatagagcgcgcagcagcagctgttgacaatggcgacgaagaatgcaatggcggcgctcagcaatggcggcggcagtgtaggacgttgctggggcagtgctcggcgatggcggtggcggaggagttggaggcagaggtggcagtgcgatgaggaggcgtaggcggcgcttggcggcaggggggggggtgtgtggaggcggcggcgcgacggggaggcggcaaaactagcgacagggacggtgtgaggggaggtggaggtggcggcgcgggagaagtagagggagtgggagtgggcggcagaggctgttagagtcatatttgtattgggttcggtttcctaattatctcctgattctgttcctataagtcgggtagagatacgggtccaccgtccctatatatgttctctatccatgatcaatctattatcgtgttgacttatacgctttcatggtatcagatgcttttagcttcggcctccaactctaaatctcgcaccgcgccatgcgctcctctgctgtgcacgcttctgtcgccgctgccgcagccgccgccgccgccgccgccgcatggctcctttgccatggccaacaacgctccccataccccctctcccgcaattgaggccaccacatctgtcatcaccaaggcagttcgggatgccttccaaccctcatctagggttaatgtcgacctagccatagccgcctccgtcgtcgacacggcgtccaccactgttgcctgcgccactaggaaagcccttgcctctttcatcgagaagctggtactgacacctccatcgccggcaacacccaccacggcggcaactcttcttcctcggccgcgactgccaccatgacggctgcgacgatgtctgccaggctcttcaccactgcccccgcaggcacgacactgccgccgacctctctcccactaccgccggagctcacggccatccttgccaccgatggcctctacggcacctccgacgcctttgcatccgctctgcctgctcaggacgtctctgccttcttcatcacgcccagcgctacatcggcaacactccctctactgggtcttcctcctccggcagccggtgcaccaccaccacctcctcccggctacggtggtttcatccctctgatgaccggtgctgctccttctgcccctaccgcctagaacttctacaacgtcgacctcgacgacgacgccaccgccaatctccacgctcaggcagtctggtgctgaacatcaagtctctcgtgcccgtcaccctcgatctcaacttcggcaatggtgtggtctcatcctcgtcaccctcgagaagtacgtgctcgccgatcatgtcctcaccaacctctacaggccggatcatcaagattggatgcgcatggactgcgttcagggccggccctaggcctagcgggttgtgcgaccgcccaggcccagccagcaggggcccatcaacccccacccccaccccattccccctcctgctgcacaggccttgcaggccaccccgcagcccagttggcgtagcgtgtgcgatgcaattagtagggaaggagagtaggagatgcgagagtgcgacgtaatcgaagcgacgcatcatcgcgccggttcgttctctgtgcttgttgttcctcctgacgatagccgacgcgacgacgtcaacgccaaatgatgcccccacacagtgagtccgcgacgcgacgccgacgagcgagggcaactgacgacggcgtgaccgcaagtgtgatcagtcacaactccggagtccggaatctctactccggcagagacggcagcagcaggcgctagcgctcccaacgccctagcctccatccaggcaggcagccagaaacctaatcgtgactggtgaggacttctaatgatttgattttctcttaatctcatttgcctctaaccatctatttagactgtgactggtgaggacttctaactaggttagggttttgttttgtgcaaaaattaggttagggtcttgttttgttcctgttgatatagtgcaataaacttctaatgatgttcttgttgtttactttagttggaaatttcaggcgtcagaatgttgcgtcagaaatgcttgaagcagagatttttatgagaggtattgtatatttgcagtttcatatttaaggtattaataatcatactattttgtttctacaattcttttagttgtttattatactatcagcaatatttattaagaataaaataccatatcgcaatttgcattgtgtaatttactgttcagtagtgtttattaatgtcactttataaaaaaaaatgatttatagagtatatattacaaataaaaaaaattagggcctatagcgtcgagtttgcctagggccctcgaaattataggaccggccctgactgcgttgtagttctgtggctctacggcaccatctccatcgacttactggagtccgtgatgacgcacaacaccacggctcgcatcgtgtggcgtggcctcaaatatcagttcttgggcaaccgcgagtccagcgctctcatccactccaccgagttttacatcttctaccaagatgatttgagcatcaacgactactgctgcctcttgaagaccatggcagatgacttgggtgatgtgggcgaccgcactctttccctaactgcaatacaagatttgaatgaaaaattcggtcaccttctgctcaacttccgaagtacatgctcaacttctgctcgaagatctgacgaagggtcgtcctcgctaagcttctactgctctcctcgccggcactggagaccgaccttccacttccggggggggggggtgccgttaggaagcaagcccgcacactccactggctatggcaacgctggaaatcgtggcaacaacaccagtcgacatggaggtaacccgcaaccgtcgctgcaacaacaacaacagaggacaacagcagcaaccgccccagcagtaccaaccacccagtagcagtggccagtcagccaattggccctcggcactcaacccgtggaacggtacgctccagatgtggccggcattggtcgattttgctccttcccgcgtcaactaccctagcctcctccgtccaccgctgcccaagaacacgcgcattgtcaggggcttcctcggcttggcgggctactaccgttgtttcatccgcaacttcgacaccattgccgcgctcctcacagcgctgctgcggaagtaggactttcactggactaacgccgcgacatcggcgttccggcagctacaacacgcactcacggcagccccagtcctccagctcccggacttggccaaggagttcatcgtggagtgcaacgcgtcgggctccggcctaggcgctgttcttcatcaaggcaccggcctggtggcattcttcagcaagctgactgcgtcgcgccacgccaagctcgctgcctacaaatgcgagttgattggcctcgtccaggcggtccgccattggcggccatacttatgggggcgccgcttcctcatccgcacggaccactacagcttgcgcttcctcttggatcagcgtctctccactgttccacagcatcagtgggcatgcaagctcctcgggtttgactttggcgtgcagtacaagtcgggaatggcgaactttgtggcggacacgctctccagacgggacgaacacctagcggaggtgttcgccttatcggcgccccaattctccctgttcgatgagctgtcccgcgaggtagcctccacacccacccagttccccattcacgaagacatcgccaagggtgccaaaccgccagcctgggcgttcacagacggcctcatcacattcaagggctgcgtcctcgtgccgctgtcgtccgcatcattgccgaccatcctcgagccggcgcatggcttgggacctgaaggaacacaaaatgatggaataagccttgtggtctttggtctttgtggtccttcccttgcttttaggttgtttttctccttttaggatagcatcctttcagttttgcttttagtatctttcagttttacttttagcattttagtacagcatctctgctagcatctcctttatgctttatgctttcaaattttgaattttagactagcttgcagccatccagccagctatggctatatatatatcatatatgtatccaacctcccccgggacggcatggctttgagtttgtgaatggaagaaaaccagaaaattgcccatctagagtgccatcctcttatcaatgagagtaaccattgaaataataacatctggtatcagagctacactttcctgtagactaaatatctcgtgttcctccccttcccaagttcgagggagcattcagccagctgctgcagcagcaccggctgctccttcccctttcccttccacttctccaagaagcagcccccggaggcgtgccatgtccgacgtacggtctcggcgttcggtcgcctcgagccctcggcgtcaacaggacgtcgagctcgccgcagcagaagagcgcaggcgagcaacggctcagaccgctgcagcagcagcgagggcggccatattggcggcagcggagttggcagcggccagggcagaggcggaagcagaggaggcagaagatgcggcacgtgcggcggaggtagaggttgacacgttgcgcagcagcatcaatggctccatcgccggtgacatcaccgccgacagggagcttgaagagctggcaagaggaagggcgcgggagcgggcagagcggtgggcagcagcccaccccacggcggcggcggcccaagagaccgcgcgcccgccgacgggaacccgagcgggcgcgggcgtgccggcggcagcccggagcacgcgcgcggcgacggtgctcccagtggaggtggctggttcgacggagagcgcggccctcgcaggcaacgcggctctccctcccctaaccggcgacatgaccaccacggtgtccagacggtggtcagggaccttggtcccggtggtgggtggcctaccctctacaaaaccaactacatcgagtgggcggcggtcatgagggtgaggctccaggtgcggtacatgtgggaggcagttcagtacggcaacagcgactacgacgaggatcaacgaccgctggatgccctcatcgccgcagtcctacccgagttgcagttctcgctttctcagaagcggactaccaaggaggcctgggacgctatcgctgcggcacgcatcggcagcgatcgcgcccgcaagtccacactgcaggcactccgcaaggagtgggagaacctggccttcaagccaggtgaggatgttgatgactttgccctccgtctcaacactcttttgcagaagatggtgcagtatggcgacgacacctacgacgaggagagagccgtcgagatgagccacagcctctctcaaggcctatcaccactggggggagctccatctcactcaagagcagtgggaggccagccagggagacgggaggaagggggagtcatctcccctgacaggcggccgcaagccgcgcaaggcgcggggaggtgtccagctacggtgggcgcggaaacgcgccgagggtggcgcttgcagaggcacccaaggcggcgccgccggcaaccacaagccggcacgagacgacgcctgccgcaactgtggcaagcttggccattgggccaaagactgtcgacagccacgacgcggccaggcccacgtcgcacaggcggaggaggaagagccggttctgctcctagcacacgcaagcatcgagctacctccagcggcaccggccgcaatagctttcctccaccttgatgagccaaaggtactcctctccctctgcaacggctctagcgacgacaaggctgatgggtggtacctcgacaccggcgcaacccatcacatgaccggccgacaggagttcttcaccgaacttgactccagcgtccaaggctctgtcaagtttggggacgcctccgacgtggagatcaagggcgttggctccgtcaccttcactgccaagtccggtgagcacaggctgctcaccagaatctactacatccctgcgttgaggaactctgtcatcagcgtggggcagctggatgagaacggctcacgcgtgttggtcgagcacggagtcatgaggatttgggatcgccgtcgtcaccttcttgccaaggtaaccagaggcaccaatcgactctacatcctcagtgtgcaggtggcacaaccggtgtgcctcgccgctcgtcgggacgacgaggcgtggcagtggcacgagcgctacgggcacctccacttcgaggccctgaggtggctcagtgccaaggagatggtgcgaggcctgctgtgccttgaccatgtggagcagctctgcgacgtctgtgtggtaacgaagcagaggcggctcccctttccccagcagacgagcttccgagctaaggagcggctcgagctcgtgcacgaggacttgtgtggcccagtgacaccggccacaccaggaggacgacgttacttcctactgctcgtcgacgacctctcccgctacatgtgggtgatggtcctcggcagcaagggagaggctgcggacgccatcaggcgtgcgcaggctgctgcggaggcggagtgcggccgcaagttgcgcgtgctgcgcaccgacaacggcggtgaattcacggcgactgaattcgcgtcgtactacgctgatgagggcattcagcgccactaca

SEQ ID NO: 12409 - DNA, 2830 bp, Oryza sativa
tccaaacaggcaccgacacaccactgagcaaagattattacagagcccagttaaggctggcagtaagagactcgtggtatgattgaaaataacaaagcagtcagctgaattttgttccatacgaaaagtgtgaacatccatgcatgcttatgcttctaccatgctggtaaaacattatggtacactgttcacctattggcatatactcctacataatacaaaggtggtaaagatggaatgcagatctgttcatcaaattcagagtgatagaacaggggcctcaatccccatagggaaagcaaacacgatcttgaagaagcttccaaaaatatggactccttccatgttttatccatttgtgtttgtaggcaaaagctcaagaatttgacatcctcatcaaaaaggttactgctggaaaaacaatactacatgcacatgaatcctaagctccataagttgtcattgtggtaaaagctgtgctatactgctatggatgtgtcgacacaatttccgcccttaggtaagctggacaacgaggtttaggcagcagagcagtctggcagcttaacatcagaacaacctcctgcatggtgggccggttggcagggttctcctccacacacagcagtgctatgtgaatgcatcttagtatctctctcgtctccaattcatcacctgagggcgaatcgacaagcttgatcaatcttcctgttctccataagtgccatgactgaggaagtgggtaagaaaaacaaaaattctcatatagattggccattaaattagcacttggttgtgcaagttaataaatgatgacaggggcaccattaatattcaaaattcgagacaaatttcaaaaattctacacaccctcttgttcagaaatcgatagtcgtctccagaatctccactcacaagtgaaaagcatcgctttccactaatgatctcgagaaccaatgctccaaagccatacacatcagacttcgttgagaaaagtcgtctttcccgacattcgggagcaataaaaccactaaaatgtggaaacaaaaattaagagcttaaacaataagaaggataaaagagcccgctgggatatcaaaaattgtgatattgatctgataagttcttacattgaccccagtatgcgatcggcgtactcttcatctacacctggactataccttctagccaggctaaaatcggagatcttgggattcatgttggagtccagaagaatgttgcttggcttcagatctccatgtacaatatgtagtccgcagtgcttatggagataaagcagtccctcagctatcccatcaattatccgagagcgtgtagaccagtccagatgcaaccttcttgttcttgcacctataaaatggaaacacaaatgagatcattaactaagcatagtctgcacagaacttttgatccaaaattgaggtgaagtaatactgaacacatgccaaagatgaaggtatcaacgcttccaatcagcatatactcatagaccaaaatcctctctgttccctgaatacagtatcccagaagcttaactacattggtgtgctgaagcttcccaaggaagcaaatctcattttggaactccaaatcttggaaatccatttgattacgtgaacaaggtaactcaaaacatcttttaacagctacctcaagcccatcgtgcagttgaccctgactgcaaacaaaaagtgcagttgacctaaagaagaaaccaattatataataatgaagtttctaaagttacaacacattccattgtcgtttgatagctatgatttttgcaatatcctcaaagattaattaggatgaattggaatcacagtaaacacatgaataacagtaggaaaagcaaatgatctgtttcttatgatatcaaagtatggaaactgaattttgtgaagcaagcatattcattactcctccggacaagataaggtggttccttttttactttgcaaagtcaataagaagtcacttcaaccaattaatttttcttggcttgtcttcattgaagatgtatatgaaaaaaaataatcatgttattttggtaaatccaaattacatattctagatatatgtctcactaaaatgaatagaagatgattgaacgcaaatctaggatgacattttttttttctattgaagagagtaccttgtaaacacagccaaagctaccttgtccaattttatttccgtcggagaagttttctgtagcatcaactaactgggacaaatagaacttgacagaccctgttatgaaataaagagttttgggacacacaacatcattctatttggcacccatcgaactctattgtctcccttcattctactgtttaacgggacatacctgtacaacatgattgcagtgagcacctttcaacttcacaatgtgcttcaatcctgcggtggcaacattattgtgactatttacggaagaaaatgtagcctttggatattaaagatccatgtcgaaagggttatagatgccataaaatttttacatggatctttcactgaacaatttcacttaagtaggacactggaaaccatttaacaaaattctgaattatgtgacagactataattattatgtatctattgtggaccagagaatctgaagtctcaccatggatgtaaactaccattggagctttaaattcaaggaatgccacatcccactgagaaaaaatggcaacaagaaatgtgttcacaaatctcacctggcatcaggagggaagctcaagcaaccagtagaactagatgttgcataaacattaaacagccttggccccccttttacagc

SEQ ID NO: 12410 - DNA, 8181 bp, Oryza sativa
ctatgaacttgctcttatgcatatcgcctctataaataataacgacccagcacgaaacgcgggtataagatatgagcagtgtgcagatcgtttgagcagctagcaacaaattacaagagggtggcagctagctagttaggccggatggcgcggctgcagcgacgacgtctggtgctggcgctcctgcagctcgccgtggcgctctggttggcggctaccagcggctgcttctgccgccagccgccgagtccgatagccggcgtctcgtcgccgccgattctgccggacggcaaccggccaccgaagtcgcctccaggtgatcagagattcattttaccactacatacatacatacatacatacatacatacatacatgcatgcacctatacgaagctcaagctaaatttcaaaggccattaattgcgcgcatatataactaagcatatcaacttttatatatatatatatatatatatatatatatatatatattatcttccttttcaaatatatctgaataacatgtcgtttaattattcgtcttatttacaagaactatatgtaaatgacgtctatttcctcgtggcttgttttattataagaaatataaataacttgtattcttttaatctgtatttaatttgtgataatatgaatatccacacgccatcataaatataaattcaaaagcaaagagagtattcgttaatcttattttatgcgcgacataataataaataaatgtgacaatatactgacgcagttttgcttttcccttgttttgcagctcccgcatccgcacaacacatgaaccgctcctttcagccgggctgcccgccggattgcaccgaccagcaacgtcagccttaattagttatggactatcaacgacgtacgttcagcatatatactctggttgcaaacgtgttagtatgtactccactctgtaagttcgttccgatttcaaatgtaataatgcaaatttagcgcattgtattctcaactacttgtaagtataatttctattttactagtataaatgtagggccgagcgatcagattggtacatcttcaaaaacaatatcctagacttgattaattatatgtaaaaacgctcaaattaattactgcctctcctttcataaaagttacacctattacttttatccagtggcggatcccgaaaattggttcgttggtgtcatagcgtgtctatcggtgtcatagtatactaattatgcttagaacatgatgttatagtatatggataagcagttttgttattggttttgccgaaagtcgtcggtgtcgcctgacaccgatgattatactgtagatccgcccctgcttttatcaccaaaacttataagaaattggactctatgtcatctcccttccatgcatcgtgcatatgcaggctatgactatctcaatgactccaaaactgtacctggtggaacagtgggaaattcagcacccatatacatatccattagtttccttcaaacttccaacttttctatcatatcaaatgtttggatatatgtatggaggcattaagtatggatgaaaaaaaacaattgcacagtttgtatgtaaattgcgagacgaatcttttgatcctaattacgccatgatttgataatgtggtgctacaataaacatttgctaattacggattaattatgcttaattgattcgttttgcagtttgttttgttattagtctacgtttaatactttaaatgtgtgtccgtatacatcaaaatgtttttgccaaagcaactaaacacggccatatttggtttgccgttggtgtattgtgttagttattatatgcttatttttcaatttaagtttatgcgaaaaattaaagcctacaattagtacatattttcatgcatgaatcaaaattacaatgtgcgaaatccaagtaattaactcctataagtcgctgggctttccaatcccacccccctcaacttaatttgttcaaaacgtactccctataaatccacttactattccaacttcccacctctctatctctagttttcattgattcctcgtcacacatagagatttctcgcatcccatggatctcatgatggtgtcggtaaagttgctccttatatcttctctcctttggaatgagatttaatacaccattttcttgtagcatgtgataattatcatgtttcgttaccttaccgtttgtggaattattaaagcgtgcaacagcgaaaggtgcaaggaggattaggtgtacaccttttgtggaattattaaagcgcgtgcaacagcgaaacatgcaaggaggatgaggtgtacaactttggtttaaagggacaactttgcagtttgcacaccgtgatggaggtccatggatcatgagaaaaatagatagaggtggaaagttgaaaaaaataggagtgcacgaaattaaattataagaagagactgaaaatactagtgacttgtaggggtatttggattttcccccaattacaatttgatagaagattgaagtgcacacaggccatccctaaacttgcatagatgtatcatctagatccctgaactctcaacaaatatatttttgagtcgtcgaatttatctttgatgtcatataggtctaaacgggctccaacctcctccgtgcgccgacgtggcatgccgcaatggaatgttagtaggatccacattttagtcacatagaaaaaataaaattgaaaaacatcttttctcctcttaggttatatatgctagcaaaggatatacaggtatgatcaaattaactagggattatccagcacaattttatatggtgctagattttgagatacaattagacaattcttatattttatttataatcatacaacattatttctacaaaatagaacttaaacatataattggattccgaatacaatatgtagcttctatctcttagatataatggtattttgtacgcatgcaattatgatcgatcaatttgcaacggtataatatggcccaccaaagtcttatggttcgaacccttttctttttatctgagtaatgtggaaatttttaaccttctaaatgagacgaacgtagtgacttctttttgaattatcaatataacataacactaatgatataatagattatctatgatgttgatagtgctacggggggtatgcattatgaatcaacttgtatcacaatagtgtgagagagaacaaactttagtcaaccatacatgtacacttgtgtgaaccacctgctgctgtcaaatcctgagtacactagtgttctgttttttcttcattgagagctttctggtttctggccaaaccacggagttgtgttggacgaacatagaaaatcaagcacaccaaaagctgtccatttgtcgtatatatcactgtcaacgacgacgacgacatcaatcatcaatggatcggtgcatgcactcgatcgatcgcctctatctacaaatctttgcaagtgtgtacgtgcagacgagccggccgatgatccactgccaccgatcgagcagatgagcaggcagccagaactagctagctaggtaggtggtgttcagcgtttattagcaaaaaagaaggccatagcgtttagcgcgcgtcggcgagatggcgcttctgcagcgacgtaggcgacaccgtgtgttcgccgtcgttcagctccccctggcgctgtggccagggttggaaatttcggaccgaaatttcggtcattttggtcccctccgatacgatattagtttggccgaaatttttaaaatttttaattttttcaagaatttgggtaatatttgtttaaattcaactaaatattgtttaaattttggaaatttcggatcgaaatttcgggatttcggtgacccccgatcaaaaagccctaaaccgatatagtgaaaccctgactgtggctggcggcgacgagcggctaccggtgtaagatgggagtcgccccgccgccggcggtgggccagctggtggtggacggcagccgtattccgacgagccctccctgtgagcaccgatcatcgagctgagcactccgtttcttcttcctcaggcctttcacagtttcactcatgaatgtgacgaatagaattaatttgttttatctcgttttgcagctccacaggtgcactggccatggcgcacgcagccagagccggcgccgacgccggtctgcccgccggagggttgcatcggcggcggccacccgtctggccgacagccttagttatcagagatttggagcaaccaaagtgtcacttgggaagtcccaatggactactgtgtggctatgatacgtacgtgcacacagtagtttcgtataagtatgtaattatctgatctgaataaatttggtgcacgttatacatcaccaatttgcatcgattgaaagattgttattacttattacactactacataattaattttagtggaaaagatcctctttaatttgtagtggatcataactgctcgcatctgcaaatgtcgcttcccataaacagctcaagggtcacaagcaggccttaacaggcccgtatgtgaaaataagcatattttcgctggcagggctgttaagtggcccgcttgccaccagcctaccaggctagcttcccactcccttttccactaaaaaaaagtgtatcctctctctcacacactctcctcatactctcctccatcatcctctactccttccccatgtcctctcctcttcctgtctcctcaaatccaggcaatggaagatgggagtggtgaccacgcgactgttaacaaccaaatttagtaacatcggtgtcaggaaagaagattagatcaaagcgaagtcgaaggtggagatcgagttcggaaacagaacaggactcgactggagtccagatcggctacgattaggatcggctgggtctgagtcggactaggtaagccgatacagccgattccgacaatacgacttggtgtacaacatcggattgagacgatataattcaagatgattgccgcacatggatagagtcctgagaaggcaattgtatctattaattaggatgttttatgtaatttccttagagatatgcttaaggcaaaagtctgccgcaaagacttatggtattttagagtttgttagagatagcagtcgtgtccgttatggacatatcttgtaattcttgggtataaatagacccgagccctatgtaacttttaacacacacgttcaatacaatttcggcgcatcgccacccttttgatttagttttgtttcaacgagttcttgctttcaggttgagctgcatcggtttcgatcttcaacaagaggtaaaacttgttatgatggcttgcgttcataagattagtgcttccatcctcatgatactctaatcttgtttatgtgattcgtcgagttatcatatatcttacataatctccggcaatatcgcggtttaacctacgatcggctaacatctatcgaggaaggtagccgattaggttaaattctgacgttgactcagattatataagatatttaccactctatgaaacttccagcgacttgattgtctagatattgttcttcttttcatacttaatgctgcattaattgagtttgatctattaagtcgtgcttagaagatcaatctctagcctatcttctggttgccgattagggtagcatcagagtttcagccgatcttatctgatttaactatatttgctttatatgcttcattgatacgttaaatttgccctttaatcaagatattgctatatttaaatatattaggcctttgtttgatatattatacctattttaatatcctgatatagagtagtatcggagtattagccgatacatgctaggtctatttgatcggctatgctataaacatatatagtcctgttgttaatatatacttcgatctaagtgatttatactgtctcggcatggtgaccgatctaccccaatcacttgatttaagtatatatcgatataagaactatatattagaaatatctacagctgatcgaacagatttagttctttattgcctacttacaactgccgatcgattcatatatgacatcggctcaaggataaatgatatgtgctatcatttatagatttaaccgcggtttctttgcttctgtttcttgttgattacaggatcaaatcaactggcacgctaatacacctgaaggcgagctttggacctgcactggagttaagcagatctcccaggcctcgtgttttctgtcaacacgcttttggcacgcccagtggaacttgtaagaagtcagccgacagttcctcctcatggccgaaaaacaaccaccaccaccatctagtccaggctctgttaaggaaaagattaaggttaaaactgttaatacacagtaaaaatacacaaagagaagaaccatatcagcataattaaaatataggttaacatcactaacaaaaatctttacaaatttgcaagtcttcacataaatcaagtgtctacaaagacgagatttttcacacacagatcacaacacaattcgaaaattgcatgtaagaataatgataaaagtgatataactttgcgaaaaacatcatgcaaattacaaagtaataaaggcttgatagactgttagcaaatattaaaacaaatgatttatgataacctgtgatataaacgttcgatggaaccagctttattacatatatggataataccttaatttaaaccaaatttaagttgcacaatttgcacctctgctacattaattttacatagcacactcatatagctatatacctaggattaatgcgattctagttgcagaatgcagattttcatcctacttgtctcatcaaatacaacctagtgttctgaggcagatcgtccaaaacaaagtcaatcaacaagataaaatctcacctctttttcataataagatagtaaattttcatgtcgacattaaggttaagcacaacaaaaattgcagaacaaaacaaccattgcataaattaatcaaaacaatagtaccaaatttaggtcagcgtcttaccaggagcactccagtggctgcagggcagacagggcaaccaggacggagatgggaggcgtggggaggctgccggctcgacgagtgcactctcaccgccgtggtttgggcaaggcacaagctgtgggaggtcggatgcgggagagaataggctagggctggaggcaaggcgccggggacgagggagacgccgggcgcgtggaggttgggcttctctcggcgccggaggaatcggtacggaagcgtcggcgcgggagcgatgtgcgccaggggcagtgacgccggagacgcgagatgtgacgagaagaaacggatgacgacatccacaggaaaaactaacgaaggaaaattaatccgggtgaaattaattctctaatttaaatgaccaaaaagaccttttcagactcttacctaatactaaaactacccttgtatatactgctagtgtatactagcagtagaatgtaccataaaagtcatcttataggatgccacatggcagccttagagcatttgtagcaagtttaatgaatttttagcagataataatagatagatatactcggttggcctccttcggcaaaatgtatttctgtgaatagtcctgtacatagttcctcgtaaacaatagcaacaacacctaattactatatcacgatacacaaagtaagtttggagcaacttcagtagacttactagggcaaagttctacaaaaggaagaacataaagatgatatagagtaataaaaaatccctgatttgcgataatttgaagagagcatgttgcccaatatctctgtttctcgtgatgtgagtatttattcgttttgcagcggtcagaggatgtgaaaccaccgtatcctgttttttcttggaatctaaacaaatactggaaatgcaggacgacagtgcgcctaactgtattgggcgtgtcatccccctcggctctaaagatccaaagacgaggcctatctcctccttgtggcatttcgacaaacacctccggctcatcttgtcagcagctaaactgcaatcaaattcctgaagtacaaattgcattcccaccaagaaaaccaaatcaaacacgcacgctgccat

SEQ ID NO: 12411 - DNA, 2936 bp, Oryza sativa
ctaagctttgcaaaaaacaacctctctggccgtattccagattccattggtaacctttcccaactaaacgagtttatctagatagaaacaacctcaacgggagtatacctgcaaatatagggcagtggagacaattagagaagcttaacctctctcacaattcattcagtggaagcatgccaagtgaggtctttaaaatttcttcactgtcacaaaatttggatttgtcacataatctgtttactgggcccatactgccagaaattggcaacctcataaaccttggaagcatcagtattgcaaacaatcgcttgaccggcgatataccgtctactctagggaaatgtgtgcttttggaataccttcacatggaagggaaccttcttactggaagcattccacaatctttcatgaacttaaaaagcatcaaggagttggatctctctcgtaacagattgtcaggaaaagttccagagttcctcacactttttagttctttgcagaaactcaacctttcattcaatgactttgaagggacaataccatcaaatggtgtctttggtaatgctagcagggttatcttggacggaaactacaggttgtgtgcgaatgctccagggtacagcctgcccctttgccctgaatcaggattacaaattaaaagcaagtctactgttttgaaaatagtaattccaatcgtagtgtctgctgttgtaatttcattgttatgtttaactattgttctcatgaagagaagaaaagaagaaccaaaccagcagcactccagtgtgaacttaaggaaaatatcatatgaagatattgccaaagcaacagatgggttctctgccacaaatttggttggtttgggatcctttggggctgtttacaagggccttctggcatttgaggacaatccagttgctattaaggttttcaatctcaacaagtacggagcacccacaagcttcaatgcggagtgtgaggcattaagatatattcgccatcgaaatcttgtcaaaatcattacattatgctctacagttgatccaaatggctatgattttaaagcacttgtctttcagtatatgcctaatgggagtctagaaatgtggctacatccagaggaccatgggcatggtaagcagagattcctaactttgggtgaaaggattaacgtagccctggacatcgcatacgctttagattatcttcacaaccagtgtgtatccccactaatacattgtgacatgaagccaagcaatgttcttttggatcttgaaatgactgcatatgtcagtgactttgggttggcaagatttatgtgtgctaattcaacagaagcacctggtaactctacaagtttggctgacctaaaaggatccattggatatattgcaccgggtgagagaaattggaaacctatacttattctttacttgtatgcttcaatcattttattaactttgtgaatcatatttttctccattcacctttgttatgttttcaaatgaaaatgcagagtatggaatgggtgcgcaaatatccacgaagggtgatgtctatagctatggagtgctgttgttagagatattaactggaaagcgtccaactgatgaaaaattcaaagatggtaggagcctccatgaacttgttgataccgcatttccccacagagtaaccgagattttagaccccaatatgctacacaatgatttggatggtggaaacttcgaaatgatgcaaagttgtgtcctcccactggttaagttggccctcatgtgctcgatggcatcaccgaaagaccggttaggtatggcgcaggtttccactgaaatacactccatcaagcaagaatttcttgatctttccagtggaggaaaaatagtgtgagtaataattagacctaggcagtacatttggcactccacaaaataaacctagctaaggttgtcttccttcttatttttgcttcctgagattagtgcaaagctgttctgcattgcaactactatgtacagctacttctattaccataatgaagtccacacaaaattaacctcttggtcctaaaatttgtttggggcagcagcaaatgcaatggtcagcaaacagcagagagcaggctggcagcacgaccaaatatggctaataacttacaaactaacaattccacggtggttagtcagcagcacaactcacaacattcaggcgtaaggatacgcatagagcaaaacggccacacctgtggcgtgccttcgcgcgcgtgtactgcgtgctactttcagaggcatttccacaaacacgccacgcgcgttcggaggccgtacacgaaaccgaactcacaagcataggcaaaggcatatagaacagtagcgtgctgacctcggaatacgacggcgggccggggaaacctccatcgtcctgcgccggccgactcggcgtcgccatcgcccatcgcgtcttcggcggcggcggcggcgcgacaggctcggcgcggccatggtctcgacgccgtcggagagagaaaaagagacggtgggacaacaagattggctgggcctggctgatgttgggctcatgggcccgaattgagtttcttttagtaaagggacaatttcgtttttcccccactttgagctctaatattgattttgtagggttttcgtttttgcccccacttttttaatcgaaagagacgtttacccctggtttggatggaagtcagtgggaccgagtttgtgacagtaaaataaagagaaataaaggaaataaagatttttttagttagtgatttacctttttaccctcgctgcacacggtcaaacccgagacctacctggcggcgctggcggcagcggagagcgggcggcggccaggcgcagctcctcccggcgcgagcaggaggcgagcacgccaggcggcggggagagggcagc

SEQ ID NO: 12412 - DNA, 4356 bp, Oryza sativa
cctcacaccgccgccctctccctcctctctccgcggccgccgcgccgctctcttcttgtgtcgccgccgtcgcaactccggccgcccctcgccggtggtcgagactcatcggagcccggcgtcgccaccatccgcttcgtcgcttcctcctcttccccgtccacccctccgtcgagtacaaggaccgcgggaacgacgccgacgccgacgacccgaagcttctcgccgtttcttcctcaccgccggcaacaccgtcgacctctcgccgccgtgtctgctcggtgagaaccgtcgtctcctcccctttccgtttttccccttcccgtactccgtcgcaccgtcgccgcgccgttggccgtcgccggcgtgccgcctggactcgggtgcttctccttcccgggcgtgcttgtgcgccgtgagccgccctcatggtgtaccgagcggctgccaagtgggacccgcccatggacccctctctctcttctctgtgcaataaatcaatttcctttagaaaaataattcataaaattgcaaatttccatttaaacagcacataaacttcaaatggccatatcttgaccgtttgaactcagaatcgacccgttcaaatctctaatttctcctaaaaatgagtagaacccatttatgtgctttattgcttctgttcatatggtttttattagcctttttgtttttcttcgcgttggtcgtgtagatcccgccgttccggaagatcagcttttcatcgccgttgacgccgaagactttgtgagcgatcaaggcaagtcatatctaccttgaacatgttgaatcccatattgtgaaaattatgttgttttacttatattgcactgctttataaattataccgttcattattaatattgttttattagttattcctatgctctttgttatggccatgttattgatttgatatccatgatcgttgtgaaacctagtaaaattataacttgactagtctggtaccctacatgatggactgactagttgctttaggtaaatgcttagtcatgcttagttccaacctagaacttttggttaaactagactttggtggttaacaactaaaattggattagttatggactattgactggtttgtcaatagatgggtgataaaatgatttgtgcaactaaaatatatttttgggctgggcttggggtgcaagctagttactttggtagtcgcaccccggctaatataaggatcggtcttcgggcctctgttgcaaggcatcttcgtgcaaccacaagtcttgtgggtaaggcctgactggaaatttagatcttctcaaaacagagaccattggttggaagggtgtgaggccaggattaaggccgtttttaacccggcgcaagggggggcctgtctcgtcctgggggatccggcaacctttaccttgtcggggaccggcgggcagggaaaccacagcgggttctcctgttttgggtagacctagatggatagtcttgtcacgacctctatccgagtaccgtggtggtacctggcgcgtggcaacgcgtgttgaggttgggtattgtgggtaaagttgtacacctctgatcagagttagaactattcaaatagccgcgtcctcggttatgggcaagctaagcaatgtacccaaagttagttttgttttataaaaccttgggagggtgaaatcatgatggtgtagtcatgtgaagattagcctgggttaaggcaggttcgtaggctcatgcgaccttgatgatattaaaatattggcttagaacaggatcgtgttttaaaatgagctttaacttgattaaaatgtttaaattatggctttatgcaaaataaaccctattaggccattttcttgttttccctacgcattattgttgcatttccggtgtgacttgctgagtacggtggtggtactcactcttgctcacaaaaataatccagaggatggacctgaggaaggtgaaggctttgatctctagttcgctccgccgtcgagtgcctgtggctgctgctgttccgtagtcttccgctgttttatttgtttatctttgagtgtgagggcctaagtcgcccatgtaataaagtactcctttacgtttccgcaagtgtggcatgtaataaacaacaatgtctatgtgtacctcgcctcctgggacgaggattaatgcactgagcgtttggaaatggtgtatatttccaggcgtgacataagagcaatgaccggcttcggccaacaggatgtagggttattacctgacaattcaggggcccgaacctgtataaaaatcctcgtctccgtctcttttacctcaatctcacatatatcctggtaccaacgatcctcatactatgcaaataccggaattgcgacatcaaacatcgaaccaaatggaactcaacatatggtgctacaagatatgccacaggctgccgtcgcctctccgccgcgagctcgaggccagatccggccgccgcgttgacggggaagaccggatccgctgccgcgacgacgggggtggctggatccaccgccgcgatgacaggggaggccggatctgccgccaatgccgacgagcactacaagaaatatgaccttctgtgacgaattccttgtaacgtcggagctattcgtcattatcacattccattttatgacaattaatatgagatgggtggcttagtgacaaaaaaaaagtgttcgtcgttaataccaactagaaatctgtcgacgtttgatgtcgcgattccggtatttgcatagtatgggaatcgttggtaccagggtatatgcgagattgaggtaaaagagatggagacagagatttttatacaggttcaggctcctgaattgtcaggtaataactctatattctgttggccgaagccggtattgctcttattcaccataatcacaccagtacaatatttagggtaagcctatctaactgttgtcgacatggcggtctgaaagtctgactcgtagtcgacaacagggtagccttccttctcgaatccgcatccggcgagatcagagacagcgctatatctctcctgatggtggctataggcactataggggactagccatgcctatctctgaagtcgatatccggcgtcttgtcttggcgtatgttggcttgtatgttgatcttgtgtattgatctattgttctgtgtcccctctcctcctagggggccttgtatttatacccgtagatgtccccttgtctaagtagaactaggaaaaccaatatggatacaattcgagtagtttttgtcgtttccatgtaaaactctagtcatcctaccttatgcggaactcctcctatatcctaaggttgtttccatataaaacatggtatgtgatgggttctgccgagatttagtcaactactattaggtatgtggtatccatcaccctgacaaaatcatcataaaatatttcgatgagacattgtgacgaatattaatttgtcataagagtcaaaaagaaaacatcacagatttatataatgtatttctagaaaaaaatatattaaaaattgaagcaatttaatcaagtgaattaataaagaaactaaaattttcctttaaaatcatggccacaaatatttttgtaatattctacgtggtctaaattattctctaaaaatttccatgaattttcgaagctcaataactaattttaataccaccaagttcatttaacctattaaaataaatagaaaacaaattaaaatccctctctttgtccttggggctttttcggcccaagtattactctctccctccctcagcccgcagcttctttctccctcctcgggccggcttccccttccactcctccctcttcgggccgtcggcccaacccttttgctcctccctcgtcgagaagactatttgcctccctcctctcaattcaaattttttttcgtgtagtaaatgatttcaaatgaaaaaaatgtcaataataaagttgtataacttatcaacatctacaacttttgattttgttatatgactttatttcaataatttgaatttgaattttaaaatatgacaacttcaaacaacattttcaaatactaaatgattttcaaatgaaaaaatcataaacaataaagttgtataactcatcaatatctacaacttttgtttttgtcattttgctatatgactttgttgcaataatttgaatttgattctaatcatgacaacttcaaaaaaatattttcaaatactaaatgatttcaactgaaaaagtcatcaacaacaaagttgtataactcatcaatatctataacttttattttggtcatttctttgccgataaagtaaaaa

SEQ ID NO: 12413 - DNA, 1204 bp, Oryza sativa
ctccgcgcctcgctccccgtcgcctcctcgctccgcacatcgctccccgcgcgcatcctcgctctgcacctcctctcctcgcgacgatccaccgccggaccagcgacctcgcctcctcgctccgccgcaacgtcggacctccctcttcctcgcaacggttcagcgacggcgcaccaccgcaccgccataccagcgccgaggctgccgccgcccacgcctatccgccggcgccggcgccgaggaaggccccttccgccgccgccgccaccaccatcgccaccgtgcactcgaggtcgtccctcttccccatcggctgcagcctgagccgacgtcctccccatccgccaccgccgctgccgccgacggagccgaggtcgtccccagccaccgacgccaacggagccgaggtcgtctccagccgatgccgccgttttcctggtatcccattcctagcatcaacttgataatgcagcggatgccctcactttctcatctcaaataattaacaaagtgcgccattttcagctctgctactggttgaagaaatcattcctggcaagcagttgtggatccctaattctggagttctttctccttcacccatgcttacatgctgccatcctcgattactaccaccatggctgcgttgcaaggttgcaacacggtggtggatgtggacttgacagagcagtagcttcacataagtgctttgttatgttatcctcatgaggaagagattgaatggattgagggggattaatttcaggctcaatagatttggaataagtaccttccaaattcccctcaatccacatggggatggatgaactcaacaaggccgaatgcatctcaaatacaagttgtgatgtgaaggtgataatcaagattggaaaacccaggtaagatatgactttaagtggtgcaagttaatcgtgatagcaaatccgtttagtcttattaggaaatgtcatacatgaaagaatgtgattgacaaaaatatttttttagccttctgatttgcagatgctttattggagttgtgctgctcctcgcgacaaacatgaaatggagaagagaagggtatactcacatgcatatattatatattgatatttggcctattgtagaaactattggttttaagcatacatgccctaaaaagcatatggtttctatagtaagggttgataactccatattgata

SEQ ID NO: 12414 - DNA, 4195 bp, Oryza sativa
caccatccccctcctcctcctcctcctcctcctcacccaccacctcgccgccgccgtgctcctcctccttgtcaactctccccttccgcccgcaagcacaggcgcctcgatgtcgaggaatgggagtccgttccgcctacctcgtctgaggccgagtaggttttgtggatggtgttggagtggcacgatgcccctgcgctgtccgtggcggcgtcctcccccaccagaagttgccgcggggagtgccttagcaccaacgcctctagcgccatgcttgtccgtaaccgcttaccgtcattgcccatagccatggcatcttcgccgtcactgctagtgccacgctcctcagcttgccatcagcaatgcgatcccgcatattcatagctgtcggcgatggtagcgctgcggcgtttgcatcacgggcagcgccaacggcaatactccccgtatccaccaccagctccttattaggtgatgaccccactagagaagccaccaccgcaaacgatgataacgacgagggtcgtccctgcatatcctcacgagatagccttccctgccgagtggagcaacgcatctacatcctcccctgtcccctcctgttgcagcgcgctcgtcatcaccatccccaactccagatacacctccatcacgcaccggcagatgcggcggcaaagagctcctcctcggccacctctagggtgtgcctcctccttggcctccgtcggcgcatgcgcgaggagagtcatagttgccatagctcctcctcggcctccgccggcacgtgcacgaggagactcgcagcaaacaaggactgaagagaggtagaggaaggttagagggggaagagagggagagtagagataatatgacagacaagtcccaccaattgtttttttaaaatatgctgataggactgccacataggacgaaaacaactccgataccccaccagcccaccccctctgttccagtcgatggctaatggggcgttccccagatcgatgaacaattctctccctgcatcagcttgacgaggtgcagacgacactcctcctctacagctcaaaacttcccgcctccatctccattttccgaggtgccagcggctcaccgtcgatgagccccagcccattttcctttcccaccatgcctggtgcgtcgtctctcttccatcttcttccacaaacccacgagcaccgttcggagtgtggggacctgatgggtgtggggacgggggacattattctcctggtcgttggttcagggccagggatggggatgttccaacccaatccgcccttgccctgccccatttcacccctactcttgggaaggtttgcatgggcagccatcggagctccgtagctacatctctactttctctgtttcactaaaaaaataattaatgatttgaatctagatatagcctatatgtagattcgttgttagaagttgattttctattggacggagggagtaatgtcaagtgctctttcagttgttgttgatgtatgaaaaaaggttgttggcaaggtaaaaaatggtatcaaggataaacattggtagcactttactcacctaaaacaacctgtttataatctttatcaagataaggtaaaataaaacctggaggaactgagtagtgtcaattgctctgccgattgttgttgatgtacgaaaaaaaagtagtcggcaagccaagaaattgaggatgaacactagtaccactttattcacctaaaacgacttgcttacaatctttatcaagagaaggtaaattacaatctttatcaagagaaaaattagaatgaaaaataaaacccttatctttatcaagataaggtaaaataaaatccggagaaaccaaaagttgtccttccttcaccagcctgcagactgcagcctatgtgctaccatgttcgtggaacgacgaacccaacagacggaattagttaccttgttgccgatgattaggagggtcatgttctgaaacgtaactacaagtcagattaaatttttttttaccgggccggccaagaaaggccaaccaaatttacttcagattgaagaatatatacaaatatacaaagtcagattaaatcatgcatgtgaaagaaaatgatatgagtatatatatatatatatatatatatatatatatatatatatatatatatatgtgctcatcagtttgattagagttgcttctctagttcctggtaaaaacacattaacaccactttctacgcaaaattaacaatcagttctggattcagatacaacttacgcggcccggaaaagttctcatggagtaggattcgacgagaccatattgatttggttggagctaagagacgatgatggccttgatgcgtctccttgcccatgatcagtagctcggcagagttacctccggtggcgagcgtacatggcagaaatggcataatctgcagtagtaagagggacatcactagaactgcctgcaacccaacactaaggcgagcagctgccatattgaatttgccgacccgattcaccggcttatcttcgctgctgcagcatgaagaggcgtccaatttattgcgcgcaacaaattgtcttatgtgttgacttagttttctcgggttagcaatatatttcgcacactttatatttaaaaaaggcttgctacctccgtttcatacgattcgctttgactattttctagtattttttagatttaaccaaatttataataaaaaattaacagcaaaacgtacatattgtcaaaaaaaagacacggatattaaggaaagatataacatcaaataattagaagggatgaaagcttcgaacttaggtcgtttaacccaccaccttgtaaagctagccggaagacctttgggtgtttctcaacatattatcaaaatatactaaattttagtttattaaaactaatttggtgttgtaaatgtctaaaatacaaagatatacttgacaaagagaatattacaagtatgtttttagaaagcaaatatcacattttctttgggaggtttctaaatgtattctaacacaaagtttttaaaagttcctcctcgtgttgggtcttagcgagcacagctagagtccaatgggtcatgggtgatgggagtaacacccgacctccaacatctgtattggtcattttttacacatttagaaacaacattgaatttattgtgagataataataaaatgctcaattaatgcacattaagttagtaaatagtacaaaatggttagcgtacagaatacatcgatggccatgattaagcatgcgagcaatcaaatggttcctttttgtttggctcaattcatgttgagttattggtttcaattatatagaaatagtagaacttgcgtgttgaaaagggataagtagacaaggctgataaacagagagattacatgcaggtaactaaaataatactagcttccaatgttgactagaatagtttgatttccacatggctgctttttgactccctcgctatcttggcacacttttggcatgcgctctattcaatgaaacaacgtacgctgtctgatgctgttcgttgaaaaaaaaatacccgtaaagtaaagagtatccttctaaactaggttgctgactgaccaatagagcttagaagactgacttcttcatgtcatgtactcatgtcatgtatattgactacatggcattgatcgaccagaacagttcaaattatacatggagacccatatcagacctgttgagatgggtgacttttgctgatcaacgactggttattactctgtttagccctataagggcatggtttggatatttcatgttgttatccaaatcttgttcttaggcacttgtagtttttgttcatgtagttgctagtaattgttactatatccatctcaaaatataagaacataaaattagataggatattttctagtactacaaatatggacaaactgcttgtagattcgtagtactaataaatgtttcattcaattttaagttctcatattttgggacggaggaagtaacatttacactgctatgtactaggacattatgatatgtagatgcaattttttatatgcaaatgacggtttttagatgcaaattattttaggaatattatttattgatcatgtttggaagactaactatcaatctgaccctgcattt

SEQ ID NO: 12415 - DNA, 2736 bp, Oryza sativa
taatgcatcgatggccatgattacgcatgtgcgagaagtccaacggctcttttttttaatgcggcagttccaattatatagataactttgcgtgctgaaaacggattaggtggatacatgcagatcattaaaacaatatgtatagcttccaatgttgactagaaaagtatgatttccacattgcttcttttttaactcccccactagcttggcacttaacttacttttggcatgcggtccataagttaaagagtccttgtaaactaggttgctgactagccaatagagattagaaagaccgacttgaagaccttgctcgcggtgacaaacgggcagaatttgaagtagatatatactagtatatattggctacagggcatcgatcgaccggaccagttcaaatttatgcattgagacccatcagacctgttgagatgggtgacttgttgctgatcaaagactgattactcagtgcagccctgtagagtcatgggttggattgatattatttgatgctgttatatatgatcctaatcttgtccttaggtacttttagtttttgttcttcatatagtgctatatatatactaagaatttataatgagtaatgcaacttttttatatgcaaatgccgcttgtttagatgcaaattgagaaacacctaggggtcttccggctagctccacaaggtggtgggctagacgacctaggttctaagcctcaccccttctaattatttgatattaggtcattccttaatatttgcgtttttttagatgcgaattgtttggatacattttatatgcaaatgatgattctaccatgaatggtgcatcgtctctctttcatcttcttccacagaacccacgagccctggtcggagtgtgggtatccgacaggtgtggagattggggacgttattcacctggtcgttggtttggggctaggggcggggacgttccaatccacctctgccctaccccgttgtcacccctactcctatgtaggttggtggacaaccatccgagctctgtatctacatctgtaattcctatgttccataaaaaattaatttatagttatgaatctagatatatatagcttacatctagatttatagtccgaagttgattttctataggacagagagagtaatgttaattgctctattggttgttgttgatgtatgaaaaaaaagttgtcagcaagccaaaaaaatgtatggaggataaacattggtagcaccttttattcacctaaaacaacttgcttgtaatctttatcaagataaggtacgtaaaataaaacttggaggaaccaagtagtgtcaattgctctgcggactattgttgatgtatgaaaaaaaagttgtctgcaagccaaaaaattgaggatgaacattaataccactttattcacctaaaacaacttgcttacaatgtttatcaagagaaggtaaaataaaacccttatctttaaacccaaagaaaccaaaacccaggttgtgaaacaaccagtagaaagaccttccttccctagctcgcagcttatgtgcaaccatgttcgccgaacgacgaacccaacaacggtattagttgcctagtggatgtggattaggagggttaattatgttctgaaacgaaactccaagtcagattaaatcatgtatgtgaaataaaatgataggagtatatacacataaatgcatgtaaaaacacattaacagtttaacaccactttttctacgcaaaacagtcagttctggatccagatacaacttacccggcccgtcccagttctcatggagtaggattcgaggagaccgtgttgatttgcttagagctaagagacgatgatggcctccatgatgcgtctccctgcccatcagtagctcgacagacttgcttccggtggcgagcgtacatggcagaaatggcataatctgcagtagtaagagggacatcactaggattgcctgcaacccaacactaaggcgagcagctgccattgaatttgcggacccaattcaccggcctctcttcgctgctgcagcatgaagcggcgtccaatttattgcgtgcaacaaattgtcttatgtgttgacctccacctaataagagtttcatcggggtttcagccgatgaggtatctagacgttgcatcggcctacaaggattggatataagttggatttagccgatgacaacaaagattttcattgtttatctaatcttgtggattttatgacatcggacttccagctgatgtatgctttaatcttcggatcagtgcttattctatcatatcattgttagccgattggtttctactggaaattattattgttatattgtattatcatcagccgatcgtctttatttatatcaagtgtcagattctacatcaaacatatagccaatagctcaaaaccctatcgctatcggctggtatcggcatcggctagaatcactccatcggcttgtcagccgatcggtagttttatctgctgtttacatatcttgtcagttgcaggatcaaactgactggcacgctcgcatctcatcaacaacttggatctgtactagagctaagcagatctcacaggccagtgtgtgtttttcgcatcaacaacgtgacaatccagacatcaattctttttttaaaaaatgatggggcccactgtcatatctctcccctcccacctctctccaccaccatgtgtcgtggccgccatcg

SEQ ID NO: 12416 - DNA, 1639 bp, Oryza sativa
aaaatactctcctcaacccctaaacttcacaaaagaacaagaaatcctgaaaccatcacagtttctgcaaactggaaaagcaggccgttgtatgatcttctcatattgtgttttatttcctatgaccaacatagtgtcgcatgccaaaacttgtttctcacctcccatgacctgatgtcaccaatgcagtgcacctcgatgacgaagaagatagatgacagtacagtccgcctgctggttgcactcaagctctcacatggaaggctctgcctctatatgatcagatcaatacctctgcttctgccccttgtccaatctgggaatttgtgtagaagaattcagcccccctctgagtgcaacaatttttgcctggcttatcttcaaaaatcgactaccaacaatgacaaatttgctcatgaagaacattgtgcatacggaatctgcttgcatcaagacgaagatggcaatcacttattcttcaactgctcctttgctgaagttttcagcgaatcgatgtttgcctagaaggcacagaaaagaaaagagaaactttatgatatatatagtagaaatgtgaaataaaaaataactctttgtgggtagtccaaataaaaaactttggtgaaatgaaaaaaggataatatataacacattctgatctttttacacgtcaagtgttattcggaccattttcatgagataaaccagtagctcctaaaaacatatgaacaattatatttagatgaataatagcattcgtggatactttctgaacgctagcaatatacatctagcaggctagaataaatatatgcatacaccgagtaaaagagattagtgtaaattgagataagcatctttcataaacgaaacagagcagagcataatccatgtgaaaaactgaaaaccattcaaaaaatggaacaaaatgataactattaagcctttttctttgcacggattcagcacgaaatgcagcacaaaaattgcacataatggcacaagagggagaggacaccgggagtgcattcggcaaacctgcacagggtcgctttcaaggacgacgtcgaggaagccggtggatgatcgcaaggtgaaccggtttgacattcacaacggtgacgcaccgtgcgctggatctgcacatgacggagttgaggaggaagatccgatgacgaagtgcaccaggtgacagacctccacctttggggccgggtggaacagatcggcgaggcggccacaggttgaaaattatagtcagtacaggttgtggtcatgtatttactgagaaacctaaataatatacatgttacaagcatttctccgggtggaacagatctgcgaggcggccacaggttgaaaaatatagtcagtacaggttgtggtcaggtatttactgagaatcctaaatattatacatgttgttacaagcatttctcttagcaatcagtataccagctgtagttcacatccttgttcatttcattgtatcaaacaaattctgcaggtgcgataacgagatgaactatccactaatgtaaataatctatattataatgtaatcatccatcaatttgccaatgatgctggtaacaagtaaaagatttattgatgcagccaaaattaaactgtgtaaatt

SEQ ID NO: 12417 - DNA, 867 bp, Oryza sativa
agcagttggttcagcccaaggagagggagggggagaggagagagggaggggtggccgggctgggctgagggaaggagggggagagatgggctagaagtggcccaagaggaggaagaggatttcttttagcttttcctttttataaaattctttaattgttttgttgccttataattatttagaatgctctgaaaattcaagtgaaaattggttaaacatttttaagcatggggaatttattaaaaatactcacaagccaatttgatataaatctttggtgaattttaattgttggaggctcttttaggcttttaaaatttctagaaatacattaaagcacgatttaaatttagggcgattttcagggcgttacatcttattcaccataatcacaccagtacaatatttggggtagcctatctaattgttgtcgacatagcggtctgaaggtctgacacgtagtcgacaacatggtagccttcttcctcgaatccgcatctggcgagatcagatacagcgctatatctctcctgacggtagccataggcaccatatgggactagtcatgcatatctctgaagtcgatatttgacgtcttatcttagcgtatgttggcttgtatgttgtggcttctgttgtcccgtgtcttctgtattgggtgtcctcttctcctagggggccttctatttatacccataggtgtcctctttccaagtagaactagggaaaccaatatggatacaatctgagtagtcattgtcgtttccatgtagaactctggttgtctttccttattcggatctccctccatatccgaggtcagtttccatatataacatggtatgtggtgggtcctgccgagatgta

SEQ ID NO: 12418 - DNA, 722 bp, Oryza sativa
tgcatgtaaattgtgagacgaatcttttgagcctaaatataccatgatttgacaatgtgatgatacagtaaacatttaataataacagattaattaaacttaataaattcgtcctgcagtttacaagcgaaatctgtattttgttttgttattaaactatatttaatattttaaatgtgtgtacgaatacttaaaaagatttggcccagcaactaaacacagccaatttcatgtgagcagtagtcaaatggtctccttgattaccgtcattagtcaaaatcgcagttcacatcatcacatattcacatggcgcgaaagattacgacacgctaccaattaccaaacccccaaacactttcccccctcaaagccaaacaatgattgaggcagccatggccggcggcgccatgccgctggtcgtgctgctccttgccaccatcccgctcctgttcttcaccatcaagcgctcggcgcagcgtcgtggcggcggcggcggcggcgaggggaggctcccgccggggccgtgggcgctgcctgtcatcggccacctgcaccacctcgccggcgacctcccgcaccgcgccctgagcgccctggcgcggcgccacggcgcgctcatgctgctccgcctcggcgaggtccaggccgtggtcgcctcctccccggacgccgcccgcgatatcatgaggacccacgacgccgcgttcgcgtcacggccgctg

SEQ ID NO: 12419 - DNA, 1676 bp, Oryza sativa
tcctccgctccgtggccgaagccacctcgtcttcctcctccgcctcgctggtcaacctcaccgagctgatctccgccttcgtcgccgactccacggtgcgcgccatcatcggcagccggttcgagcaccgcgacgcatacctgcggatgctccaggacgggctcaagatcgtccccgggatgacgctgccggacctcttcccgtcctcccgcctcgcgctgttcctcagccgcgttcccggccggatcgagcaccaccgccaagggatgcaacggttcatcgacgccatcatcgtcgagcaccaggagaagcgcgccgccgccgccgccaacgacgacgacgacgaagacgaagacttcctcgacgtgctcttgaagctccaaaaggagatgggctcccaacacccgctcaccacggctaacatcaaaaccgtcatgctggtaatcaagctctccctctctctatctcaaaaaccttcgtgttacttgcagagtccctgatcatggatcacttcccatgtttcatgatcctaggacatgttcggcgccggcagcgagtcgtcggcgacggtgctgcagtggacgatggcggagctgatgcgaaacccaagggtcatgcagaaggcacaagatgaggtccggcgagcactcgccgggcatgacaaggtgacagagccaaacttgaccaacctaccctacctacgactagtcatcaaggagacactccggctacacccacccgcgccattgctactgccacgcaaatgcggaagcacgtgcaagatacttggatttgacgtacctgagggggtcatggtgatcgtgaacgcgtgggcgattggtagggacctgacgtattgggataagcctgaggagttcgtgcctgagaggtttgaacacaacgggagggatttcaagggaatggacttcgagttcataccgtttggagctggacgaaggatatgccctggcatcacattcgggatggcgcatgttgagcttgttctctctgcacttctgtaccactttgactgggagcttccacaagggatggcggcaaaggatctagacatgacagaggattttggagtcacaacacaacggcggtctaacctcttggtgcgtccaatccatcgtgtatcggttccagtagagtaaacatacttgtaagatatatttataataaatgtaattgccaatgtacgtatattagtttcagtttaattttgtttttttataattggtaaaagtcgagtttgacattatatgtttgtggagtgatatatatatcatattaatttatttttattttttttataattatttaggtgacatgaaaaaagatataagaagatgtatcctcaagtgatgaaaatctctctccagatatacaatttctatgtatgtcattacttgttcaatcttctataactagggggcagataacttggttcatttgggctcattatcctctaattttcctcttgggtggtgcatcagtatattctccaatgttaatgttctctctgaaacctataaaacgttttgcactaatcagtaatcaagtataatcagttcggtttccgcattttgaaagaggcatgaataagttgtgtccagtgtggttttgacgtgagatgcacggacacagcgcacgcagaacatgtgcacatccgt

SEQ ID NO: 12420 - DNA, 1205 bp, Oryza sativa
attcaaagttcattcctttaaaatctatatggccatcctcaaatcgctcgggtctaaatgtcttagcgtcctcccaatatttagggtctctaccgattacccacatgttcacaagcacaatagtaccttggggaatcgtagtccatgaccttacatgtctcctgacattccctccctagggagaagtagtggcaccacaggatgtaaccttaaggtctccttgataataagtttcaaatacttcaatttaaccaagtcatattctgacactatttgctttccttggagggcatcacgtaactctgcttgtgccttcagcattgttcttggattcattatgagctcagccatcgctcattgaagcgtatttgccgatgtctcgctgccagcaccaaaaaggtcctatatgcatggtaaaaaatacatgatttcccataaagtgtagaaaatattgtatcaattccttcctatgttcactatgcatacttttttataaaaaggaaattcatgtactcgctccatttatccgtataagttattctttaaaggtaaattttatatattctgacctaaacagtagttaaactagatgtattgttgcggtagtggatttatattttaaagttgtgtcttactccatcataatggatgctatgtttttttagcgagattaaggatgaaaacaagacaatgatatcctctattaaataagcgaagatgatttcatggtggttgggggataagaaaggaacaaaattaagtgataggtgctaggtgcaattaaaacatgtccatagtagttcaaaatccctaatatctattgacaattggagatggccaaaatactttatatttgcgaaagggggagtagctattaagttatatttttgtgaccaaataaatttatagtttggtattaaagattttttaaaaaataaaataaatcctatcgaaattaagggagatatagtattagcatccacaggaaaagaaaaaaaaagggagaacaactagagtacttacaaggacgacagctttgatattgcccatggtgaggggcacttggaggctcccttccttctgaatcctgagaagcacgtcgacgatgtcctcatcgtcttccacagcgccggcggcggcagctgcagcagctgccctcttctcctcatgctgcttgagggtaccgagctcgaattcgccctata

SEQ ID NO: 12421 - DNA, 1555 bp, Oryza sativa
tgatattgcccatggtgaggggcacttggaggctcccttcctctgaatcctgagaagcacgtcgacgatgtcctcatcgtcttccacagcgccggcggcggcagctgcagcagctgccctcttctcctcatgctgcttgagagcgcattccatcagctcgaagttcttgcggtggttcgcctctgcccgccgcgtcgtgccgccgatgaagctggccagcctcgacgatgggaacaggtcgccgaggctgaacccggatgtgatcttgatcccctcggcaaggccctccaggaattcgtcccgcctctcgaaccggtcaccaatgatggtgcgcaccgcggcgtcggagacgagcgccgcgatccgctcgctgacgttcacggcctcgccgggctgcgccgccgcgacggcggcgacgaggcggccgacctcgtcctcccggatgcggcggaacgactggacgcggcgggcgctgaggagctccaccatggcgatcttgcggagctgccgccacagcgcgccgtagggcgcgaacaccagcccgacgccgtcgctcatcatgacccggatggtggagctccacggccgcgtcgcgaacgcgacgtcgtgcgtcttggtgatctccctggcggcgtcggcggacgaggcgacgacgacggggacctcgccgagcctgagcgacatgagcggcgcgtcgagccggcgcgccaggtcggccatggtgcggtgcacgagcgggccgcgcgccatgacctggtggaggttgccgacgagcggcagccgccacggcccaggcggcaacttcaccccgccattattgtcgccacgccgcttcgtcctcaacctaaccaccataagagccaggaagaggaagcaagcgcaccacgccaccttctccatgccatccatggccatggcacacacagcacgcagatgcagatacatatatgcagaggtgttactgtttactactaggtggcaagtgacagaagcagctttgtcatggtgagttggattttgtcgccatgggagtaattgctagggatgaacttccaaagagagctgatgcatgcatggctgcaagagatagatggatgcatgatgattatcagattatgtaataacgtctattttgagttcagcggtggccactggctttgcttgacttttttagaattttggtgtcgggaaaatcaatgaaaaagatactctctccggttctataataattgatgttttagacaaggttaggttaaacttttataactttgaccattaataactttaaaaatatttactttaaacaaactagaacaacatatatagatttgtctttcaaagcactataataaaagtaaacatgcatttatttattgtatatattatagtagaaaaataagatcaaagatatattttgtaatccgtgtcattgtccaaaatgtcaattaaaatgaaaccgaatggagtaaatgagtgatctcaaactgtgaaaacgatgaattgagcccagctggcagagtggagttatgagagaggcaattgattttaggctgga

SEQ ID NO: 12422 - DNA, 1585 bp, Oryza sativa
aaaaaaaaagtatgcacactgaacaaaggaaggaagtaattgataacatatttttttacatatatgggaaatcatgttttttttcatgcatataggaactttttggtgctgggagcgagacatcagctatacacttcaatgggcgatgactgagctcataatgaatccaagagtgatgctgaaggcacaagctgagttaagtaacgtcatcaaaggaaagcaaacgatatctgaagatgacttagttgaattgaagtacttaaaacttattatcaaagagaccttaaggttacatcctgtagtgccactacttctccctagggaatgtcgggagacatgtgaggtcatggggtacgatatccccataggtactactgtgcttgttaacgtatgggcaatcggtagagatcctaagtattgggaggatgctgagacattcatacccgagcgatttgaggatggacatatagacttcaaaggaacagattttgaatttataccgtttggagctgggcgaaggatgtgccctggtatggcatttgcagaagcaatcatggagctcgttctagcctcgcttctctatcactttgattgggagcttcctgatgggatctcgccgaccaaggtggacatgatggaggagttgggtgcaactattcgaaaaaagaatgatctttatctcgttccaactgttcgtgtgcctatgtcgactgccctatagctgtttacacttaagagacaaaatatttgtctcatctgtacgcgcctatatgataaactatataacttttgatggattgatgtactcctactttgcatcctactcgttctacattattactttaaatttagttattaaactatttaatttatatatatgatcaagagtttaactcgtgacaataatttgataaataatatgttttaaatgctaaagtcctcctagcttgtcaattttgatggcggtcacctcattacacatatacatgtacttgcacgcacaatatctggtgtagactctgggatgccataaccatgaacaatatggagaaaggaggataatagtcgtgcctcctattgctggcagtagctctgctaacacacaatggcgttgtgtgaagagaagaggataagaggcgggttggagcctgagagttggaagggatgaggtggagaggggtgggacaaacatgagaaaagaggacttataattttgttttaaatttggtcaaatttaagaattttgactaaaaaaagttgaatgccttgtaatataaaacggagggagtaactattattaacagataaaattgtgtatagttgtattagtgccggtacgaaagtagtcgcgctgtccctctcattttgcaataatttctcttgcctatcttttcaaaatagggatagccgcactgtacctgactttttttttcacttacatgaatgaatgaacttctctatggaaactagtattttgatatctcgagcggatgtccacttgtctatttataaaccatccaaacaacaaagaaaaattctcaaatcgtctacactaacagcgtaaattttttaaatcattattcac

SEQ ID NO: 12423 - DNA, 1751 bp, Oryza sativa
atattttgtaagttatagtcatgtcctaagactcatcgaattattgagttcttaatcatatgtaaattattatcgcgaacttgatttcttagggagattactaaaaataatctatagattataatctataggagttcatccaattatattttcattaatcctataattaaatgctagtattttaggtatttaattagtaagaattcatctaactatattttcattaatcctataattaactttcgcaattttacgactataattaacctacgattaaattcttaactattttgaattttctaaacttctaaattttactcaaaccctatttattttctttctcttcctttccttttctttttccccttttttttcttctttcccttctcttttcttttctctctttttcctctcctctctttctttttctctctcttctctcctcccggctcctttctttcttttccttctcttcctctcttctctttcggctccttctccctctctctctcgccctgcctaccgagaccggctgaggaaaaggaaaaaggcggcggcggcacggcttaccggcggcaacggcaatggtggcggcgcacggtggctgcgacggcggtggcgcacggcggctgcgacggcggcggggaacgcggcacggccaaggcgcggcgcggcgcggcggcttcgtggcggcggcgtggcggctctatgcgacgacgcggcggcgtggaggcggcggcgcggcggcgtggaggcggcggcgtggtggagtgggtagagagaggaggtgaggatggagggaaagagtgggaatagtggagtttatataggagaggggaagagataagggggagaggggagaggggagacgcgacggcggcgcggggcgcgaggtgggggcgcgcggcgcgaggcgacgcgacggctgcgtggcgcgagcgacgcgacgggcgagcggcagcggcggcgcgcggcgcggcgcggggcgcatggcgacgcgacagcgacggcgacgtgcgagcgatggcgacggcgcgcggcgatgcgacggcgatggcgacggcgcgcggcgcggggcgcgagacgacgggacggcgcggcaggcgtacggcgcggcggggcgcgagatggcgacgtgacgggcgagcggcgacggcgacggccgacggcgacagcggtagcggcggtgcgcggcgtgaggtgtggggcgcgggcgcggcgtcggcgcggcagcggggcagggttaggctagggaacctcgtcgaacacctggcggccgatgaatagtgccgttttctatttaacccgatttaagcctattcatttatttaaaattgattctataaacctaaattttgtacaaatgaagttcactcaatatttgtgttattccaaccaatgggtccatccttgattaattttacctatattttatttttatataattttcttgaatttaattagagttaattcttattccgacacttttaaatttaattgatacaaatatagtcgtaataatattttactcatttctatcctcaccaaatattattttaaattgcactttaattatttacttagtcaatttactttttagggtttattcctaactaattatccattattcgcgatttataaactctgaaatcaaaatctaataaaataatcgaacaaaatcggcatgatgcaattttatttaaaaagtttttgaaggcccatatttttgaaactttgatttttgttcgtcg

SEQ ID NO: 12424 - DNA, 1193 bp, Oryza sativa
tacattactgtctcacataggttaaatcaaacaagacaatagctcagtacagtagttacagtactggctcacattgtcacattaaccatttacaacctcagaaacacaaaataatgagagtatggtagtaaaggggcgatcgactgccaaataagtcagtatattgtgcaaccaaggccaagattccattctatctagtgcatactactaggatgtaggatccaatcacaccacagtggttcactcattcactgaacatttcatctaatcagcatgtatgacgtatcctggaagtgcatactactcctatactaaaactgattcaatatagggagtcagcaaaattagcatccagtcgaacaagcgcatcatcggtatgtaaaacatccttatcacatcgcaatgctctcatgaacaccaagagttgcagagattaattattggaaccggtttcgctgagacgttctacggcaggataaagtcgagtgatcctccaattcgcaattcgtaactcgtaaatgatattgtgccagcgggatccaaacgcgcgcaccgcatgttccacgcagcacttagaactgagaatctgagagagcaaagttgtggctcacctggcatcccggtggcgagcagcccaatccggtcggtgatcgcgaacaggttcgtgatggtcgtcgggtcgtgcaacttgtcctgatcaggggaacgaagcaaatcaaacggccgcagaatgaatcacaaatgaggggacaaggggattccgctctcgcgacgtgctcacctccttccgatgggtgaggacgtagacggagtcgtcgccgcgcacgccgacggaggtgatcccggccagcttcacggcgttgaacgcgtagtctgcgagagcacacagcacggccgcacggggaggcgggcggcggaattgaagcagcagatcgttagccaaagcgcagacaccagcagcgaatttggtcggcgtggagggggcatgtcgcggcggcgggcactcaccgagttggcagaggcggccctccggggagaagagggtgatgaagcgctcgtagtcggcggggccggcggcgcggctgccgcctccggtgaccaccgccgcggcctcggcttccggcatctcgctagcaaattcaccctctctctctctctccgccgcgtgaggcgtgggaatggtggcgtggtgg

SEQ ID NO: 12425 - DNA, 4181 bp, Oryza sativa
cgtgctcaccgcctagggtttggtcctggccctgccttttgttctgcttcttggtttttgagatctattaatctgaagtagtagtcgtttcttgtctcaagctatttgcgttaagaagacttgattagtttgttttctactgtacttcttgcatgttaagacagtacgttatgagaatttttgcactaagcgatgccagttcatgtcagatgcttcagatatatcaatgctattttgtgctgccaattatgattcgttcgatctgacttggcatgcccgcgttatattagatcgtctgatcatgttatgtacttgtctgccaaattatgtggatggtaaggttcacattagttttgatctggcctctgcattatgcttcattacaaatttacaattatctgaaatatgttgagaaatgtatgatgttcctgataagaacccatatttataagttaactgtagacatgtactagtaataagcatgttgaatacttcgggttctgccatgttctggattatcttttagccatatttctgaaaattagatgtaaacctatagcaagcgctgtttgggttctgtgccacatgacaaacttctcagtgatttactgatttgcattttttttctctctatgaaaatttttggtccatttaggcattccatggttgtctgaattattctagaccagtaacttgagcactgattaattatgttattcattcacaaattattggataggatcaatcatgtagctgtcctttctggaaaattcatgtctgctagatactggatgattaaaatgtcatggttgtttgtcagaattattctattgttatttggggatttgttctactaggttgtctactgtctaggggcaggggctggatgatgatcatgttggtcattttgttgtctagtgtcttgtcattcaaccctgctcgcagttcaaatttctgtgggtgctggagtacatggttccgcacttgcactatagatgttgaaatgaaccagcgcgaagtgcagtcatgatgtttttgtgatgaagtattctgatgtttcatattgcgagatatcagtttccactcattttgaaattttgagtagcatgggtggtactgatttcttctcgtgtttcataagtagatcttctgtacggtgaagtcttggtaaatatttcaagaaatatggatgtgcgaaattgatattaggggtgtgtttagtttacgccaaaattggaagtttggttgaaattgaaacaatgtgatggaaaagttggagtagcatttgcccgttgcaatgggacaggcccatacaatcggggataggccgagagggtggattgaggaggtgatgagtccgctttttatgaactgtgatcgatcctgtcgttgttgctttgtactagtagtaaatggtaatgcttgacgtaatgacatgtgtcctagtggacaatgtttcaatctaagctttcaaacttagcgtgcctaacttcaaacaaacttggggtgtgtttagttcacgccaaaattggaagtttgattgaaattggaatgatatgatggaaaagttggaagtttgtgtgtataggaaagttttaatgtgatggaaaaattagaagtttgaagaaaaagttatgaactgaacctccattgcgttgtcgaactgtcagtcattgtctcatcaccatgcaatgtcttgttttgcatcacatcacgctattggtttttttgcgtgaatcagcgtaagtcggatacttcaacatgtcaatggctgtggttatatctaaagtttgatccaaacttcagtccttttttatcacatcaacctgtcacacacacaacttttcagtcacatcatctctaatttcaagcaaaatccaaactttggatccaactaaacacagccattaatatgtcattgtcctgtagcagtatacccttcaatgtttcctgattgatcattgcgtaatgcataacaacactgtcaacacatcatgtttagcccataacaacactgtcaacacatcatgtttagcccctttgaatcacaggaatgaaaaaacggagaaataggaaaaacataagattatgataggaatgtaagtgtaaaacaaaggattgcaaaacacaggaaaaacataggaatgaccgtttgattggaccactggaaaaacacaagaatttgaggagagataaagactcaaaggatttctatttgatgaggagagataaagactcaaaggatgaatttgaggagagataaagactcaaaggatttctatttgatgaggagagataaagactcaaaggatttctatttgaggagagataaagactcaaaggatttcttccatgaggttctacctcttgttaaaattcctccaaaacttgtatgggaagaggcattccataggaatttcatagtattccataggtttcattcctttgattcaaagggctttgtaggaaaaatttctataggaataaaatcctctaagggcccctttgaatcgcaggattaagaaaacgtaggaataggaaaaacgtcagattttgataggaatgcaaatataaaacagagaattgcaaaacacaggaatgaccgtttgattaaaccacatgaaaaacacaggaattggatgagagagatagactcaaagaaaagttagaagctcttgctaaattttctccaaaatctctataggattatccattccataggaatttcaaagaattggataggattcaatcatttgtttcaaagggctttataggaaattttcctataggattaaaatcctctaaaattcctatattttttctccaaatcaaaggggccctaaaatttctatgaatttcctttgaatcaaagggggccttacaaactccctgggggagagttgcagaatcgagaacgtcagtgcgtggtggttttgatccgttgatgcttctgctcgcaagagatgcgcctgcacgtttggttgaaagcgttggagaggttgcaaccgagcgccgctggatcgctggccggcctcaccggggcatcctcctccgtcggcgcgcagggcccggccggccatcattgccgccgacactgaatcacaaccattcgcaatcatgctgctgctatcactgtgcacacggttggccgatgcaggaggcggacagataccagtatccagtacatcgcatgccattcgcatgtaccgttccaaactcctccatctcacacacttttttttttcccttcaaaacgcagtagagacgtacaaattcgttttttttatgggagggaggagtagatgttaatcgtgcgtgcatatttattcatataatacacatgcacaatctacatccctataatcatctcatctcagatgattaggtcattatatcttcatatcgatgaaatcaccataggtttctcgctctcaatggtctacggtttatcacagaaaaaataattagtataaatacgaatatccttatcaagcctagaacttaaactcgaatggacatgtttcactatgagagacctaaccagttgaggtacgtttactttgttcatctcacacatttttgtgcttgagaaaaacacacactagtacatactacatactacagttctcatcccctgaagcaatatttatatacacatcacggtcgttttctggagtcgtcatcgaagaaacacggcgcaacgatctgatcctgacagtgaacggaagaggtaaaggaaagagcaaagggaaattagccaagccaggccaaagccgcccgtttcatctccggcttctgctgatgcttttgccgaaccggcaagcaacacctcgtccgcacgcacaagcaaccgagacgacgccgtccgtctctcgtccgtccgtttcccccggcgaaacggccgccgtcctctttcctcctatcggtccatgatgcgcgggccccaccgtgccgcgggacccacgtgacagagaggagcgggcacgtttcgccgtttctgcacgccgcttgtggacgaggaggggagggagtttccactgaaaccgtgtcgtcgttctaatccttttcccagtgttttgctttgctgatcctcttgcgccatatctttgcccaagacaccctcaactttacattaaatcatgtatggtcacactgctgacggatacttacgattgtttaat

SEQ ID NO: 12426 - DNA, 667 bp, Oryza sativa
ttacatttgaaaaacaggggcccagcatcctcattcattctattgcatattatacatctactgtccagatccatccctctttgttgcaaattaactctcagcgccaaaatgttatgactgaatctccaaatgaaatgcttaaccttccctggtagctgcatcttccatactttcttccagtacatctcccgttcagtgctcccatttgacaaacctgcacttcccctctttcttctctgtaactccccatctcgctgcaccttataggctgatttcactgagaacaaacccttttcatcatagtgccaggccaacatgtcatccatctcgatgtgcaccggaatagtacggatcatattaacatcttccggccagaaagtctgtgtaagcagctcaacatcccaactacctgtacttggatctattagttcctccactcttgtgacaagatttctccctcttggtgtgatcggccgtctcgtatgatcacttgggatccatgggtcagaccagatattaatggccgccccatttccaactctccatatcatgccatctctcagagtcaaaagcccccggcatatactcctccaggtatacgacatgtttgcacatttctttgcactgaaaatattcccactcgggtagtattttgctttcaaaacct

SEQ ID NO: 12427 - DNA, 2428 bp, Oryza sativa
catgttgagctggtttcagcatctcccctcctatttcgcccccttggggctgattctttcccgcactaaccatctccttctcaatggaaaacaatgctttcttagcctgttcaggtttgtgcatctgaaccgatttctttacaggactcgtcacttcctcctcctccccatttctggcctctcttccagtaactactgccccagaatccttcctcctccaagatggtgcatcactccccctactactgctatccccagatcttctctgcgctccccccccttccacccaattgtctcatgttacttccctcctcccacctcctcttttctgggatgaaccgcagttttttgctataacgttgctcttctccctcctttagctgcacactacacactttatcagtatgctatatgatcccacatgtatagcagaagtacggtaggaactcatacaccaggggacaccatatctccttcttccccttcgccaaactcagagttacaccacgcatcaggggtttacgaatatccagacgaacctttatacgaaggaactgccccacagcagtgccatccttttccgactccattcgcatgaattcacccacctctcccccgatcgctctccctatggccttgttcatcatgcataaaggcatctttgaagccctgatccaaataggaacaaaggcaaacaccatctcctccaaaacctttgattcatcataatccacgacgatcaccagatctttaccaaacatccagggtccatcctccagagcatgccgcttcccggatgctgatgaaaggtaaacaggaaatggttctcgcctagatctctgcacgttattcccctaatcagacaccagatcttccccagtgcttgcgccaaaccctccgcgttcaccactttctccgccaggaccttcccgatcgccttcggatcccctgatcccatacttccagactccgcctcgcagatccggatccccttcttctctgcctccgacaattgcatgcgcttcatcagtgcctgcatcgcctccatggtgccctccgaaccctaaaactacccctccccggctagcaaggtttggctcggctccaaaacagagaatctaaccgtggacacagaggaaggatgggatgtggactcaggatctagaccgaagagatcgatccgactcaggatctagaccgaagagatcgatccgatcaggcatgagaccgatggggttgagagaagattgaaaccctacccacgcagaacccaccttgagtcgcctaggaaccctaggcgccgaggacatggttggctaaaataaatttaatatcaaagtgaacacatggtacacatatcagatattaaactgataagaacagatactacacttgatcttagccaaaaggccgagaaaggtatgatttggttacaaaccctgggtcatctcatatacccatgtctcctctccaatcaggtctagggcgcgaggtgggactaatataaaaccacgcagcatatatgccatgttcgagcctgattgggcctcagattgacggcccaaaagaatcagtatatgtgggcttctcccgtgcgtaaaagcccagggcttcgtatgccgtgagcaacgaggccgagaccgagacgcggtcgcgcgctgccacgccgaccaacttcgcccacgcacgacgcgacgcgacgcgcccaccgcccaccacgccgtccgctggtcggcgccgtcgcccccgcccgcgccgcgccgcgccgcctcgcctgtccgccgtgtcatgtctacgtcgaacacgcacgtgtggccctgcgctttgcgcgtggaagctatagcgatctctccttctcccttgcgtacgtgttgctcgtgcgcacggcgcgcgtcgcgtcggcggcgtggcgtgtcgcccagcgtgcgtgcgcgcgcgcgccaccgcggcggcggcggcgaaagtcaatggcgacgcatgtcagcgtgcgtgtgaaacgaacgcgacgccgcctcgcgctcctccttccttgcaagtaaacgcttcatctgtagtgtaatagtagtggatagattaatagggataaacaaaatctccttactacctactagctgcctttgcttctagtactgattgttctttataatcttttagtacgtttcatcaaagtttcttacttcaagaaatgcatttcattgctccacgagaaaccgtgcaggtgcgtgcttaaattttatcaacagctgtaatggaagtctttcctcaaagtcaatttgattatttcgaatacactcatatatatacataaacaacaaagcaatcataacaccatgcgtctaccatgtaataatgtatagtatataatacctgtatttgtcattatttagtggactctgcttagttctcctaaaataatatcaaccagtgc

SEQ ID NO: 12428 - DNA, 1584 bp, Oryza sativa
ccatctggtcctggccccttcaggtctccaattgaatctattgatgtctttatttcttcgacaataaactcagccattaagcattcattcatctcttctgttactttcttcttcactttgcttaagaggcgctccgggtgctgacatccattggactggaacatatttttgaaatactgcatgatgaaacttttcttctcctcttcactctccacccagcttccatcttcctttttcagtcggccgatcctattgcttcgttttctctctgaacacgttgcatggaaaaaggatgtattgcggtctcctttttgcaaccatgccacatgcgcccgttgcctccagtaggtatcaacctgctcctccagtttctccagtttgtatttcagcaccccttctttcaccaccttctccttgcagatatttcccctgcggcacgcttccagttcctttttcagcttctttattctcttttccagatcacccaggacgtttgtactctagtttgacaaacctgaagctaccaccttcaccgcattcatcacatccttctgccaaagttgaggccatctcccaattctcgctcaccacttccctgcacttctcttcagccagccacgcagcttcaaacctgaagcttgatgatcccctctgcattacccccttccttcccccacatgtagtaatgatcactggccgatggtcagagtgcctcggatccccattgacaacccgaaagctcggaaacttcaccctccattcctgatttgccaccgcccggtccagatgctccctaatatagccctcttctgtgtggctattattccgccaggtaaacatgtctccctcaaaaccgatgtcaatgaggccacaatcaggtaaagtgtcccggaacttgtccatctgaggttggcacttcggcctacctccctgtttttctgcagctacgagtatctcattaaaatctcccgccatcagccatggctgagctggattcatcgccaagcttcgcaaagtgtcccatgtctgaatctaagatcactttgtgcctctccatacacccctataaatctccaacttccaccacccccctcttcaatatccacatcaatgtggtactttgacatgcttctaagagacacatcaatcctcctcctccataacactgcaattcccccccttccttgtccttcacaatctttcaccaccatattaaccaaacccaacatccacctcagacactgcattcttctcttgtctaattttttttctgacaagaaaagaatatcgatcttttccgacttctgaagatccagaagtccccgaactgccgggcggtttcccaacccccgacagttccaagccactagcttcatttcttcccgcaggactggatcgcaagtcccgcttccattgggttttgttcctcactattctttagctctccctccttccttcgctttccgaaacttcctcccctccctccatctatcttctctttcccgggatcaccgtccccgagcctgctggcaaaatcttacctctagtctcccatgtcattcttttgaaagttttctgtttgct

SEQ ID NO: 12429 - DNA, 2534 bp, Oryza sativa
caagcacgccaaacacatgtttaactttgttggcaggatgctccttgagtggtgattctattgaactgttgtgaacaaactaattattggatgctgaattgatgagtacatacgtatacgtatacgtatataccaacaacctacctcagtacctctaattggcccgttggcttttgtttcagaaatcagaacaacattttctctacatttcaaatctaattcatcagtaaggatcatcaaaatcataatttgtgctaattagtaattttcatttgttttgcatagtagtgccgcatatcgatcagcttttacaaatcattgtgacatatacatttttcagtgtagtataaatatagtaaggcaactacacgattgctattggccagcaaataagagagttttttctcttttttttaataatggtatgaaacatcccggcctttgctcacaagagctatagtccattattacaaaagtagcacactaaaaagcttagtccaaagagttataaggctgatgattcctgcacgttaatgctaataagaaggcagcggaaatcacaccacagccaagctgtattaatgtccaaacctccaaatcgctttgcgcctttcaatttgcaattatttctcttgcctatgttttcattttgcaattatttttgtgctagacaacaaataataaatgaatcaacttctgtctatttataccatttccatgaagtgctcgacaactcacacccatggccatggtgcaatacgtcaccggctacctgtgcctctccttggctctcctcttgctcactctcgtcctccacaaggtggcgaggaaggcgaccggtaatggcgccggcaagccgaggcttccgccggggccgtggcggctgccggtcatcggcaacctccaccaggtcgcgatgggcggcccgctcgtccaccgcaccatggccgacctggcgcgccggcacgacgcgccgctcatgtcgctcaggctcggcgagcttcgcgtcgtcgtcgcctcgtccgccgacgctgccagggagatcaccaagacgcacgacgtcgcgttcgcgacgcggccgtggagctccaccatccgcgtcctgatgagcgacggcgtcgggctggtgttcgcgccctacggcgcgctgtggcggcagctccgcaagatcgccgtggtggagctcctcagcgcgcgccgcgtccagtcgttccgccgcatccgggaggacgaggtctgccgcctcgtcgccgccgtcgccgcggcgcacgccggcgcagcccgtgaacgtcagcgagcggatcacggcgctcatctccgactcggcggtgcgcaccatcatgggcgacaggttcgagaagcgggacgaattcctggagggtctcgccgagggggacaggatagcctccgggttcagcctcggcgacctgttcccgtcgtcgaggctggccagcttcgtcggcggcacgacgcggcgggcggaggcgaaccaccgcaagaacttcgggctgatagagtgcgctctcaggcagcacgaggagcggagggccgccggcgccgtggacgacgacgaggacctcgtcgatgtgcttctcagggttcagaaggaagggagcctccaagtgcccctcaccatgggcaatatcaaagccgttatccttgtaagttgacaagtacttgttcttcacctcttccccttttcccctgcgaaatcactaatacgcgatcggtcgctgaaatctcggcgaggccatcggttttttttcttgccgttacctttccatttttgccagactcctgtgctcgagatctttgttttttccgtcgcttttttggctgttttttttctgttaccgaatggtgacgcgcggcgatcagcccgttccccatgatcctttttttttttcactcgcattacttttctgtttttagtaagtttatataactaaaggtggtacacatcaaatttacacaactaaaatttatatacccaaagtttatacattccaaagtttataggttaaaagtttatatacccggttcaaatttgaattcaaatttggattcaaatatatttatatatatatatatatataatatttctatacataaagtctatatgtacggaatttcatcaagtttatacatctaaagtttgtatacccaaagtttataagttaaaagtttaaatagcctgttcaaattaatttggattcaaatatttttttatatagaatatttctatacataaagtttatatgtatgaaatttcatcaggtttacacatctaaagtttgtatacccaaagtttataggttaaaagtttatatacccggttcaaattcgaattcgaatttgtaagtataaagtttattcacatgaatatatttttcaagtgtattagatttctttttatattttttaaatggtttaaaattgatagtgtggtagaaaggggagacgtgtgcggggagggacgcgggtgctgatagtttttttttatcgcttaaccctccctccagcgagcgatcgcg

SEQ ID NO: 12430 - DNA, 2156 bp, Oryza sativa
tatagctatttacgatgggatttgactcatcttagaatatagaatttgaagagacctctgctcagattcgttattataggatgagtcaaatttcattctaaatagcaatattttaatattttagaacgagaacgcggtagcatcccagtatgatgcagcatgtaaccgaaaatgctgccattgatgacaaagacaacctggaagattactgttgcactttgtaactgaactaccgaagctgatggcagcggtagtagaattcttgaattgtctgttcatgatgccctgcaagctaatgcattcagttggagtgattaaagtaggcaataataccatgagtaatgtcattatttgtatcggacaaaaaaaatgtactacctctgttctaaaatctatacataatataactaaaatataaagatagaatcgaatagaaacaaatctgagcacgtctgttcaaatttatcgtattaggacgtgtctaatataataattataataatgtatcttatgttttgggacggataaagtaaattacttgatcagcacactctggtgacatgacagctgtaaagttgactactgaattcagtggaaagaccgtgagcattattgttcacggctgaacacaaatctgtgggccacatcgtgaccttctccggggcccacagaacgcaaccgggcccttctttgggcccaaggaaaaatgggctgctcttttgggcccacgtgggccattttgcctccgttttgggccggccgtgaaatggctagagctgaaattgcaggtgttgatgacgatcgaaagctggatgctaattcaaaaaaaaagaaaagaaaaagaaaagcttggatgctgcacttgtaactgaagctggtgacagcaatagtacaaccttgaattgtctcttctgatctgctgatgcatttctagataatgcatatccagcagatttgggtgattaatccaagtaatgatctcactccactgatagtggaaattgctggcttcagcatcaaaaactgcattgtatgtttgttttttcgttcttttttttggcattgtttcagcttctttatatgaagtacaaattctacactccagcttggccttaaagtgatcgaacacctagcttgcacggccatggcgcccatggcgcaagatgtcgccgagtacctgagcatcttcttggctctcgtcgtggcccctctcctgctgctcagggtggcgaggcgggcgcgcggcaatggcgccggccggccgaggcttccgccggggccgtggcggctgccggtcatcgggagcctgcaccacctgatgggcaagccccacgtgcaccgcgccatggccgacctcgcgcgccggcacggcgcgccgctcatgtacctcaggctcggcgaggtccctttcgtggtggcctcgtcgcccgacgccgcgcgcgaggtcctcagggcgcaggacgccaacttcgcgtcgcggccgtggagccccaccctgcgcgtcatgatggccgacggcgagggcctcgcgttcgcgcgccacggcgcgcactggcgcctgcgcaagatctgcgtcctcgagctgctcggcccgcggcgcgtgcggtcgttccgccgcgtcagggaggaggaggtggcgcgcctcctcgccgccgtcgccgccgcggccgcggccggggccgacgccgtcgtgaacgtgagcgagcgcgccgccgtgctggtcacggacacgacgtgcgcgccatgatcggcgacaggttcgagatgcgggacgagtacctggagggcgtggccgaggtggggaagctcctgctcgggctcagcctcggcgacctgttcccgtcgtcgaggctggccagcctcgtcagcggcacggcgcgccgcgccgcagcgagccaccggaagatgttcgagctcatggactgcgccatcaggcatcaccaggagaggaaggccgccatggacgccgacgaggacatcttggacgtgctgcttcggatacagaaggaaggaggtcacgatgccccgctcaccatgggagatgtcaaggacaccatacttgtaagcaccatggtttctctcttcactctacttattaattaattgtctttcatttcatcattgtgatacttcattgttactgctacatatatgta

SEQ ID NO: 12431 - DNA, 1937 bp, Oryza sativa
gttgattaatttatctgacatctcttattaggatctttttgctgctgggacggagacatcaacagcaacactccaatgggctatgtccgaggtggtgaggaacccaagaataatgcaaaaggcacaagccgagctacgtaacaagcttcaagggaagccaagtgtgaccgaagatgacctagttggcctaacctacttaaagctcgtcatcaaggaaaccctaagactgcaccccgccgcaccaatgcttgtcccaagggagtgtggggagtcgtgcaaggtgctagggtacgacgtgcccaggggcactaacgtgctcatcaacgcgtgggcgattggcagagaccccaattactgggatgacacggagacgttcaaaccagataggtgtgagaataacaagtataactttagaggcaccgatttcgagtacataccgtttggatctagacgaaagatctgccctggtccggcgttcacacatgccatcttggagctcgcgctcgccgctttgctgtaccactttgactgggagctcccctgcggagttgctccaggggaggtggatatggccgaggagacaggcgtcgtcgttcgcccgaagaacgacctctacctgcgtccggtcgtccgtgtgccgccgggagctgcctcgagcggcaatggtggcacctagccgtgcaccgcatctactacctagccttaattatgtgaaaatgtaacctggttggatcgaatggattaagtgctaaataaaatggtttatgtgttcatgtttgtttgtgttcgtcacatgtcacatgcataagagagagaatcagactatcagagaaggcgaggtccagaagcaggatcaatgttatgcaccttgcaatgtcgatagcaattggcattagtcctaaactgctcagtcatcgtgcaggatattggtgcaggtatcccatagagtcatactctggttctgtaatcaccaggcattcagaaatcaaaaccgtgaaaactaaagacaggcatattcatgctccacataattctccaagaagaaatttggataaaaatattgatataaatttttaaaagtacggaacaatggaaactttcatctgataagcattcttttatcggaataaatatatcagtggatacgtacgatacaatgaacagatcctctcatgctttgtataaattgtattacatgctactacaatacagtgaacaggtcctttcatactttgaattacatgctacaatacatctcaccatactttacatacaatcaatggtctgagagaagggtcaagcactcaagcttcctggtgcacacattaatctacacctcaattgatgcttcaccgttgcttgcctttctccattttgaggatcgttgcttgtttatgatttggacgtaagggtgaatagtctaagtgtctaaccacaccatgagcaataggtcaaccccttgcatcatatgatatcttggtatgattgagtataagactatgagagggaatattgccctcaagatctgttaaaagacatcaggagggaaacgcccaggcatagaattgttctgctgagcttgcttcagatgcactctaagtgcataattatttatctgcaatgttaaatatacttatgtaagaacaatcaaaatcaccgggagtagtgttcgggacaaaagaatcaccaggagtaaggagtagtacctcaagagtttttatctgttcctgatactgcaaaaccagttgtttcaggctatgaacctcctgagtcctctcgtcaaactctttttgacgttcagttggatagcaaccgccctcttcagaacagcgttctctctcagatatattgccagttgctccttcagcatcacattttcctgcaggaaagcaaagcataactgcttaatttgcctaggagtacaagtactatggatg

SEQ ID NO: 12432 - DNA, 545 bp, Oryza sativa
aacagtactagaattgtttccaagaccaaaccaaacaaggaaatggatatgattcttgatgctgaaaaggaaattgccgggctcttttcgttgacagaacagctcattaccgaggctggaatagatgttgcatcaccaagcatagcttcagaacccagaaatgtatatcatattgcagttttgcaacatttagatagttgctgtgaagattcagctgaaattgttagcgttttcatttcttttgctttgggtctcatcgccctgtttgctgttggattgctctgctccaagtgcgaaagggagacatcgatgttgatatgcctcttactgtttacatgatatattgcatctgctgaaatcctagaaaaaaaatgataaatttgtgatccaaaaccccttctctagtcagccagtggcggatttgctgacaacctaggcagctgcctgtaattcatattctccaaaactccttcagaccggagttaatgaagatatccaaagcctgtaaaattgttgctgattttggagaggtgagaaatagtgaa

SEQ ID NO: 12433 - DNA, 651 bp, Oryza sativa
ctgccgccgccgggccttgtcgtcctcgtcgtcgtcggcggcggcggcggcgtcggcctcctgatccggcgcgacgaacagcacgacggggccgagggggacgtcgtcggtggcgacgagcagcggctcgagcgcgtcgacgacggcggacatgtcggggcggttcttggggctcccgctgaggcaccggtaggcgacggcggccgcctccctcgccgccgccggcgagtagcgcccctccagcgccgggtccatgatccggatgagccggagcgggtcgcgcaggcacggccgcgcgtactccacgaggctctgctccctgttcggccgcgtcttgtcgacggcgcgccgccccgtcaggatctccaggagcaccacgccgaagctgtacacgtcgctcttcgccgtcaggtggccggtcatgatgtactccggcgcggcgtagccatgggtgcccatcacgcgcgtcgacacgtgggtgtcgtccccctccggcccgtccttggccagcccgaagtccgacagcttcgccttgtaatcctggagggagggacaaaattcacaggcccaaaaaccattagcccatttgatgcgattctcttacttgggcttattactaatgaatgggctttaaagtgggggaaattcaag

SEQ ID NO: 12434 - DNA, 680 bp, Oryza sativa
gagattcatgtttcagatacagaaaatgcttgagcttatggggtggttttccatagattgttcagtggctctgtgacctaatcagtttctagttgcacatgataactgaaaaaaaatacagcatgctatttgcatttgttgtagtcattcacaaaaaaacacgactaacttgtgttatgatgaaaagagctatttaatgaactgcaaaaaattcctagaataccttgtgtgcaaagaattgtccagctggatcacatgtgaagagctcgggggttcctttctcttcatcaattccaaagatcatagaaactgcagaggaaaatgtgtaggatcaaagtaatcattgtaatcctttgatggtagacgatgatggcaggtttcaccactcacaaaacacaaattggatagcactaaccaactccataaggtcttatctgagcatgctgggtgcggatctgtgctctgtctgcaatcctacaaacaagcaatgatacaccactagtaaaatgcagaacagttcagtgaaattagtaaacaacgttaggctattgaagattgaacagagtaatgtatccacgtagcttaacaaaataagggtaggtttgatagtaaagcacgagcatatgcttatcagaattcagaaaagttcccagcccgttgatctcatatgaactctcacc

SEQ ID NO: 12435 - DNA, 579 bp, Oryza sativa
atcatcggctgttaatgcaacaatctcaaccttgacatctttgatcatcggcttatatcccgatgccccttgggccaaatcattagcttcaatattttgctctcgagatacatgcttcaaggttaccatccgaaactccttcatcagctctcggcacttctcattataaatcattaacgtataatttttgcactcatactcccctgccaattgactgatcactagcaaagaatcttccataatttcgatagcatcggcttcaacttccttgagtaactgcaaccctttgagaactgcctcatactcagcttgagtgttagttgcataaggtttaatagtataagcaaactcaaaacttgccccccgaggagaaattataaccaagccgataccacaaccatgagtgcatactgatccgtcaaagaacaaagtccatggcacaacctcaaccgagccgattgaatcatccgatgaacacaataaaatcggctatagcttgccccttgactgccttcggtgactcataccgaagatcaaattctgttaaggaaaatatccacttttcaacccttcctttca

SEQ ID NO: 12436 - DNA, 1915 bp, Oryza sativa
cgatatggacatattttgtaattctcgggtataaatagacccgagccccatgtaatcaaactaacacacgttcaatacaatctcggcgcatcgctaccctttttactttcgttttgtttcgacgagttcttactttcgggttgagctgcatcggtttcgatcttcaactattgttatggcgtcttgcgttctcgggattagtgcttccatctttatgatactctaatcttgtttatataattcgtcgagttatcatatatcccatataatctccggcaatatcgttatctaacctccaatcggctaacgtctgttattagaaggcagccgattaggttaaataccgacgttgacttagattatataggatattcaccactctatgaaacatccaacggtttgattgtctagatattgtccttcttttcatacttatagctgcatcagttgggtttgaccttataagtcgtgattagaatctcaatctctagcctgcttttggttgccgattagggtagcatcggagtttcagccgatcttacctgatttaactacatttatcttatatgcttgattgacatgttaaatctgtcctttatgattaagatattgttgcatttatgtatattaggcttttgtttggtatattttacttgctttgatatcttaatatagagtactagtatcggagtattagccgatacatgctagatctatctgatcggctatgctatgaacatatatagtcttgttgttaatatatatttcgatctaagtgatttatactgtctcggcatggcgaccgatatatcccaatcacttgatttaagtatatatcgacatagagactatatattgttaatatctatagccgatcgaatagatttagttctttcttacttattcatgactgccgatcgattcacatatgacatcggctcaaagataaatgatatgtcatcggcaactagccgatcggctatcgtttatgaatttaaccgtggtttctttgtctttatttcttgttgattgcaggatcaaatcaactggcacgctcatacacctaaaagcaagcttttgaacctgcacttgagttaagcagatctcccaggcctcgtgttttcacatcaacatcctttacctcgtgaaattatacgtgaaaattctctagttattatattccaaaattttctgctcgatttggacaatttttctttggaaaatatgtggtttccacttctatattatcaacaatagcaacatgctcgtatagtccagcatgccaaaaaaaaaaaacatgcccatacaacttgtggaatgaattcaaaggccgtgtgcttaaaatcaattgcgttatctgtgattcgctctagcttgaactccttgggcagcctttgtcccaatatttagggtccccaaaaatcacctacacgttgataaatgcggtggtgtcttttgcaaggttttaaatctcctgctatagctatacaactatcccaggagatagttgtttgaggatctagctatttgctcccatgtactataatttaacaactatccggaggatatgcgcggcggcctcacggctacaaagccggcaatgtcgcgactcacgttcatgtacacactgtcgatcggtttttagcatcggttgcacttcgatagttagctgcctcctgttggagtcaatgaactatttttgttgattctcccgtaagtaaatcgcagtgccagaaatcacagcaatgaaacatggaaccttattaagaaagccaaacatagaataagagatttctgtcggtttattaaagccgaaacgagcagcgaggtacaacttgtgcgacctcatgtagaggcatcacaagcacacatactgattgccacatcaaggacggaaggtgctatgcggtaagag

SEQ ID NO: 12437 - DNA, 1549 bp, Oryza sativa
ttacttcatgctgctcgtcgacgacctctcccgcttcatgtgggtaatggttctcggcagcaagggagaggttgcggacgccattaggcgcgcgcaggctgctgcggaggcggactgcggcggcgaattcacgggcggctgaattcgcatcgtactgcgctgatgagtgcattcagcaccactacttcgcgccgtacagcccgcagcagtacggcgtcgtcgagcggcacaaccagacggttgtagggatggctcgagcactcctcaagcagagggggatgccggccgttttctggggagaggcggtggtgacggctgtctacatcctcaaccgctcgactaccaaggcccgtacgaggcttggcatgggcgcaagccggcggtctcccacctgcagtttttcggttgcctcacgttcaccaaggagatcggccacatcggcaagctcgacgacaggagcaccccaggggtgttcatcggctaagcagagggctcgaaggcctaccgtattctcgacccagagacacagcgtatgcacacggcgtgcgacgtagtgttcgacgaaagacgagggtgggcataggacaaggcggtggacgacggctcgactccaacgtacgacttcactgttgagtacgtccacttcgagggagctgggggagtaggtagctcttattcactgagtgtgcctacctagcccccgagcctccaccgactccagcagcgacacgctctcgagctacgacttcggctgcaatgagttcttcgctgacaccatcacaaccggcgaccccacgcactccagcaccaacagccacccctccgggcacatccactccgacgccaggttgtgtcaagcacagcccggtggagttcgctactccgctctctcacgacgaggagcgcatcgacgcataccacgacagtgagccgctgcggtaccgtacgacgggagcctcagtctttcgcagaggccgagagacacgcagcatggcgtgccgtgatgtagtcggagatggacgcggttgaggaaaaccgcacctgggagcttgttaacctccctcgtggtcaccgcgcgatcacccttaagtgggtgttcaagctgaagagggatgaagccggagccatcgtcaagcacaaggctcgcttggtggcacgcggtttcgtgcagcaggaggggatgccttcgcccccgtggtgcgatccccggcaaggagggcaaggtgctcctccttgcgctggctgctcaggaaagctggtgcgttcatcacatgaacgtcaagtcagcgtttctgaacgacgacttgaaggaggaggtctacgtacaccagccgccaggatttgcgatccccgacaaggagggcaaggtgctactcctgcacatggctctctatggcttgtggcaggcaccgagggcgtggaataccaagttggattccacgctcaaggggatgggcttcgagcaaagcccgcacgaggtagccatcaaccggctgggcaatggaggaaatgtcctgctggtgggtgtctacgtcgacaacttggtaat

SEQ ID NO: 12438 - DNA, 1692 bp, Oryza sativa
cgaggagtcagtcaccagttgactagctgttcgattcggccatggccaccgagctcactgagtacttgctgctcctgccgcttctcgtcgtaccgctcctctacctcgcggcgtcgtcgtcgcggaggtcggggaggctgcggctgccgccggggccgtgggcgctgccggtgatcggccacctgcaccacctcgccctcgccggcgcgcccacgcaccgcgccatgcgcgacatggcgcggcgccacggcccgctcatgctgctccgcttctgcgagctccccgtggtggtggcctcctcgccggacgccgcccgcgagatcatgaggacgcacgacgtcgcgttcgcgtcgcggccgatcgggccgatgctgcggctcgtgttccagggcgccgagggcgtgatcttcgcgccctacggcgacgggtggaggcagctccgcaagatctgcaccgtcgagctcctcagccaccgccgcgtccactccttccgccccgtccgcgcggacgagctcggccgcctcctccgcgccgtggcggatcaggccgcgtcgtcgtcgtcctcgccggtgaacctcaccgggatgatctccgccttcgtcgcggactccacggtgcgcgccatcatcggcagccggagcaggcaccgcgacacgttcctgcggctagtggaggacgggctcaagatcatgccggggatgagcttgccggacctgttcccctcgtcgcgcctcgccatgctcctcagccgcgtgcccgacaagatcgagcgccgccgccgcggcatgatgggcttcatcgacaccatcatccaggaacaccaggagagcagagccgccgccgaagacgaggaccttctcgacgtgctcttgaggctccagaaagacatggactcccagtatcccctcaccaccatgaacatcaaatccatcttgatcgtaagctctcctccccgaactccggctacttccccctcgtcaaaaacgaaatcctcttcatgtaattcgctcgaatccaggacatgttcggcgcgggcagcgagacgtcagcgacgacgctgcagtgggcgatggcggagctgatgcgtaacccggcggtgatgcgccgggcgcaggacgaggtgcggcgagagctcgccgtcgccggcaacgacagggtaaccgaggacaccctcccgagcctccactacctccggctggtcatcaaggagacgctccggctccacccgccggcgccgctgctcctgccgcgggagtgcggcggcgcgtgcaaggtgttcggctacgacgtgccggccggcacgatggtgctcgtgaacgcgtgggcgatcggccgggacgcggcggcgtggggcgccgcggcggaggagttctcgccggagaggttcgagcggtgcgagagggacttcaggggggcggacttcgagctcatcccgttcggcgccgggaggaggatctgccccggcatggcgttcgggctggcgcacgtcgagctcgcgctcgccgcgctgctgttccacttcgactggaggctgccgggagggatggccgccggcgagatggacatgacggaggcggccgggatcacggtgcgccgccgttcggaccctactggtgttcgccgtgccccgtgtccccgtgccagcgcagtagacagctggtgtatcttatttaagccaatatgagtaatcgc

SEQ ID NO: 12439 - DNA, 1166 bp, Oryza sativa
gttgtgtccagtgtggttttgacgtgagatgcacggacacagcgcacgctgaacatgtgcacatccgtgcagggcttcgtacttgtagaacgcaaacctgttcgtccatgtcgcgttctcccagacatccgagccgtgtcgatcgcgtgagctgccatggccggcgaactcgcgttctatctgctcctcgtaggtctcgttgccgtgccattgctcatcttgctcggctccgagcggcgcacggcggcgaggacgcggctgccgccggggccgtgggcgctgccggtggtcggccacctgcaccacctcgccggcgggctcccgtcggaccgcgccatgcgcgacctggcgcggtggcacggcccgctcatgctgctccggctcggcgaggtggaggccgccgtggcgtcatcgacagacgcagcgcgggagatcatgaggacgcacgacgttgcgttcgcgtcgaggacggtcgggcccatgtctcggctctggtccagggcgccgacggcctcgtgttcgcgccctacggcgaggcgtggcgccgggtgcggcgcgtctgcacccaggagctcctcagccaccgccgcgtccagtcgttccgccccgtccgcgaggacgagctcggccgcctcctccgcgccgtcgacgcggcggcggcggccgggacggcggtgaacctcacggcgatgatgtccacctacgtcgccgactccacggtgcgcgccatcatcggcagccgccggctcaaggaccgcgacgcgttcctccggatgctcgacgagctgttcaccatcatgcccgggatgagcctcccggacctcttcccgtcgtcgcgcctcgccatgctcgtcagccgcgctcccggccggatcatgcgctaccgccgccgcatgcgccggatcatggacagcatcatccacgagcaccaggagaggagagccgccgccgacgccgccggtgacgacgacgacgacgacgacgaggacttggtcgacgtcctcctcaggctgcagaaggaagtgggcgcgcagtatcctctcaccaccgagaacatcaaaaccgtcatgatggtaagctcgacgccgccatggccgaacaccgaaagctcgacgcgcgcgccaaagatgtctccaccatttttctccctcgcttctttcacagga

SEQ ID NO: 12440 - DNA, 2192 bp, Oryza sativa
ctttttgcttttcagtgcatctttcttttatgacagcatctcctttcacttttactttttagagtagcaagccagctataaatatatatcccaacccccctcccctgcgtgatggtatggcacttgtgagaaataaacagaaaattgccccaactctccttcttgagctcccctctgtcctcagtcggcagcaggaacaccggctgttcctacttatccctcttcccctgcgctgacgagcagcagctcctcaaaggcagtctcttccccacgcagcagcccctagtggcgtgccatgtccgcaggacagtctcagcgcttggtcgcctcgagcgcgcggctccggcaggaggccgagttcaccgcggcagaggaacgcgagcgagtggtggtagagaccgctgcgacggcagcgagggcgtcaaggctggcggcagcaaaattggcaacggtaagggcggaagtggaagcggcggcggcggcggcacgacagtagcaccaacagctctatctccgcctacggcagctccgatgatgagctgacgagggaggcagctcgtgagcgggcggagcagtgggcagctgcgcaaccccacgcgcgcaatggcggcagcttagattggcggggatgcatgtggcggcggcggcccagacgggcgtggacgcgcggcccggttgggtcgacggagatcgcagccgttgcaagtggcatggctctccctcaccggaccggtaccatggtcaccacaggatttaggccgtcatcagggaagtcggccctggcggtgtgtggctaaaccctaccctcaccaagaccaactacgtcgagtgggccgtggtgatgaggataaggctccaggtgcgacacatgtgggagccagttcggcacggcgacgtcaactacgacgaggatcaacgggcgcccagaagcggactgccaaggaggcttgggacgccatcgctgcggcacgcatcggaagcgaccgcgctcgcaagtccacattgcaggcacttcgcaaggagtgggagaacctggccttcaagcccaggtgaggatgttgatgactttgccctccgtctcaacactctgctgtagaagttggtgtcgtatggcgacgacacctacgatgaggagagagccgtcaagaagctcttccgctgcatcccagagaagtacaagcagattgctcgctcgatcgagtctctgttggacctctccacgatgtcgatcgaggaggcgataggtcgcctcaaggtcgtcgacagcgacgagccacagcctctctcgaggcttatcaccattggcaggaagcttcatctcactcgagagcagtgggaggcctgccagggtgacgggaagaagagggagtcctcttcctcgacaggccgcaagcgcggcaagggacacgtcctgcgaggacgcacccagggtggcgcccgcggaggcgcctaagccggcgcgagatgacgcctgccgcaactatggcaagtttggccattgggccaaagactgccgacagccacgacacggccaggccaacgtcgcacaggtggaggaggaggaagagtcggctctgctcctggcacacgcaagcatcgagctatctccagcggcaccggccgcagcggctttcctccaacttgatgagccgaaggtacgcgccttcctcggagatggctccagcaacgacaagactgatgagtggtacctcgataccggcgccacccatcacatgactgaccgacgggagttcttcaccgagcttgactccagcgtctgaggttccgtcaagtttgggggtcggctccatcaccttcaccgccaaatccctgtgctcaccggagtctactacatccccgctttgaggaactctatcatcagcgtgggacagctggatgagaaagattcatgcttgttggtcgagcacgaagtcatgaggatttgggattgccgtcgttgccttcttgccaaggtaacctaaggcaccaatcgactctacgtcttcaacgtgcaagtggcacaaccggcctgcctccacttcgaggccctgaacggctcagtgccaaggagatggtgcgaggcctgccgtgccttgaccacgtgaagcagctctgcgacgtctgcgtgttaacaaagcagaggcggctcccctttccccagcagataagcttccgagccaaggagcggctcg

SEQ ID NO: 12441 - DNA, 932 bp, Oryza sativa
atctgtgtgataatgttagtattatattagaatataaaattcatgctaaatggtagtaagaaataaatttacatgtacaagaatataaaatggatggtaactagtaagagttaaatgacattaacatatattgcaagtctttaattgcacctctactacttgttttatgcaacatgacttcatgaaagtttcaaaattttcccctgcattctataggacctttttggtgccgggagtgagacatcagctaatacactccaatggactatgtccgagctcgtgaggaacccaagagtgatgcaaaaggcacaaactgagctacgtgattgtcttcgaggaaagcaatcggtgtcagaagatgatttgatcggattgaaatacttgaagcttgtcatcaaggaaaccctaaggctgcatcctgtagtgccactgcttcttccgagagaatgtcaagagacatgtaacattatggggtacgacgtgcccaagggtacaaacgtgctcgtgaacgtctgggcaatatgcagagatcctaggcattgggaaaatgctgagacattcataccagagcgatttgaggatagcaccgtagactttaaaggcacagactttgagttcataccatttggagcaggacgaaggatgtgccctggtttggcatttgcgcaggttagcatggagcttgctctagcctcattgctatatcatttcgactgggaactccctagtggtgttgcgccaagcaatctagacatggaagaggagatgggtatcaccatccgaaggaagaatgatctttacctggttccaaaggtccgtgtgcctctatagtttggctcgtaactgcttcacacaatatgtgtctcctgtgacccgtacctgccaagtagcgatcatgagcattccattgtgtttcatgcccttatggtgtt

SEQ ID NO: 12442 - DNA, 1331 bp, Oryza sativa
aaacataaaattaaaaccgactcaaacatgatgacggaccgcggaaacatcttcaatttttataatagtagagataggtactaaaccagctcaataactgttacaccatcagttataaaatactcttattttttggaaagtttaacattgaatttttttactaataattaaattagtaacataggtttgacgtcatacatgtagcgttattagatccgtatttaaaaaatatttttatatgatgttaattccgcattagttgataatatattatgatataaataaacggtcaaattgtagaccatgtaaaaagctaatacgcctcgtatttgagaacaaagggattactagtctgtcagtttctttcaccacattcctaatatctgctgcatttttacatgaaaaattactttaagtgctttattgaattattactgatcaaacaaacgatatatatacgtttacacttattattgtttttctactgagctggccttggcactctcaaggcctcagccaggatgtagcagcatcagatggcatgatctgcagtgtcgccattatcaggagcagtgatgaagcaatcacttgatcaggatgcacctgattggtgagccctcggatccaaccagcctcagaggtaagcaatgcagcatgtagattccagccttgacatcgtctagcttcaggccttcgactaggatgatattctgaaagaacaaattcagcaaatcaaccaatggttacagccagtaatataatcttgcatgctagattcatcgtgctctaaatcacccattcatgaaggtgtaaacattctttgcagcaacatcaaaacagagtaaagcaagcactgtcccaaaacttgtcagtaagtaatgcagcaatggcatgctttcaaagttactccctccgttttataatgtactttctccgtttcacgatgtaagtcattctaccatttctcatattcatattgatgttaatgaatctaggcatatacatcaatttgaatgtgggaaatgctagaatgacttacattgtgaaatagagggagtaaaactttctagtattacctacattcatgtctatgctaatgaatttaggtatatatgtgtgtctagattcattagcatttatatgaatgtgcacaatgttagaaagtcttacattatgaaacggaggaagtaactatttagtcagtactcagctctgtaatgtttgtcaaggatttgttttgaagtagattaaagaagtgagaatgaccaatttacagatgtactgaaatagaacaaggatagcgtcgtaccgggaatttgaaaaagaccaca

SEQ ID NO: 12443 - DNA, 3445 bp, Oryza sativa
ctatagggcgaattcgagctcggtaccctgtcaccgttggatgggtgatgaagaaccctggccgttggatcaaaaccgcccgcggtccaccgtaggagttctaggtgggccttgtccttcatctgggcccaaaaacgggagcgcacctactcatctagctgtgctcttttcagtgagttcctaactcaccccttgtttttagcatgcataaattctttgcaaaaagaaaagaaaatcttatgaaagttgcaaaaaggtgacatatttttgttctgctatttctgtcaaaggaagtaacaagtccagtctcttcaggagtagcaggtaaatagagatatctgagacataatttgctctctgaatgacaagttttgcatggatttgtttctgttcttcattttttttctgtttctggtgttcttagtttttcttcgcaccacatacagattctccgattctcatggtgtgcactgcaccatcctacactaaccctagcaagaatgaaatatgtatatcttgagaatcctttgtaaaagtgtaaaaccttattgtccctcgagaatctctatatcatcctgctatattaaaatattgtcccttagtcaccttcattctttcttttaaaaaatgtcagaaaaatggagttctacgtggtgaaaagatccttcctttcttggaatggctctggctcttcagtaccaacatgcatggtaactgcacatattttgcacataagagtatctctaacagcctctccaaatcgaactcctaaaacacccatatagccaactctccatctgatttagctagtcaaattaactgtatactccaacagcctctctattctaccctctctattttgactatgacaccgggacccatatgtgagccactcccttattctttctccccttccttcccctcttcctcttttcttttctagcgttgacaagaagcaggcggcggcagcaagcggggaggggacggcggtgaaggcagcgtcggcgggaggcggcgctgcgtggggaccggcgggctgcgcggcgggaggcgggcgccgtgcggaggcagcgggcggcgctgcgcggaggacggcgggcgcggcgagcttgtgccgcgcggaggccagcagccacggcgagcgggggcggcgggttgcgccgcgcgggggccggcggccgcgacgagcggccgcggcaagcggaggacggcagtcgcggcgagcggaggccggcggctgccgtgctcgagtttctccccatgcctcgtcgggctcctgtgcttggctgccgtgtggggatgaggaagatgggctctgtggggcccaccattggccagccaaataaagtgaccaaatttggctagtggagggagggttttggccagccgatagcttagccatccagttgaagaggctgttggagcacgtttttttggctagaattgctaaaatttggtttgaagagtgggatggagaggctgttggagaagctctaagtaaccgatgaaatactgagaatcacaacactgggaacaacatgttaactttggatcagcaccagatatgcagaattttacaagccatggtacaaccataccgaaaacagattgtaacaattaaccatacacacagataagtatatctgtgagatgacaagggaagcacccaaacctgccggtaaacaaggcataaacacgcatgcagaggtaaacacacaatgctccacggaaggaaaccaataactcctgctgatgaatgacagataacttataattctatgcatcaaactacctagctgaaggtactgtctcacttgaatcaactgcctcgtctattgtatctgcttttgagttcttctcttctgtgatgcagtctgaactatcaggatgagacgaatgagatgagtcctggaaggagctggtcagatcaggcttgaacatctcatcattctccaagttggaaagcttctcagcagattctcccttgagcagctcaacgacttcagacattatcggcctctgttcctgtttgttctgactgcatgcaagcccaacaagcaccattcgcttcagttcagcctcgacgaagacatccttgagctttggatcagcaatttccttgaactttttgtcacgggcaagtggaagtgcccactccgtgatagttagcttcgtagtggggtttagcttctcaactggcctctttccactggcaagctctagcagcagtactccaaagctgaagacatcacagctttcagaggccttcccaagcatggcgtattccggtgcaagataaccgagtgtacccttcacctttgtagtgacatgggttgcaccatctggaatgagctttgcaaaaccaaaatcggcaacccgtgcttggaaattcttgtccaacagaacattgcttgacttgatatcccgatgaatgatatgtggtgtcgcttggtgatgaagatatctgcatggtagagagagatttcagatgtaagattacttctgcatgtactgaaagttgtcatactgttacagcataatgaatatttcataaggatgtaaaacatgcttacgcaatcccttctgcagaatcaatagcgatcttcattcttcgttcccaaccaagatggcattcagctgcatgctgtccatgaaggtgggagtgcaagctcaggtttggcatataatcgtagactatcaggcgttcttggccttcggcacaatagccacgtaagctcaacaggctcttgtgtctcactgtcgccaaaacctccacctcaattgcaaattcagtttcagctttgttgctccaactcttgagccttttcaccgcaatctgtcccatgtagttaacagaagaagcgttaggttctggttaaagtgaactactttttcctgattttggattaaacagatagaaggtaaatagttccaacataatacttatgatttatgaaatgatgttcaaaaacatacttgtcaaaacgatagtttgaatttgatattgtaggggctgttcagattgatgctattttcaaccataccattttttggtaaagctgccaaaaaaatgtctatgtttagtttgttgtcaaatttggtaaatacataagaaatcctgccaaaattttagcaatattgtcatcttaaattttggcaacattgccatcttgctaaaattttggctacaatctgaataggcccgtatttttttttcaacccaaaatgaaacacaactcaccgggatgtagcagtttgggggttatatcaccatgcaacaaactaacaagtaccaatgtagaacagtttcatcatcttcataataaatgtgcaactgtctgatggaataagtcttacgctgttggtcttcttgtgctaattggtctttgtgttctttttgcttttcagtgcatctttcttttatgacagcatctcctttcacttt

SEQ ID NO: 12444 - DNA, 873 bp, Oryza sativa
ggcgttcgcgccgggggcggtgacggggccggtggtgcggctcagggactccatggcgaacgggacgctctacaacctgtcggagctcaagatggagtgccacatgggcacccacgtcgacgcgccgggccacatgaaccagggccacttcgccgccggcctcgacgtcgacaagctcgacctcgacctcctcaacggtacgccctcgccgccgccgccgccgccgccactttacttgttccccttcctgctcgcgcggcgacatggtcgaggttttgtgtggtgcacgtgatgccaccgatgccggctgcggtatccgtaaaggagattagtacagggggaatttgggataaatttggagatgaactcgaagacgagatggggaactatagataactattttgttctgctacctgcagcgctagatcagatcctctaccttaagtcacatgaatttattactaacatagtgacatgtgtgtccaataggtaattgttagtgacaaaggcacggtgacgactttaaaggtagatgatctcagtccgtacccaatacgtaatttgcacttacatatatatgtttttttttaaaaaagagaggcaaacttgctaaaatatgtttccacaaaaggtgtggagaaatactacgatttgtatagttcacaaataggataaatggtacttatagtacatatatcgctcaaaatatcaaatacttcctccgtttcacaatctaagtcattctagcatttccctgtctagattcattaacatcaatataaatgtgggaaatgctagaatgacttacattgtgaaacagagggagtacttctcaactttagtatgtgctaatacattaacatgttttacgta

SEQ ID NO: 12445 - DNA, 987 bp, Oryza sativa
ccctatggataatgataatagtattatctcccttaattttgataggacttattttattcaattttaacatcttcgacaccaaagctttaactttaattggttgcaaaatagtacaaccttaataactactccatctgttcacaaatacagataattttaagcccttttgacttgtccaaaaatattaatgagtttaaagtactttttgtcttatcaatcatttatttttcaatcgtatcaccaatcactttctggatctataatccctatattcgtgaacggatggaatataagacatattttaccaaaccccttttacctgagtgcacttaaaattttactactgttaatgtaaaaatctataaagttttacctttaataataaaattaaataaccttaactgatgaatgggggagcatatgaaaataaaaaaaaaggtatgcacactgaacaaagaaagtaattgataagatattgttttttacgtatatgggaaatcatgttttttccatgcatataggaactttttggtgctgggagcgagacatcagcaagtacacttcattgggcgatgactgagctcataatgaatccaaaagtgatgctgaaggcacaagatgagttaagtaacgtcatcaaaggaaagcaaacaatatctgaagatgacttagttgaactgaggtacttaaaacttgttatcaaagagaccttaaggttacatcctgtggtgccactacttctccctagggaatgtcgggagacatgtgaggtcatggggtacgatatccccataggtactactatgcttgttaacgtgtgggcaatcggtagagaccctaagtattgggaggacgctgagacatttagacccgagcgatttgaggatggacatatagactgtcaaggaacagattttgaattatacctgctggagctggccgaatgatgtgccctggcatgcattcgcagatgcaatcatggagctc

SEQ ID NO: 12446 - DNA, 712 bp, Oryza sativa
acctatggggatatcgtaacccatgacctcacatgtctcccgacattccctagggagaagtagtggcactacaggatgtaaccttaaggtctctttgataataagttttaagtacttcaattcaactaagtcatcttcagatatcgtttgctttcctttgatgacgttacttaactcagcttgtgccttcagcatcactcttggattcattatgagctcagtcatcgcccattgaagtgtattagctgatgtctcgctcccagcaccaaaaagttcctatatgcatgaaaaaaaacatgatttcccatatatgtaaaaaaatatgttatcaattacttccttcctttgttcagtgtgcatactttttttttattttcatatatactcgctccattcatcagttaaagttatttaattttattcttaaacggtaaaactttgtagattttgacattaacagtagtcaaattttaagtgcactcaggtaaaagaggtttggtaaaatatgtcttatatttcatcctttcacgaatataatggattatagatccagaaagtgtgattgaaccttcactaaattagggaagagaacgtacgttagggtacgattgtagatacgattgaaaaattaattattggtaagataaatactactctaagctcagaagtattcgtgtgcaattaagggagattagtacagtattaatcagca

SEQ ID NO: 12447 - DNA, 605 bp, Oryza sativa
taggtaagatcctaagtattgggaggatgctgagacattcatacctgaacgatttgaggatggccatatagacttcaaaggaacaaactttgaatttataccgtttggagctggacgaaggatgtgccctggcatggcatttgcagaagtaatcatggagctcgctctagcctcattgctttaccactttgattgggagctccctgatggcatctcgccaaccaaggtggacatgatggaggagttgggtgctacaattcgaagaaagaacgatctttaccttattcctactgtccgtgtgcctttgtcaactgtcttatagttgtttacacttataaatagtatgtttgtctcgtatgtacgtgtctaaatgataagctatgtaacttttgatgatgtgtactcctacttcctatcctacctattataaattattatttaagtttaattctcaaattattcaatttatttttataatcaagtagaaaactcatgacaataattccatgaataatctgcttttcaattttgatcgatgactgtcacctcattacacatatatgtacttgcatgcacaatatctggtgtagactctgcgacgccat

SEQ ID NO: 12448 - DNA, 1869 bp, Oryza sativa
cttttttaccataagatactttatattcgttataaataaattttggtccatactaatacctgagatactaagactactaaggctgtgttcggatgtgaagttggaaactcacctcccacgcacgcaaaacggagtaccatattttcttataattaattaaatatttacttttaaaaagatagattaatatgattttttaaagcaactttcgtatataaaccttttgcagcacaccgtttagcattttaaaaagcgtgcacgtgaaacacgaggaaggtgagttgcgaaagttggggaagaacacagcctaaatggctgtcgatgacagcaaaattactctaaccgtatgtaatagtgtgtaaaacagattttgctgctcagatttaatgtatttatcgtggaaaattgtatgcatttctcgaacagcataatccagctagcttccagtttcaaaacacaaatctctatggtagtatggttccatcgaggtcatcacagagctagaatgtcttaagaatgaaacttgtcgatgcaccaacttttttctgactcatttaatactgaagtttctagtcttaaaactttcccctattatatgaaatcatattgtaacccattttatttatctacacgaagtgcctctctctctctctctcaacaaaactacggaagtttgaccttacaacacacggaggatgggggcggaggtgaaggtcattcttcctccggacggtgatgcccatctcctctgtcatatccagctcgctcgctgccattccattagggagttcccagtcaaagtggtagagcagcgcagcaagcagaagttccatgattgcttctgcgaatgccataccaggacatattcttcgtcctgcgccaaacggtatgaactcgaggtctatgcccttgaagtcaacagtactgtgttcaaaccgttctggtctaaactcctcagcgtcatcccagtactttgggtctctgccgatagcccacgcgttaacaaatacagtggtgccttttggaacatcataccccatgactttacatgattcacgacactctcttgcgacaagcagtggtaccacagggtgaagccttagggtctccttaataatgagctttacatactttaagccagacaaatcatcctctgtcacagttggctttctcctaagtttgtcacgtagctcggcttgtgtcttttgcataaccattgggttctttattagctccgacatcgcccattgaagcgtagtcgccgatgtctcgctacctccactaaagagatcctataaaaagttaaaagatcgaatgaaaaatactacaaagatttgagagctgtaccatctaattgagcaaatataatccaccatgatagcacatactctctccgtcctaaaataaatcaatctcatacgagatatgatatattatagtacacttaatctgaacctgttactctgggatgaagagagtagatatattttactttgcttttaatacgacaggtgtcaattttacttacaaggataacagctttgatttgttccatggtgagaggcgtctcgagctccccttgtttctgtatgttcaggagcacgtctatgaggtcttggttcttgtcgtcctcgacgccggcgccgccgtctaccacggcggcctccgcccgctgctgctggtgctgccggatggcgcagtccatgagctcgtagagcttcctgctgttcgcctccgctcgccgcgccctgccgccgatggcgctcgccagccacgacgacgggaacaggtcgtcgaggctgaacccgccgaggagcttcatctgctcggtgagctcctgcaagaactcgtcgcgccgctcgaacctgt

SEQ ID NO: 12449 - DNA, 939 bp, Oryza sativa
aaagtagaacgatattgtagatgtgccgataggtttctagtcagcagtatagtctggtgcaagatctttggtttcggaaatttgtcggcttacaacattgaaatgcatttttcttttcatctgatacaggaacgaatttcctgttattagatgtgactgaaattgtatgttggttgtccatatcttttgtaattgatcttttataattgttgacgtgcatatgtctgtctttgcagggtacttcatatgagaacatgacaataatagttaaggattatgtggaaggcttgataaacaagtatccttactggaacaggacacttggagcggaccatttctttgtcacctgccatgatgtaggtgttagggcttttgaaggacttccattcatggtgaagaattctattagagttgtctgttctccaagctataatgttgactttataccgcataaggatatcgctcttcctcaagtattgcagccatttgctctgcctgaaggaggaaatgatgttgagaacaggttggaatgacacttactgcttcttatgctatatatgtgatcttatattcttctatggttgtcttcataaaaaaattgttcatttgggacttctgaatgattctttttcctagactgactatatatgtgtgcctccatgtatgattctagacttttctagtaatagtgccttcaagtgaaaaatatctgtttacttgagaaattctgtaaaacactcacacttactcacgtggttatcttgttgatcatgccttgaatcttacaacctatgattaattcagaagactacatggttttacatttagttcagcactttgttcatgtgcaacgaatcaccttgtagcaaaatgaaagttgtcatgaccataaatttgtgacgatgctatggtttgaacatctatttgcactcctacaaa

SEQ ID NO: 12450 - DNA, 2283 bp, Oryza sativa
atttatcttagaattacggagattatatacataattactcttaaaaggtactccacttcaatagcattatatatttattgatatttttggagatcatgttcttgtccaaaacgatggctcgatgagtatatcagtccaatgaaagtaagtattaattgcttatatggatatataaatggagcttacagtgcaattaattgggataacgtattgttagctcaccttgcttgcatggctcactgcttagtgctcactattatgttcgcttgtagctgctcactattcttcggacttgagctcaaggccatccggcatccgccacatatagcaatcatctaccttaaatcacgtgactttaggattactgaaatgtagatccatatcaaaaaagttccacatgtcaatgactcaaaatcatgtgacttaagatagaggatctccatcctagctcaataccctactactattggagttggtgtttatatcaaagttgttgaatgatcagagcacaacaccgtatggcaatgtcatccatgataacgtgggttacttcgttgatgcaagctacaaccatctcgaatgaagaaatataggagacgagcaaagagaaatgatcgtcgtcacacgtagttggatagtgaatctgtgaatgtgccaaatagtaaacattgttgttccttttcccaaatactatatggatcctcacgagcatatatgtatgagttttgaaacatgattgaaccatctttaattcatgttttcaaatcctggaataattaacgttttgccacttttacgagtggttctaaagaatttgccactagacccacatatcatagatatcgatatcgagtggcaaatcattaattggcacgtgacaaataattatgccctatttgtttaggcttaggcttattggcttagatttttaagtcagcttatttgcttatatgatttatatattataagctggtggatttaatgtcttaagtttaatggtggagtcatgcatctacctcacgtaagccaaaaaaagcttctccaacctagcttttggcttaatagtgttagagtggcttatggcttcaaaaaagacaaacgaaaaaactatttgtttgttcaggcttaggccctgtttctttcagcttgagattattataatccagattattgggagtaagctgaaagaaacatacaacttattgaagcagcttattataatctggagtccagcttattataatctgataagctcatttaggtgagctttttccagattattgggtgaaaaattactcaccatgccactccactccctctttagacttgcaaacccaataatctaggctctaataatctagaaaagaaacaactaaccgcttattctactacagattataacaatctagcttatagtaatctgactcaataatctagattataataatcttaagctgaaagaaaaagggtcttagacttttcggcttataagttggcttataaccctaaacaaagagggcctaatgtcccttcaatctcatgtcattcttaacgctgattttacacttaacaccctcaacttcccacacccttccgatccaccctcgcatcactcttccagcctcccctccccccaactccggcgatggccggccgcctccccggcgccgcctccgccgccgcggcgcccctcccccgagcgctcctgctactcgccgccctcgccctattctccctcaccttcctctccctccgctcgctccgccccgccgcggccccaccctccctcgccatcggcggctcccgcccttcctccttcgcgcggccgtcggtgtaccactccgccgaggccttcgcggcggggtacgcggagatggagcggagcttcaaggtgtacatgtacccggacggcgaccccaagacgttctaccagacgccgcggaagctcacggggaaggacgccagcgagggctacttcttccagaacatccgcgagagccgcttccgcaccggcgaccccgacaaggcgcacctcttcttcgtccccatctccccccacaagatgcgcggcaaggtccattctccgctctacttctatttacacttccatagcattgtaaggccatgttcttttcagctcgttcatcggattattgaaacagattgtttgctccatgcttcgagaaatacgttttctcaaaaaaaaaatatcgtctactgtattgtatggtttagaactttagatcacttgtttcaagctattttgttaagtttatttcttaa

SEQ ID NO: 12451 - DNA, 2451 bp, Oryza sativa
aaaataaaataaaatgaagaataaattacactgtgaactatcttttattaccaaagtttcattctagaccatcttttatttttttttcacttttcgctaggtatttttggttttttattttactttaaccacccaaactttcttgttttgataaatacatttgagagatccaagaaatactgtagaagaaagttttttaaggaaattaatttttagagacataaagcaaataatccgcaacaataatctagcgaagtagctaaacagaacatagccttaattcacgactagacatttctaaatatgagagctttcttagagggttcccaattagtataggaataaaaagatcaattgatcgatgtagttgcttctttaatcgtatgaatgaaaaaaaaatgtggataaaacttttatatgttattagcagtttaaaagcaaaatgctggaaatagagcacgatgaaaaaaaaaacaaaatcaactcttaactttagtttcaggtgataaattaagtttcgaggttgccactctcaagatctgatccaagggatcaaagatgtagtaataaatgtttcatccttgtttcatcaagttctacggagtactagcaagggtcagccacagatataaagaaatgaagtgccggggaaaatagaagtccatagatcgcatggtgcatggtgaaattaacccctgaaagtttgctgatcacaacaatattctactcctacttggttcagttctctgtcttgttagtaacatcgtacattactttacatgagtaagaaatgggcagatccgtaaaggataccgtatcacaggcaaactagaaaacgcagcttacaaagagtgcaatatggcggaaaaacaaaactattcttgaaagaatgaactaatcagtctattacctagcaactccattttgatgatttatggtcgatggtcgccaacttctctgatgcagatgctcaagatgacacctacgcacaatgatccatccagttgctgatatatgagcataagaatgaatgcatgttcagtagagcaccggatagttgtcagactccgcatcatattcatacggataaggctttcatgtttgtatctgcccagacttggatggttgaatttagtacttgatcacatgatgtcgcaaccatagttcatacataaccatgtggaacgcgtcgtaaggaagaggaggtgaatgccacacaaagtgtttctgtacctgcaatcccaattaaacatgttacagtatagtaccgcactgctgaaacttcagtgcctctaaacaatggctgaatcaaattatttacacgcaaacagacctgagggcagctaatgttctgaacaagacaagtgacacattacaatcttgaccaagtagcttatttgtactatgaatgtgatctactatatttattttccattacagttaagtacaacgctgaattacatgcttccttttgtaaataattcggcggcttcatagaaaaaaaggagggtcaagagttgcaaacctgaacaagagatttgtgcaattcaacaaactcttcctgtgatatagatttaagtatactttttagttgatatacatcacgctccttaagtacaacagcaaattttctccagtctaggatatcattgaaaggcaaatcgtagtagtctgacaaaataactaaaaggatgaaacaaaatggattagaactcaataatcagaagggtactgaaaatatcagttcccgtgaaataggaaaaacagcataagtagagtggcatgtattatgaatgtcactgggtagaaatactaaccaggaacacaaccgtagtgtattgaatcagatatacgggcactattacttgagagccacccaggacaaatacagaactttgtgtggtagaactgcttctggtaaaccagctctccaatagctctactgatccgattgttactgatagcaagctctgtatcattctcccagacttgtgccaaaatgactcttattttagaattgcgatggccagcccaaaatccaaggattgtcctgttgccatggcaaaagcaacaaaagacaaattttgtaggagtgcaaatagatgttcaaaccatagcatcgtcacaaatttatggtcatgacaactttcattttgctacaaggtgattcgttgcacatgaacaaagtgctgaactaaatgtaaaaccatgtagtcttctgaattaatcataggttgtaagattcaaggcatgatcaacaagataaccacgtgagtaagtgtgagtgttttacagaatttctcaagtaaacagatatttttcacttgaaggcactattactagaaaagtctagaatcatacatggaggcacacatatatagtcagtctaggaaaaagaatcattcagaagtcccaaatgaacaatttttttatgaagacaaccatagaaga

SEQ ID NO: 12452 - DNA, 2051 bp, Oryza sativa
cgacggggtgaagctgccgcctggcccgtggcggctgccggtgatcgggagcatgcaccacctgatgggcgagagcctcgtccaccgcgccatggccgacctcgcgcgccggctcgacgcgccgctcatgtacctcaagctcggggaggtccccgtcgtgttggcctcgtcgccgtgcgccgcccgcgagatcatgcgggcgcacgacgtcgcgttcgcgagccggccgctgagccccaccgtgcggcggatgcgccccccccccccccggcgacggcagctccgcaagatctgcgtcgtcgagctgctcagcgcgcgccgcgtccggacgttccgccgcgtcagggaggaggaggtggcccgcctcgtgggcgcgctcgtgtgtttggcccatgtggcccagaagtggttgtatagtggtggtttagtaccaccttgaaagtttaggtgggttaggatctgcttataagccttggtgctgcgccatgattggggccaggttcgagaggcgcgacgagttcttggagggggctcgccgagcaggtgaagtgttgttggcccaaccgggaaaaagcctgatgaaaattcaaattcaaattaagtacaaattaaaatccatgtgctaccatggtagattatacatgcttagttactctactactccctctgttttatattataagtcgtttgattttttttccagccaaactttgttatgtttgactaaatttatagaaaaatttaacaacatctaaaatactagattagtttcattaaatctaacattgaatatattttgataatatgtttattttgtgttaaaaatactattatatttttctataaacatcatcaaattaagtacaaattaaaatccatgtgctaccatggtagattatacatgcttagctactctactactccctctgttttatattataagtcgtttgattttttttctagccaaactttgttatgtttgactaaatttatagaaaaatttaacaacatctaaaatactagattagtttcattaaatctaacattgaatatattttgataatatgtttattttgtgttaaaaatactattatatttttctataaacttgatcaaagttaaagaagtttggctagaaaaaaaaagtccaacgatttacagtatggaactaagggagtagtagttagtagatggtacatctgatgttaatctcaatttttttcttgtttttttctcctaggatctctttagtggagggagtgagacatctgcaaccgtgatccaatgggccatgtcggagctcatgaagaatccaagggttatgcgaaaggtacaggctgagttgcgtgacaaactagcagggaagccaagggtgacagaggatgatttgtccgacctaaagtacttaaagctcgttattaaggagaccttaaggcttcaccctgcagcgcccttgcttgtcccgagacaatgccgtgagccgtgcaagatcatgggatatgatattccaaaaggtaccaccgtatttgttaatgcgtggctattggcagggatcctaattattgggatgatgctgaggtgtttaggctagagcggttcgcaaatagtaccatagacttcaaaggcatggacatggagttcataccattcggggcgggaaggaggatgtgctctggtctagcctttgcggaagctattatagatctactgttttctaccctgctcttccacttcgactgggagctcccttgcggaatgacagcaagtgagctggacatgatagaggagatggcccttactgttcggaggaagaacgaccttcacctccgccccatcctccgtgtgccgcaaactcaaacttcttctgcacttctattttgtgagagagctcaaacttcttctgtatttctgttttgaaagagagttcaaacttctgtttgttttgagagagtacttttgtttattttgttttgagagagagagagagcgcgcgcgctcaaacttcgtttgcacttttgttttgagagggggaatgcgcactttatttcggt

SEQ ID NO: 12453 - DNA, 668 bp, Oryza sativa
ttttggatcacaaatttatcattttttttctaggatttcagcagatgcaatatatcatgtaaacagtaagaggcatatcaacatcgatgtctcctttcgcacttggagcagagcaatccaacagcaaacagggcgatgagacccaaagcaaaagaaatgaaaacgctaacaatttcagctgaatcttcacagcaactatctaaatgttgcaaaactgcaatatgatatacatttctgggttctgaagctatgcttggtgagcaacatctattccagcctcggtaatgagctgttctgtcaacgaaaagagcccggcaatttccttttcagcatcaagaatcatatccatttccttgtttggtttggtcttggaaacaattctagtactgtttacacttggcgatgcaaccagattgatgccagaatcagttttgccacttctcaggaatcccttagccatatctgcaagtttcttcaatgtagtagtagcagcaagtgcctccacctccgcagcttcagtttgaagattttggagccccatatgaacggaaaaatcagaaggtctcttgatgtcactaggatctttcaggaacccttccaacttgtctacctcctccttcacatcccaccttctcattaccgccttcagctcttgatctttcgcgtca

SEQ ID NO: 12454 - DNA, 662 bp, Oryza sativa
gtgcagccctgttagggagctcccagtcgaagtggtagagcagagtggcgagcatgaactctatgctggcctgggctaatgccaagccagggcagatcctacgtccagccccaaatggtgtgaactcatagtttgtacccttgaggtcgatctcaccatcctcaaaccgctccggtttgaaagtctcggcatcatcccaatgcttggggtccctcattatcgcccacgagtttataaatatgacactaccttggggcacatcataccccatgatctggcaagtttgctggcactcccttgggatgagcaacggcaacaccgggtgtagcctatgagtctccttgacaatcattttcagatactttaggttggctacgtcggcttcggtcaccgatggcttccctttgaggatgctttgaacctcgttttgtgctttctccatcactcttgggtttctcatcagctctgacattgcccattggagcgcatccgaggatgtctcgcttccagcaccaaagagatcctgtacaatgccaaaatgcaacacatgtgaaactttaaccagataaacaactaaggaaaatacatatgctacatcaagttaattgaacactatctgcagaacatatatatatatatatatactctgaactttttctgaa

SEQ ID NO: 12455 - DNA, 533 bp, Oryza sativa
aggaaggagcaaaggcgctggcagatgcaacctcagcgtctctttgataatgagctttaggtaatttaggtcggtcaagtcttcctcggtcacctttggcttcccttggagattgtcgcgtaactcagcttgcgctctcttcatcactcttgggttcctcatgagctccgacatggcccattggattgtagtcgctgatgtctcacttccggcgctaaaaaggtcctatgaaatttcaaaattattaacttaaattgaacatgccagaaattaaatgaattagaacgtacgaaaaggatttggaaagaaaattagaaaaaaacatttggttggaatttggaaatgatgttgtgcttgcttacaaggattactgctttgatgatccccatggtgagaggcacgtcgaggccacctcccttctgaatcctcaagatgacgtccaccagatcgtcgtcttccacgacgtcgccgctcgccgacaatgccgccgcgcgccgttcctggtgctgctcgatggcgcggtccatgagctc

SEQ ID NO: 12456 - DNA, 802 bp, Oryza sativa
cggctgctgcataagggaacacggtccacatgccctggtttcaaagcaaagcataatttgattagaaaaggtaaacaaagattttactctcaatttttcaggagaggggaggagatttaccacagctgccgcaacacttgcgagtgcaacaacaggccgttctctcaggaaaaacccaacagctagctgcaatgagacatcattagtgtcagctgtcgtaaatacagattgaagaattcttattcatgtatttaattcgattgatctgtaagatgtttgaatataacaatggtgtcagcctacagattaacaaggataaacattgtattgtaagacaaaacatttttttagttgccacaactgcattggaggaacatagaaataatttgcagattgattctatctagtaaaggtgaagataaaatcagcaacaatatggccaaagttccctgccagcaattaccacccaggaggccaggacagaattgaacataaaaggtaacaaaaaaaaaacaactacataggagtatatcctaaaattatagccatcacgccaagtagtaagtctctataaagttagatcaaacgtcctgagcaagtgacaactcagtaacttcagaagtaacagaaaattaaaatccaaattacctggataggaagagtaaatagacaaccacagcaaactccagcaaaatacagtctgtggtatgccctgtttgtaatcgtcagttaaaatatcgggtttatcagaaatttctgacagaatcactgtgagtgaagcctgggaaaatgactaaccaat

SEQ ID NO: 12457 - DNA, 646 bp, Oryza sativa
ctcggaagagggagtaaaagtaaacttcctttgttttgttaggccgaggaggaaggctggccaatgggccaagtccacgagccagggagagagggggagggggacggctgaccgactgactgggcaggggcgggcccggtcaacgccacgtgggcagccacgtcggatggggagagaaaagaggggggggcgggaatggcatcggacggctcacggcgcgcggcggaaatccggcgaacagcggcaagccgaagcgagcgacgaacaccggtggctagaggaggtcaaggagaaccgattccatggctcggattggggagacgacgcgtgacgacggccggcggcggcggcgaagctcgccgggatgccgacgtggatgcgcgatgggaagggatgcggctcacgcgctcgggcttagtggacgcggtatggggttgcggcgcacacgcggtgacgcgggacccgatggtcgccgggctgtggctcgcggcggcgccttgcggcggcgggaggggcggcacggcgcgggagcgaggaggaaggtcggcggccagggggaggggttggggaggtcgagggggggcccgaggaaggtggcggcgccgggaatcaaggagaggaaggaggccgacggcaggggaggcac

SEQ ID NO: 12458 - DNA, 972 bp, Oryza sativa
tatcaactagtatcaaatttgaattttaaagcttagttttagagttaatgtggattttttatcatattcttttttaccttagtttttaatttttttataccctagataaagtagactaacaaatatttactcataaattatttttgatgcttgctcgtttttttcctgcactcataacacaactgatcactacttcgggtgcaaagttgtaaactcaactaattaccgtaagagggtcagggtttcaatcatttaggtggacgtccactcatttattgccgttctactatcttactgatggatcggctgtgggaagaggtgctcaattcacaatcagcctttccctttttcagatcagtccgcgtccaccgaagaaatcgcggcaaactcggcaaacttttgacgtttaccggacaggcaaagctaccatcacttcgttgtcgttgctgtatatccacgaccacgtcaaaactgatcccatggcgccaaactgaacaccgtgtcgatctccgacctcgtcgtcgccgcgacaaaaaccgctttgatcatcacctcgtcgtcgacgcacctccaccgcatatgtagcagtagacaagtagcatctgcatctgcgtgccatacacgattgctccagctagctgcacctgcacatcgccatggccatggccgacctggagttggagaaggttgcgagcttcttgctggcggcgctgctgccgctcgtgctcttcaagctggcggcggcgaagcgcggtggtggcgatggcggcatgaggctgccgcctgggccgtggcggctgccggtgatcggcaacctgcaccagatcatggcgggtgggcagctcgtgcaccgcaccatggccggcctggcgagggggctcggcgacgcgccgctgctgtcgctcaggctcggcgaggtccccatcgtcgtggcctcgtcggccgacgccgcgagggagatcatgagcaggc

SEQ ID NO: 12459 - DNA, 667 bp, Oryza sativa
ctgttgattgctcacacgtttgtaaaaacggtagtgtatttcgggacgtcgtatccgatgacattgcatgcttctcggcactctcttgggagaataagggcagcacgggatgtaacctaagcgtctccttgatgacaagcttcaggtactttagatttgtgagatcgtcttcggttaccgttgtcttcccttgtaggttgttccttaactctgcttgtgcctttctcatcacttttgggttcctcattagctctgacataacccactggagcgtatttgctgatgtctcactccctgcattgaagaggtcctgtggaataacaagatgcaacctgaactaatcaatagacattcttagaaaaaaaagaaataacaaacacttctagaaaaatgaaataagaagatgcaacctgaactaatcaatagacattcttagaaaaaaaaaagactagctaacacttctagaaaaatgaaataacaagatgcaacctcaactaagcaatagacattcttaaaaaaaaagactaacaaactcttctataaaaatgaattactcttctgcaaataataatgtagaaatagatgacttccatatgtaatctattttctatatgtaaactaaaacactatgaattaatgtgtgttcttcataaatcagagcagcaga

SEQ ID NO: 12460 - DNA, 1514 bp, Oryza sativa
tatggtctctatatttataagtgaatatacacaataataaatagaaagataagagatgatctatgtggcgcctccacctcaagatgacgtcaaataaaatgtatttttatggagactttaacaagacaactcaaacagtgctctccgtttgttttttttccttcttcaaatatatatatatatattctcgtgtaataaaaaaatattaatacattcgacttatttttaagcgaactctatttaatagacacttgcccaatcatatatatagccatcataaatacatatatatcttctcgtgtagttaataaaatacttatacactctatattaataaaatattaatacatatttatcttctccctcttcttcactagctagacacctgtccaaccatatagtggtgtattaactatgtgccaatgttctccaagagtccaggttggaagtctctgctgtcactaaccctctccagtgtataaatagccgggtgcatctcctccatggcactcacctcaccacacaccactccaccatcactcacagccaccacccgccgccatggagcaggtctcgtgcttcgccgccgccgccgccgccgtcctcgttgttctctcgctcgctcgcatgctcctcgcgccgcgcagggagtgggacgggctgaacctgccgcccagcccgtcgcggctgccgttcatcggcagcttccacctcctccgccgcagcccgctcgtccaccgcgcgctggccgacgtcgtgcggcagctcggcgcgccgccgctcatgtacatggagatcggtgaggtcccggccatcgtcgtgtcgtgcgccgacgcggcgcgcgagatcatgaagacgcacgacatcaacttcgcgtcgcggccgtggccgccgactgtccagaagctgcgcgcgcaggggaagggcatcttcttcgagccctacggcgcgctgtggcgccagctccgcaagatctgcatcgtcaagctgctcagcgtccgccgcgtcagctcgttccacggcgtccgcgaggaggaggccggccgcctcgtcgccgccgtcgccgcgacgccgccgggacaggccgtgaacctgaccgagcggatcgaggtggtcatcgcggacacgacgatgcgccccatgatcggggagaggttcgagaggcgtgaggacttcctcgagctcctcccggagatcgtcaagatcgcctccgggttcagcctcgacgacctgttcccgtcgtcgtggctcgcctgcgccatcggcggctcgcagcgccgcggcgaggcgagccaccggacatcctacgagctggtggacagcgccttccgccagcggcagcagcaaagggaggccatggccgcgtcgccgcctgacatcgccaaggaggaggaggatgatttgatggatgagctcatcaggatacacaaggaaggtagcctcgaggtgcctcttactgctggcaacttgaaagccgtcatctagtaagtatttttcttactcccctgaatgtt

SEQ ID NO: 12461 - DNA, 1731 bp, Oryza sativa
ttgtgttaactccactgttcgacagtcttctgtcaatgtaaagccttcattatctaccaactatgtaaaactatctcccaatcttaatgtaattagccagcctactttggccggcccgactaaaaaaagaaagaagagtagaagcaagcctactcattacactattcagaattaagaaacatccatccaatcgagatccagggactaccacatttcaaatgacttctattatgttctataatcgcatgcctcttgacattaccatatgcatattcagttgctgccccagtcagaatctttttaaaaaatgtgaaacccgctcaattacttgaaatcttaagcataaagtttttttttcattaacaacaaacaggataacatttttttccctgtcctaagaggaggtttcaaggaacagctgtctaactgttgtccatttttttccttctctaacatgagatatatgtatctattttgacaaaaatccaacaatgtcagcaaggatataataatacgtcttcaacatatacatataaatgcataaactatattcctgctttcttatgtcaatgaaatggcagagctcctacccattccctcaaaaaaaataaactatattcctgatttgttcatatgaggagagacagacttgcaaatgctttattcatgcttcgatgggtcatggaacatgatatactgatgaaaaactactgtgcaaataagaaaatcttatatggttcatgactcgtatgtaggtagtcattccctcctcaatctatccaatctgggaaatataaggttatcggtatttgttgtaacatctaaggcagtgggcaagacctagccaaacagttcaattttagctctgataagaaataagtagatcaatcatatacttgcaagaaactttccagtcccattatctccatttctgtccacttcaccaactccagcaacaagaatggtcgaaggaaaatcagatgcctttatgattgcatcaatagtctcttgcaaatcagtcaccgcaccaccctagacaacaaaaggaaaaacattgacatcacggaagaaaaaatgattattttaggaaaacatgggtttagcgttatacatactgtgactattaacagaacgaagtacttctgctgattcctggcaagtgattggtgtgctattgcagtagtagtgctaattactggacaaaatagtgttggccagccaatgatacattaatacattatgaagtgcactgatataaactgacataatcccttgtgttccctcgacctaaggaagtttgatatagtcaggcactcggccaataggcaaacagctagcatataacttcaagaagcatttcaaaagcacaaaacactaagtacataatttcttacagaagaaaaggaaatgtgctgtaaatcaaaataagaaggatcagcttcttccaactaggcactagggttgaactcactgcaagaaattcaaatgtacatgaccaaaagggggagttctttttaccttttctgtttctgtggctggtcaatgagaaccagaaatctcaggggtacctgatccccttatttggcatcaaatacaaatcccaaccaaaggtgcggcaagttcaatattagctggtatatctaagcaggcttttatattgcatcttcctgttgtgatgaacacctcgagttgcatcagtatcttaatcgacccccatgcaacagtacaatg

SEQ ID NO: 12462 - DNA, 648 bp, Oryza sativa
tttagggttttttttttataaaacctttttaactttgtttatttcttaacaattattatttgtgctctgaaaattccactaaaatttatttacacattttaggcttttaggaaatttataaagccttatttgacttttactttgcacattttaatttttggaggctttcacatggattttaattattctaggcataatttaaaggatgtattttagagtcgttttgggacgtgacaaacctacccccccttaaacggaatctcgaccccgagattctgaagaactggcgaagagatcgggatgggctgccttcagctcgtcttcacgttcccaagtagcttcttcctcggcgtgattgctccattgaaccttgcaaaaacggatgacccggttcctagtcctgcgctccatgctgtccagaatcttcattggcttctctacataggtcaagtcttcgcgaacttcaatttgctctgaatcggcctgctcggacggcactcgaagacatttcttgagttgcgacacatggaacacatcatgcacgttgcccaataaggagggcagctccaactggtaagctacttctccgcgtcgagcaatgatgcggaaaggatccacaaacctaggtgcgagcttcccttttgtcct

SEQ ID NO: 12463 - DNA, 766 bp, Oryza sativa
gccggtcggtgaagacgtagacgcccaacaactgcagcataataggccagccgtgcaggcggagacaccagtcggcggcgggcgaggcggccggtcggtgaagacgtagacgcgcaacaacggcggcataataggccagccgtgcaggcggagacaccagtcggcggcgggcgaggcggccggtcggtgaagacgtagacgcccaacaacggcggcataataggccagccgtgcaggcggagacaccagtcggcggcgggcgaggcggccggtcggtgaagacgtagacgcccaacaacggcggcataataggccagccgtgcaggcggaggcaccagtcggcggcgggcgaggcggccggtcggtgaagacgtagacgcccaacaacggcggcataataggccagccgtgcaggcggaaacaccagtcggcggcggcgaaggcaagccggtcggtgaagacgtagacgcccaacaacggcagcataataggccagccgtgcaggcggaagcaccagtcggcggcgggcgaggcggccggtcggtgaagacgtagacgcccaacaacggcggcataataggccagccgtgcaggcggaagcaccagtcggcggcggccgaggcaagccggtcggtgaagacgtatacgcccaacaacggcggcataaaggccagccgtgcaggcggaaacaccaatcggcggcggccaaagcaggccggtcggtgaagacgtagacgcccaacaacggcggcataataggccagcc

SEQ ID NO: 12464 - DNA, 551 bp, Oryza sativa
gcacgtattctgagacggtccaatttcaagttttacacagcatgtcttggaagtacaagaagacctactcttcaaatagggggagaacagattccccagatcaccgacttcttccatcacctccttacgcgtggtactagccgccccctgatccaagatctcgcgcagatcgagttcaggacgcgatagctttacgcacgcaaggacataacacgccccagtgtagatcccgttcgatgtctcctctgcgaccctggccgcatgcttggaggggatctccgtcatcgccgtcaatagtaccgcaagggaggaggtcagcgaaaattcgtcaggattcaccgggatggtagacttgatgccgcactccccggcaagctggtgcaggccagtgtaggtgacccgcaacgagccctgaatttccgacaggttgtgcccgagttccgacatgcggttctcgagcccctaccgttgtcgctcgttgccggccaccagttccctcatcttcgtgaggtcttcatgagcttccgccaactcgcgcaccaaccggtcag

SEQ ID NO: 12465 - DNA, 4978 bp, Oryza sativa
tccgttttgctatttgctcagccagtgcccaatagccagttgctattaattgtactgttcaaaaccataaatttaactaacataatttttttggaaaatgattttttttttctaaagtaggggaacgacaccctagagtgagcttgttttttagtgcttttaatgttctatgtatgacatcactcaccacagtcatcttatatgattatgagttaatcacgatatcttttttatagatcaggagaacatattcttatcatctctgtggctaatctgtatatttatagagaatagagggtttgtccaaattctacatataggaagttatttttattttcagaattacttcttaggattagctgaaatattaatttatttggctgcttcaaagtacgagtctgcctggtgtgtacaaatttacataaaactgaatatgaaggagcacaagtggactaggactgagcatgctaattcaaacaggcatccagggtgaattgtgtggggctgtgggcaaattcagtacataacctgctcgtggcaaattgaggactaagattttgattttgaggtatacgatctgatctcttcacaccttcaattcttaggtgtgtcatgtaagtaccagattaatacgtgatagatggaggtatagtcattgacagtttgccactgaaatggagtcttttgggtgatggcttgcatttgaaaatgcactggtatattataaaaattgcacagaacaagcattgacgtttttcatgtacaaacaagtttaaaaatgttatgcagcttatgttgttttcaagtttagcatatatgtatctaagaaagctatgttgttacttattgtagattgtggagataacatgtaatgttttgatttatgcagcaccatcggtgcctttttggtgtgggctatcaagaccatcgacagcttcctcccttgtccccaccggccatccgctttgcaacgtgatagatattttccttgtattatgacgttcatgaataatgtagtcatgccatatgaagcagttgtgtagtatgtgacctttttggcggttgattgaaaagtaaactgattggatctgggtgactgaataaagtgctttagtattcagcttgatttcatgaagcagactcatcatgaattactatatgttctcccaattgccaaattcagttctatttttcagtgcaaaatttagatttccaaaccttttctcattttcttttcatgccagatcaaagaagtcatatgagatatagattataaacttgaatttagcagatggtgatggatggtctggacatgtaaacgagataaactaccttaccacatcaatcactccgacattagataatgtatactattatagacattagataatgtatactataataaacgagatatagatcaaacattagatggtgatatccgggttagattcttttttatgtctatgcattaattgtgaagttgtacattacgaaatagatttttacgaaagatagaggtcgtgatgttattttactcatgcggctaaagattaacaatataataactcgctgtgtcattcagtttttaaattttaacttgtctcatttaatgcttgattggaaaacaaatatatattctttgaattatttattttgcatttctaaatgctaccgtagcgttagcacggatcaattactagtgtataagatagcaaaacaccatcaaatatttttcaatactggtagtaatttttttaatataccttaagtacaattaaaagctcatatttttacgtgaagaactttgcaagttttgagttctcttaagattggtcttactattgaaattgtacttcttacacatttttttaccaccgtataaagtacactcgatctacggttttgtttagcacacaaattaaccatcttaagttctttttggcgatggatacatcttctaaactggatattatgattttagtttaactaaaattttaataaaataaaacaaaccgtactaaacatgctcatgccattgccacttaccaaaatttaatgacgccgtaatgtacgcaccaccaggggatcagtgatcagggtccattcctgtccctactgctcggagcatctaacaagagtaatagaaatcggagagagacgcgtcagcaagaaatatatatgtgtgtgaggcagatgaatcatgggcaagtaagaaatctctgagatgactgaggccatgtttaaatcccacctcaaaatttttcaccttctcacatagaacgtttaacacctatctgaagtattaaatataggctaaaaaataactaattacacatattacgatgaatttgcgagacgaatcttaagcctaattgctccatgatttgccaaagtggtgttatagtaaacatttgctaatgacagattaattaggcttaataaattcgtctcgcggtttacttatggattctgtaattaattttttattagtatccgaacatcacatgcgacaccctatataatacctgatatgacacgctcaaactttaccaccctggatctcaacacccatgagtggacattgtatcagcgctagcgtgtacctttaaaaacttatttacaaatggagccttgctcaccttatataacttatttacaaaaggctaaaatttggcatggcattggcagtagttgatccaaaaatattttgaaacccggataaacttcactcactactacatatacgattattccatgcgaccaaaattgatttttacatacggaagggtggcccgcatgtgtcaaaaggtatgtgaaaaatccaattttcgcatgcagttaacgcagtcgcatgtgaaaatccgtttcttgcgtacgggcgcttaagtcgaccgcacatgaaaaggaaaaatcgcgaaaaaaaatccgaaaattaaaaactacaccgaaaccctaaccctagaatccactcgccgccaccgccaccatcgtccttgtcctcctcctccagatgctgccgtcgtcgtcctcctcccatatcgctgccgatggatccacacgggagggggcaaccaccagattggggcgggggaggacggctgccaccggatcggggtgggccgggggagggccacggctaacgaattggggcactggaggacggtggaaacctaacaaatccctataacacattatttaaaattgtcttttacatatatcactatatcgattaatctataccgttactataatttagacacacttcgatctaacatgttaaatctccttctttgtcatccacttagaatgtggaggacacattggttgtttgcatgccaaaactgcacacatattaacccaaattaataaaacaggtttgaccttgaaaaatggtttgattagttgcagatggattttttttcttttgagaggatgtccacttgtttgcatatgttgtctaaaaaattatatatttttttaaaaaatggtaagatatatcaatatgtgatatgcatggagttcccattatggtaggacagtttggaagagaaatttggtgcattcacaaattcagatttgaatttggatttgacatatggaaaggtttcaaattaagaagagatttggaaactttttgaatttggggaggagaagatttagggtttgcgggtgattaaaaggatttcgggtaggatttgaaattaaggcactcatttcataatttgaaccacggaatttggaacggaatttaggaataaggggttttggaggattcaaggtaagggattttggagtaccttttggcacttagtcctcctcaatccacgccaaaaatgcaaaccaaaatttggaatatttttatttaaaactagctgggtggcccgtgcaactgcgcggctaacaccgataccaaattatatatttttaatacgattttacttaaaatttattaaatagttatctcattgttttaagactttgaaagaccaaaccttatcatcctcttgtttctaattttatagtttttaaaagtcacaccagttgctatcccttacttctgtcatatccttctttatttgcttgctcgatctatcgctgtttctattcattctctttggaacccttaaaaattggatctaatagtttttagagtttattatcctgttgggtttcgtttttatagaagtcccgtcaaacgctgccattatactccccttcggtcgtccactgtctattctctttattggcattggtattttaaaaatcaaacataattattgtttaggtttattttttactataattattgtttaggtttattttttactttctagaatttccgttaaaacgtcaacgactttgtcactgtactcctctatggctcgttcgctgcctccattctttattgccatcgagattttaaaatcaaacataattataattggtgattatttttttattttttagaagcccgaacctttaaaaatttgaccttatagtctttagagtttattgtctcgttgggttttattttttataaattttaaaataccgttaaacattgccactatacttctctacgacccgtccgccgcctattctttattgtcattgggattctaaaaatcgaacataactatcgttgaaattcaaaatttactttctaaaagtcccaccaaccatcgacggctctgccattgtactcctgtacgatccgcccgtgcctctcatttttattatcattgagattttaaaaattaaatatgattaccattagggtttatttttttacgtttttgaagtcccgccaatcgccttgaccgattgcttcatgacatgcctgtcgtcatttcttttaatccttattagtattctatttggtgttttattaatagtttttagatgtcccatcaaccgccaccactctactcctttataggcatgttacttaattaatctcgtcatgtgttttagatgg

SEQ ID NO: 12466 - DNA, 3511 bp, Oryza sativa
actatagggcgaattcgagctcggtacccccaaaagttggctgaccaatttcattaagattgggaagaaaatacagtgtgaaaggttacaacgacattagtacaatgtcgtggcggctagagaacccggatcatctatcccaccatcttgtgcagttagccagaagatctctaggcgtttctccgtattaattaagctcacatatatcacactaaaaaattgtcaaaaaataaatcagtatatcttgtaaaaattgtaaagctatagatcaatatatgatatatatctttttcacaaatatacaagttaaaattcaatctatataagtagaaacaaaaatatcacatttgtgaactacacattctatttatagttaaatttgtcaattttttctacttgtataagttgaatttgaacatgtatgtttgtgaagtaacatatcacatattaatctatcttactccctccgtcctataatataaaaagttttagggttgtacacggttattaagaaagtaggtagaagaaagtggtggaggattgtgactggataagtagtggagatatgtggaaaaagcgaatggtggagggttgtgattgattgggaataaaagttgttatattttgggacaaatcctgagggctaaaagttgttatatttttggacggagggagtactatattttataaaatatttttgatgacttttaagtgatataaaaaatagtaaatttcacaaaactagagttattttgatcaaactatcgcaaaactacagttttaagacgtatcacaaaacaacagatttagcaccatatttgtcacaaaacaacatatttaaggttaagtatcaaaaaatacatatttaatattgaaattatcacaaaactacagcttttagagtttaaatccctagcaccattattatgttaagcataaacattattgttttgtaactaaattggttctaaacctatagttttgtgatattttagttactaaacatatagttttgtgaaacttcatcttaaatgtgtagttttgtgataaatttggtgttaaatgtgtagttttgtgatacaccgagtaaaatttgtagttttatgatagtttagtcatagtatatgtagttttgtgaaatttactctaaaaataagaggatatgtatagttagctagataggagtacatgtgagtcagtacgtgcatgcttttgcgtggcccatgcgcatcacatgcaaatcaataagctagtttcttagttaagtaagtaatcttgcttgcttagtctatcctataattcaccaactcactgttacatctatattactcattcatcagatctaacggacgaaaatcatccaccgctttagatccaatgaaccatacctccctcacctcccaccgtgcaccgcaccatcccacctcctaccgcacaccgctcccatcccacggaaatcgcatccgccatcatcgccgcaccctcgctctccccgcgtcgcgccgacccccaatcccaaaccccggagcagctccacctgcgccaccgctggatcgatgggaaagaaccgcggaccgccgtgcttgcactagcatccagatcagcgccgcctcatcgatctcctcatgtgccaccgctcacgattcgccgtcgtcgctcacaaattgtcgttgtcacgaaatcgcaaccctaatctccccacaccgcgccaccgcccctcgcctctccaccgcgctggtctcctctgcgtgcgtcgtcgcctctccaccgcgctgatctcctctacgactccctcaccctccgtcgacatcaccgccgccacccacctctccaccgcatcatcgtcctcaccgccaccctacggttcaccgcaccgccatccactacgccaccctccgctcgtcgcgccgcccacatccacgggagactgcccgttaatttgcgtacctcaactttttttaccacttaattcgcatgccctctataatatatcattaggactgctaattagtttatttggtaccactttctctgtttttcatgtattacttatttcttaattccatatgtatatctttatggacatttttgcccttgggcctaggggtgaaaactatcggaaacggtcagaatcggtagcatctctttggaaacgatgctcgatcggccggtaattgaccatatttatcatttaaactactcggtatcgacattaatacgatggagaaagaaattagaaaaaacaaaatttaaaaatagccaaaaaggtacggtcggaaacggtaccccttaaacgaaaatggcgcccggtcgatcgggaatttccttgaccgttttcacccctacttgggcccacctgtcagattcaaagagagaaatctctctctggatcgaatcgatcgatccctcctccagggtgagcgcagagcgccaccagccaccagcgacgccaccaccccgctgccgcgcgccgtcaccaagcgccgacgccgtcccagccgccagggtgccccaccacccccgccgcccgaggtcgacacccccactgcctccaccgccgagcaccacccccaccaccagcatccaccggcatcgttgcccctgagcggcaccatcccaccaccacgccgaggagaaagacgggcgcgccggcactgccggcactggatgagcagtccccaatagcatgtatcaacttttgcatatttcagcttgatgtcatgtagaaaatgcaagccctgtatgagatgggggctgctataaagtttcagacatttttgcaaattgttgtcggctgtggggtggtggcggttggcggcggggtggtggcgcccggcgtcgcggtgctcggcgacggtgggaagcgaacgaatgctgatccaaagagagatatttctctcttctctctttggatctgacaggtggggccaggggcagaaatgtccatgaacaggtaagaaacaaaaataagtaatgaaagcagtgaaagtggtactaaatataacagttaacagtggagacgactacggagggaaaaaaaatcggacgctgatgtcagcatgatgcatacatgcaaaaacactttaaactattttttctcttaaattatttatccaaatcatgatccgattgcaccattaaattcgttgtaattaaatctttaaagcaagaccacacatggatatattccgacggaattttttttagcttattattgaattatttttaaatgttgcacgatgttccactaattatatcggaattgtttcactatttagatcgaaaatatttcaatcgtttgaatcggacattgtttcaccttatataaaaacaatgtttcagcaagtagcgaaagaatgtttcagttcactgcaacatttgatactataagtacactaggtgaaacatttttcgtggaacaaaaaatgaaacgaattcccttaatagaaggtttccaaaatattgttgatgtgaaaacacgaggcctggaagatctgcttaacttcagtgc

SEQ ID NO: 12467 - DNA, 581 bp, Oryza sativa
aatccgagacgaactcgaatccaactctttccaaagcgatttagccaaagattccaaaggagaaaaggtagaggagatcccggagattgtttcccctctattgattcggccggagaaggaaaggaacggccggatttggaagggaaacagcggcggcgcgaaactagggtttcgggcgccggcgcccgaaggtagacgacgactgacaggtgggccccacctgtcagcgacagcgagggcgcgcgcggctgcggcggactgggccggctgggccgaggagagagagaagagaggttttgggccgactttcggcccaaagccaaaagaagactttttaaaacctttttcaattaaaattatttcttaaatgcaattccatttattaaaaatactttcttagctcaaataaatcccagaaaaatctaggaattatagaattaagcaaagtatttaaggaaattttatctgggcccattttatattggaatttattaattaaaaaattagatcttcttttcaagatttttaaaaataaattctagaaattccaattaaacagggtaccgagctcgaattcgccc

SEQ ID NO: 12468 - DNA, 670 bp, Oryza sativa
cacggctggcctattatgccgccgttgttgcgcgtatacgtcttcaccgaccggccgcctcgcccgccgccgactggtgtctccgcctgcacggctggcctattatgccgccgttgttgggcgtctacgtcttcaccgaccggctgcctcgcccgccgccgactggtgtctccgcctgcacggctggcctattatgccgccgttgttgggcgtctacgtcttcaccgaccggccgcctcgcccgccgccgactggtgtctccgcctgcacggctggcctattatgccgccgttgttgcgcgtctacgtcttcaccgaccggccgcctcgcccgccgccgactggtgtctccgcctgcacggctggcctattatgctgccgttgttgggcgtctacgtcttcaccgaccggcttgccttcgccgccgccgactggtgcttccgcctgcacggctggcctattatgccgccgttgttgggcgtctacgtcttcaccgaacggccgcctcgtccgccgccgactggtgcttccgcctgcacggctggcctattatgccgccgttgttgggcgtctacgtcttcacggatccgctagcctcgacctccaggactggtgtctccgcctgcacggctggcctattatgccgccgttgttgggcgtctacgtcttca

SEQ ID NO: 12469 - DNA, 667 bp, Oryza sativa
ccagccgtgtaggcggaggcaccactcggcggcgacggaggcaggccggcggtgaagtcgtagacgcccaacagcggcggcataataggccagccgtgtaggcggaggcaccaatcggcggcgacggaggcaggccggcggtgaagtcgtagacgcccaacagcggcggcataataggccagccgtgtaggcggaggcaccaatcggcggcgacggaggcaggccggcggtgaagtcgtagacgcccaacagcggcggcataataggccagccgtgtaggcggaggcaccactcggcggcgacggaggcaggccggcggtgaagtcgtagacgcccaacagcggcggcataatcaaccagccgtgtaggcggagacaccactcggcggcgacggaggcaggccggcggtgaagtcgtagacgcccaacagcggcggcataataggccagccgtgtaggcggaggcaccactcggcggcgacggaggcaggccggcggtgaagtcgtagatgcccatcaacgggggtgtgataagccgaccgtataggcggagacaccaatcggcggcgacggaggcaggccggggtggaagtcgtagacgcccaacagcggcggcataaaagccagccgtgtaggcggaggcaccaatcggcggcgacggatgcagg

SEQ ID NO: 12470 - DNA, 650 bp, Oryza sativa
tggtgtcttcgcctatatggttggtgggtcacaccaccgttgttgggcgtatacgtcttcaccgaccggcccgtctcgtccgccgccgattggtgtttacgcctgcacggctggcctattatgccgccgctgttgggcgtctacgacttcaccgccggcctgcctccgtcgccgccgagtggtgcctccgcctacacggctggcctattatgccgccgctgttgggcgtctacgacttcaccgccggcctgcctccgtcgccgccgattggtgcctccgcctacacggctggcctattatgccgccgctgttgggcgtctacgacttcaccgccggcctgcctccgtcgccgccgattggtgcctccgcctacacggctggcctattatgccgccgctgttgggcgtctacgacttcaccgccggcctgcctccgtcgccgccgagtggtgtcttcgcctatatggttggttggtcacaccaccgttgttgggcgtctacatcttcaccgaccggccgtctcgtccgccgccgactggtgtttccgcctgcacggctggcctattatgccgccgctgttgggcgtctacgacttcaccgccggcctgcctccgtcgccgccgactggtgtcttcgcctatatggttggtt

SEQ ID NO: 12471 - DNA, 7288 bp, Oryza sativa
acaaagatttcgagggaaatatcattctctaaatcaagtaagaatacacatagttatgatattatcggactaaggagaaaaaagaaccatgaccaaaacgcctattgttttaaaacgattttctaacctaaaaccgaagtggtaatataggttgtagctcaacattacaagggttatgtgggcaaatgtttggtaccttgagcagataaacatcgctcctgggtggagaagacctaggggtttgagaagagcagtgatattgtgacaagtttccttaattcctcttgctttgtttagtggcagttttacttgtggactaagggatgaccgtgagcttgtaatgccagagctgaagttgaggttttagtgacgtgccactggggttttagcggtttgaaagccacgtgtgtgtcctctcctgattacacttacaccatcactttcttggtcatgtcaagtcaacgacgatgttaattaccgcaataagaacaaatctaatactcctccgtcccaaaatataaacattcttagcatagtgacgagtcaaatgtttttaattttaactattaacagcaaaaaaataaaaaaaaatcaatcatgtaaaattgatattagtagatttatcattagaaaaactatcataatatttaactttttttatttaaaacatcttacttttatagatattgttggttaaaatagcatctcagagaccgtgttagagtaaaaaaaaatgcttatattttaggatggagggagtagttatctacattcactctaatagcttagtcatataataaatttataaatatatattttactatcaatatttgatcacctcgcatacacacgtaaatacatgatatattgaaatccgtgtgtcacagctgactatatctatagctcgtttttctcctctctacgcttatctcttcttgacatttacttgtagctaacatatagcctgttgtcttaaaaaaaacatatagcctgtatttgctacgcgttgttatatttctaccggtaccactgccctgagttcttgatttgtagcataaggtacaatatttttttcccataaacgtgatcattgaagaagaaaaaaaagggatattgcagatgtgctgactgagctaattaagaataagatattcaggcataaaccaagttagctagtgacttttgcatgcatttgacatgcataagtccactagcaaatatctgcagccaaaaatcatcctaatcctaataatcaaccaaaaaagtccaaaacaaaaggaaaaggtcaaaaggtactcatcgcaagcctgcaacaagtcgcacagcaagacagaaactcacaccagttgggcaggaaaccacatgaccgtgtgtactgcatgccccgtttggctcacaacctaaccaccagcacacgcctaattagtttaatcaataattaccttaccttgtttttgctttcagaattaagtgatcgtctcgtctaagcttcatgacctttacgcatccgatcgagtgacaagagatcaattggagtagttataaataagcgtgagtattataattaggagaagttttactggtgtttttatttcaaaaataaaaaaaaatcaacggtctaaaatagaagtattatataagggtatttaagtatcgatctaacagatgacatggtgaagggtgtcgacaaataaccatattttactgttgattaccctgttgtcattatttactgtaattttattttaaaaatggaggattttcccatataactatataaaccgatgttcaatgaccgaacgaaaatgggaaaagtttcaaaaaggaaaaaaacttttcgccttcaaccgggcctaattcaaaacagcccaactattttgcctctgtttttttacgtgatttttcaaatgttcaatttcaaaaaaaaaaggtcaagttcaagcttgacatgaattttgaccttgtttttacatgcattttaaaatggaaactgaagttcaaaacataggggagaaagcaatagcctagcaaacaaaaccattttccccctccaattggacctaatttgaaacaacacccaattgaaaatggaatatgtctactttgactcccttaactagtgtcttaacctaatttgtatctttaaaccgtaatagcggatattttgacccccaactattaaaactggtgtaatttgtctccctcaacggttttggaggactgttcactatcatggagcatacgtggcggtgttgtaagcgtctgtcgaggagtgatcctctctagcaggagatcgtgagacccccctttcgtgagttcggccggggaagaagctcgcctctagaaatcgcgtatccgtccccaaggctcctagctagctcgcacacaaccaaattatacaggttcgggccgctatgaagcgtaataccctactcctgtgtatgggatttagactgagagttacaatggttcctaaactcgggagaacactcttacttccctcctccacaagctcaggttttctgagagtcgtcctctttctcggtgggtaaggtcctccttttatacctcaaggggataccacatgcaccgcttctacctactcttttttcgggaggggacccaccatatcttgactggaactcgacccgtgccttcgcctggaagctaaaccatagcttgtccttgagcggggcccagcaccgtccctcgcctgacacgggggacagccctgtcattccctcattaataggtgaagacttgtggtggccgccgtccgaatgaccccccgacgggacgggccatacctacctccactccaccggaagcagatgtgacgtgggagcacggttgtccatccagtcagacgtgaccggcgtcaggccggtcacagaccggtcattcttgaccatcgcgcgtcagtttagcacgccgcacgtctgccccactgcattaaatgtgacatggggcagttgaggcgctgtgcggattaaaggaagttcagcctggggcccctcctcgcttgctccccccgccaaacggcggctgggcgagggcctcggggcaaagcagtgcaagggcccgaggggcatgacgtggcaccccgaggccccgacaccccggccgctcctgcggttcgtggaatgcggggacaggaccatgctgtagggacacgtggtaggatggaaaggtagattcccctcacttcgcatacccccgggcccatatctccgacagtttagggcttagggtttaatagttggagagtcgagatatccggtactgcgattcaagcatacgaatcagattcggcccaataatccagatgccaataggacggcccatcaatccagatgcaatacgacggcccatcagatcccgtccccgagaaggaatccccctcaccgttggatccgatccgacggctgagaccagccacacaaaccctcaatatatattcgctcgccccccgctgcgtctcgccgctcctacaccgcgccgtcgccagcagccgccgccgctgcctctcctcctcctcccctcgccgccgatccaatccggtaagcctcgccgccgcaagctccccctcgtccctcccccggatagttcgtcgcctcgtcaggcatctcgccgatttggcgccgttctgttgttctgtttggtggagccgtgcgcgagatttccggtgtttgttgacctgtttagctctgatggattcaccttgtgttagttagttttccgtcgaatggtgtggcgattaggtttggggggattggttcgtctgtgattttgtagctagattttttgaaatctagggtagtgtgagtggggaagctgctggccttagtggatacatgctgttcgtggtctcctggttcttgaaatcatgatgagttagtgctgtttgaaccttgaagcaaagttttaagttattggagttcctgtgcttagatttgtatactattagtgaagagatgcatagctgtactgctgtagtggatataggagtgttgtttttgatttgctggtgctcttccatagcatccggatgcggtgttcaattgtgtagttgtttatgtagttcaatgcactagaagcttttatttctgaatgcctagttattagttgggtatgaagtccaatgtgtgaaatgctgtcatgtttcaacttttagttaagatatgaaacttgagaaacaaatgaaaggtttagattcagtactgatgtacaacttaagtaacatctatggttgtaaattgtaccatgcattggttattgtgaattagctcttttggttgattgaaacaattctctatgtgccaacaggtcactttcagtcttttttcttgagggggagatggcggtttctttcaccaacgttagctcagaggcaggcctcaaaaagctcgatgagtaccttctcactcgcagctacatctctgggtatatgatcagtgtccactgtccaccttattttctgaattgccatttatgttcactggacttaaacccttcaattatctgtttccaggtaccaagcctccaacgatgacttggctgtgtactctgcattttcaactgcgccctcttcaagctataccaatgttgctaggtggtttactcacattgatgcactcctacgtctgaggtatgcatttttcccctttttttattctcttacattttatgttcagtgttgtgaattttctgaatgttgtatttcagtggagttactgctgatggtcaaggcgtaaaggtcgagtcgacagctgttccttcagcttcaacccctgatgttgctgatgcaaaggtcatacaaccctagccttgtcttgtttgcctgaaatctgtgaagtgttctagcatagtactgtgaattgtgatttgatgctgtttgcaaattacgtttttgtggttcaatggtgctggttaccatctctaatatatcatcatatcttctaatttcaggctcctgcagctgatgatgacgatgatgacgatgttgacctttttggtgaggagactgaagaggagaagaaggcagctgaggagcgtgctgctgctgtcaaggcttctggcaagaagaaggaatgtatgccatcctgcattatactataccatttttatgcaatgaataatacaattattcattttattttattctcatctgtagctgtaaattaagaccaaatcatcactattcattataatgcaaagtgctacttctaacttgtcaacacctttttattcagctgggaagtcctcagtgttgcttgatgtcaaaccatgggacgatgagactgacatgaccaaattggaagaagctgtgaggaatgttaagatggaaggcctcctttggggcgcatgtatgttactacattaaatttcttcctacgaatgtactgtcttttgcttttgctagtttggttagattgtgacatgaatatataccactgtttgcagccaagcttgtcccggttggttacggtatcaagaaattgcaaatcatgatgaccattgtcgatgatcttgtgtcggttgatagtctgattgaggactacttctacaccgaaccagcgaatgagtacatccagagctgcgacattgttgcgttcaacaagatctgtaagttattccataagtatcagagcccgtcgttttatttgctagcgttgttcttgttattatactgaagcaatcggatgaccagctgtcttattttaaggaatcgatcctatattattctttaaatgatgatgcatgccatatatattattctgtaaatgataatgtcctgatgtttcatatctagatacctcatttgctgcacattactctctttattcagtaggcttagatacctgatttgctgcatattactctctttattcagcaagttgctcatatctagatatctcatttgcagcacatcaatttgatttcatatggtcatgtaaatttcatctgccttgagccatccttgttcagaactaatgttttgattatgttttattgcagagatcttccttgagtcaggtgatggcgatcggtgcacaaagataaaaagaaaaatccggaagtttgaattaccgttgatacttcaatctagaagtttgaattaccattgatgtgtcgttcgtggtgtcaactagtacttgagcccgttttgtgttgagattgtagcactctacttctactgagatcgttttctcctcctttaatgtttaaagaccaatcaggttattattactgtgtctgcctgtgtcaccatagcggcattgttggtcgatccagttttgatgcggtcttcaattctcccgtctttcgctttgcttgattgcttcatcgcttttgcggctaaagtttttctgctcctaccaaaactgtaggggaaactttggttgtgctgtttgttctatctcttatgcattgcacagcctggttttttcgctcttctgaagtatagccctgtgcgctctcatcaggcctgtcctgaaatacgtgatttccgttcggtatcgatgttcggtttgtcacacatatcttctactttcttttctgtaatgaagagcattgtctactgttatcacttatcaggttcgaattggtgaattcacagctgagtgttggtgcatatatcacgatcaaagtaacaattatcatggcaaaataggtggtttcacctctcggtatcggttttcttccattggcatccctgactcgtggctcgtgggctggcattgctgaagcagcacttaggcaacatgcgataaataaagtttctcttcacaatcctcttgaaagctgctcaaggaatattcagcttacgataagcacatccgatctttgacctacataggcagcatatgatcctgagcagtaaaatttcctgcttcacctagtaaccttcactctttccattaattctttgtcagtctaccctggaaatcctcgactagtgtctactaggcactagctagtcaactgctagttcccagagggatacagcaatatctgagtgattcaccgcagatatgtcacccatcagaagttgaccatcatcagttactaagagcacccgcaatggtaaagtaaggtgctatctataaaacatgtacatctcagcaatagactcgattaatagtaaaccaccttaatagtatgtctacattggtatctatagctctctcatgcattgtctcgtttttctctatagactatctctaagttagtagatagctttgctctctctcttcatttaatacattccaagtaggaaaatatgctg

SEQ ID NO: 12472 - DNA, 689 bp, Oryza sativa
aaatccctaaaaaaggacagcatccagacacagtaagatcaagcattaatacttgaggcacttgccatatacagaaccaaagatttggcatatgagcgaatcagaacgtttttttagaaataaaatgatatactacgttcacggaatgtgatattgccaactcctcgtgatgtgtgaggatgaacagcataccttgctgatcatagtcaatgcaacaataatctgttgaagacctatagctcttggagatgattcttcaagtccttgtgctttggcatccataacaagtgactcgatctggattgattttcaccgatgaatgtaagattcttaaacccataggacctaaggccagcataaacagggggagaaagagatcgatgatcacctgttgacagagaggattaagtaaagctgtcaagcactgaacctgcttatctggtgacacctcttcaatgccgatcaacagtcccacagcctaaaatcataacaagcgtcattgatccaagattagtgttcccagtgtaaaacaacagctagacaaaggtgagaacattgtacctcgaatatttggctgccatcctctgagctggagaacttaatatctttgtttgcccagtccgtagcagtgaattgcactagggcatcttgcaagctctgttaactcatagacacacataactcagatc

SEQ ID NO: 12473 - DNA, 3685 bp, Oryza sativa
tcagcaaatcctcttggtcgcgcgaagtacgaaccactattctgcattccggacatctcctgtttggctgtctccatggcattagcggttcttcctcctcaccttgctgcgattatctccgtcccagcctctgaatgattgttaatccaaaccgataggtttaaatggcagaagcaatgctttgtcttcaactgttatcgtcgcctattgacgcttctggagcatgttctgtagttctaggatattaaggtcaccttaaatactaaaaaatggtttgcaaaattaaatgtgccaatgaatcgtagaacaaacaattaaaactgctacatgactgtggagtaccattgtttttaaggtggttttagaagatacaattatagctaatttgcgaacagaagcaaaaaagacgctttggccgagtggttaaggcgtgtgcctgctaagtacatggggtctccccgcgagagttcgaatctctcaggcgtcgttaattttttttcctttttttattttctcctgtttatatttttgtgttagccttttcctgtttgcattttttttggggtgagatttcagaggttaatgctcgtctagacgtctactctgtcgatgtgagactgacttgtgatcatctgttaaattgttgatccttgtgggatgtcaatgtgacgattttttgtgatcatctattaaactgtcaatccttgtgggatgtctgctatttctgtgaagtgctcccgaccccaatagatgattgatcggtgttcggtggtgggggttgggaatcatcacccacgcacgaaaaatggagtgatttattagcgcgtggttaattaagtattagctattttttttttaaaaaaattgatcaatatactccatccattccaaattaatctacatatttcataggtataccaagaccaagaaaagctaataactctctcatactatatttactctagcaacaaactcaatgcatgcaccatccccaatatttcctagccaataataaatcaaggtattgtatatgtgttataaatacttgtgtgcatggaatgcatgcatcaatgtccatttactccaatgcacaaataacgaatagactctaataaataaacacaaatgtgtagatcatttaggaataacctcaaaaaaaactatatgtagatcgatggaatggagggagtaatattttaagcaactttcgtatataattttttttgcaaaacacacgacatttagtagtttgaaaagcgtgcgcacgaaaaacgagaggggagttgggaacggctggtatcgaaaacagcgagtcatttatcgtaactcacgaacttaaatcaaacggttaagattttcctttaaaacatctctagcacttctcacttcatatggttctcacagaagaagaaacaaagagtagaaaataaaagagtcatttatcgtaactcccacgaacttaaatcaaacggttaagattttcctttaaagcatctctagcacttctcacttcatatggttctcacagaagaagaaacaaagagtagaaaataaaaaaagaaaacaaaaattaacgacgcctgagagattcgaactctcgcggggaaaccccatgtacttagcaggcacacgccttaaccactcggccaaagcgtcgcttgtgaatgcggaaagcaacaaattttacttgtttccatccaaccatgcatatacccgagcctcgaatttcatttttacctctcccgctcaaggggacgggagtttgatccgtcactctagatcctgacctaatggacaccggcgccgaccaggcaccacctcctcctcctcctccccctgtggcggccgcctccgccgccgccgacgagccgcgggacctgcgcgtggtgcgggagatcctccactcgctggggctccgggagggggactacgaggaggcggccgtgcacaagctcctgcttttcgcccaccgctacgccggcgacgtgctcggcgaggcgaaggggtacgccggccccgcccggagggagtcgctccaggcagacgacgtccgcctcgccatgcagggcaggggcatgtcttccgccgcgccgccgagccgtgaggtaattgatttgagcccgaagcccctcttcgcttttgtggaattttttttcgccggtgttgtttgctgcggaggacatcgaattttccatcgtcggttgcgaaatcgtcaggactgcgtggtttttggggttggatcttgcggttttgtgtccaaatcggagccttttagtcttaggaataggtgaatttctgcaaaaacggaatccttttgccttcggatcaggggatttgtgctatcaaggcagctcactaaccctttagcctttggatcagtgtatgttatacagatacgccatttgtagactaagacccctttaattctaaggatttattgagaaacttcataacatttgaaaaaaaaaacatgttacaaaagcagacactcattcacccctatgaacacaaaacctatccttatgaacaccccctaaaagactgaaccggcatgtgttgtgattcatgaagtcaccacaaagatgtctcgctatcaatggatatgttgcctatcaatgaaagaataattaatcataaatgcaagcacatgtaagtctagaacttgaacctgggtaggctgattccaccacaagaacctaaccagttgagctacgctcactttgctcctatttggccctttgatataaaggattggagctttttaaatcctataaaattcctatggaatgacttattacatatagattttgaaaaaaattagcaagatctcatatctcttggaaaattttcttcgagtctatttctctcttctgatacatgcatttttttcttgtggtttataaatcaaatgactattcctgtctgttttcctgtgctttatactttcattcctatcaaatttcgtgcttttcctattctccgttttttaatccaatgtttcaaaggagctttaataggtgtggatggtatacttttttggcaagaagatgatataactaaattaatgctgacaagattttttctttaaaatacttgagcttctaaccctacttaattgtcgagtgctctccaaaattcacaaagccgcaataccaaattggaaaccgctctttagcagttttcttggtttttgtgaaaaattgataaagaaatgatgaaattcagatatatttcatttaaaattggaaattcacttggttttctatttgactggttaacaaagctgttttgttaactcaagccagttcaaaacctcaaaattgcatgaaaatcaagcagtttttgttggttttgtaaaccgtgttggtcccttttattaaattttaatgtttctttactcactaggaagctcttcttttgagagcgtaggctagttcctctaaggttagttacaaggtggtgataggcatgtgaatattggataagcaagtcgatggcattgtctaaggaggaaatggtgtataaggcgacccaatggagaggaggatgaggttggaatgtggtagaggaggtcgggatacaaagaagtaggtaatagttccaactgaggatatgatgaatgggttttatggtggtgaagaagtatgcggcggaatctttgggcagcaggatgtgggagatagga

SEQ ID NO: 12474 - DNA, 1520 bp, Oryza sativa
taatgtttctttactcactaggaagctcttcttttgagagcgtaggctagttcctctaaggttagttacaaggtggtgataggcatgtgaatattggataagcaagtcgatggcattgtctaaggaggaaatggtgtataaggcgacccaatggagaggaggatgaggttggaatgtggtagaggaggtcgggatacaaagaagtaggtaatagttccaactgaggatatgatgaatgggttttatggtggtgaagaagtatgcggcggaatctttgggcagcaggatgtgggagataggatcacacttgggttggaggaggttgatgtttgtggcaaaaaaaaggagcattgaatgtggctctggtagcaaaagaagaagatcaatcacaagcataggtaatttgatggcatcaatcaatgtaaaaaaaagataaaatagcatatgagagggcaaaataaggaagtgaagctagaaaataagtgcaacaaaaggagaggcaattttttacaatggaaaataaggggcacggtcaattatagaggaaaaaataactctatattacttatcttttttttaattcataaacttcataagtagagctaaaaatatgatatgatgttttgggggttatatatgatgttttttagccaaccatacattgtcatgtcaatcctagaagtctcttatctattcttgttcaaattgaattattttgcaacgtagaaatgctcggttgggcctatacaaggtcgagaaagtgacctaaactagccaccctaacatttctattatattatgcaacaaaatcatcttaagacaagttgtttttttcccaataagccagcccattaagggctttttgtgggtctattcttaaggaattttataagatcctatgttcaatcattatttaattggttgctataacgtccatatacacatgaaaaaattgtcgtaacatgacggatatcttcactttggacaggagatgcttgatatagcacataaatgcaatgaaattccaatacccaagccttgtgttccttctggatcaatctctcttccacattatgaggatatgctattgaacaaaaaacacatatttgttcctcgagtcgagccaacaccccatcaaattgaggaaactgaagatgattataatgatgatggttccaatgctaatgttgcctctcccaattccaattatgaccaagatctttttggatcgatctctcttccacactatcaagacatgttattgaaccaaaaccacctatctgttcatcgagtggagccggcacatgatcaacttgagaaaatcaaagatgatggttccaatgacaatgctgactcttctcattccaattatgtccaagattcttctggatcagtgtctcttcaacatcatcaggatatgtcattgaaccaaaaccacctatttgttcatcaagtagagctgacgcttgatcaaattgaggaaattaaagatgatggttctaatgacaatgttgactctc

SEQ ID NO: 12475 - DNA, 2838 bp, Oryza sativa
ctcttcgccggctttagcgtacacgccagagtccgtcctcagtatgatcttggcgtcctgcgtgacgtagcacgcccagttgtccacgtaggacagcggcccggccctgatcagcggccgcgtgtcctccacgtcatcgtcctcgtcattgtgctccgtgtcatcctcacactcctccctcagtaggcgaacctgcttgacacaccacacgcacacacccacgagtcggtaaacttttgttcatattgatataagatgatgggctgtagtaatggtgagcagtagtagcatgtacctcattgaattttgtgagggcgtccataggatgcagatggtgcagaggaggaagaaggagatgagctcccacaccgcggggattacccacgccactcgccaccgctcgttgtgctcatcagtcgtcttaaaatggacctgaattttgattttagaatttttttcatacattattttgaagtgctaaaagtcttcttatgttaattaatttacgagcttgtactaatgtaccacatgaacagttagtgtcatgacgataaaagtcaccagtaatgtggacgaaaacaactaaggttgtgtttagttccacgcaaaattggaagtttaaagaaattagaatgatgtaacggaaaagttgaaagtttatgtgtgtaggaaagtttgatgtgacggaaaagttggaagtttaaataaatgagttgaaacagggcctaagaaaatgattagtcatttatgagagcaaaaacaaatgctgaaatgttcaggccctgtttagatgagactaaaacttttaaatccctatcacatcaaatgtttttggacactaataataaatattaaacgtagactattaataaaacccatccataatcttggactaattcgcgagacgaatctattgagcctaattaatccatgattagcccatgtgatgctacagtaaacattatctaattatagattaattaagcttaaaaaatttgtctcacgaattaactttcatttatgtaattagatttgtaagaagactatatttaatactctaaattagtattaaatataaagttaagtccctggatcctcagttctctgaagttgctgagccatcagaaaacagctaggactgcagcgaagttatacctcaaatgtgatccagccgagcgacagggccacggcgatggtgagagaattcgcgaatttccgatacatttcaagcttcgccgtcatcctcctcgcctgcaagaatcagattaatcacagaattcattgatgattctcgaagaattattcgaattttggtagaattttgaaagtgggaagttcaaatgatgctaccttgagcttgctgatagttcttgacagcgaggtgaagatccagtagatgaacaccgtgttgagggcggcgacggggagaatgaaaaaaagcctcctcgccggcgagtggtcactgacgatgccgacgttgtcgccgacgtcgagcacctccgccgcggcgaggaacgcggcgccgagggcggccaccctggcgttgccgcagcccagtgcgggcctcgtcacgccgtaccccatggccacgagcagcgccagcacgcggcacgccgcggcgcgcacggcgcccgacgtcgccgcccagaacgtcgtccccgccggccggacgcccgacgcgtcgaactcggcgaggtcgaggtaccaggtggtgaccttcaccatgcccagcgcgatggccgccgtcgcgaagttctgcagcggcgacacctcgcgccagaacctcgcgtaccgggcgaaccagagcgcggcgagcgcggcgaacgccaacgacattggcgccgtataacggcttgagcggcgccatcctccccgggaggtagccgcggctgttcttccagatggtcttcccctccgcggccaccacctgcccggcggcgagcgacgcgtcgcagtggacgaagtggaggctgtacatcccggtgcgcgccacggcgacggtctcgtcggggaacgccgcgacgaggctgcccgggaggaacgacgcggcgagcaccttgggccagcggccggtggcgttcgacgacgcgggggcgcggtacacgaccgccccctccgtgcacccgcctcgcctcgccatgcccggcgtgcagcacagcgcgcgctcgccgccgacgacgtcggacaccgccccgacggcgtcgcggtcgccggcctcgaagatgaccgccgccaccgtgaccgtccggttgccgtcctcctccgccaccgacgccgcctccggcgtcctcctgaacgccaccttctcgaatctgcaccaagaaacccccccatggcgagcgcgtcacatcccaagaaccaattcaaacaacgaagcaatgacacttggcacccacaaccagctccggccaccgtaccggacgaacgactccgccgtggccgacgcgtagacaccctcgctgccgccgtgcagcacgaagccattgccgacgccggcgaacctctcgccggcgtactcatgcaccgacgcctccgcacaaacgacggcgcaagaaacgaccaccaccgccaccgccgcgccggcgaggaggagccgccttatcgaaggcatcactgacatcgccggagacgggagactgctgctaccaccaccgccgccgcggcagcatcggcggcggcgtggagtagaaatacgagaggtggagggatcccgagaagtggagggagaacggaagagacgactttgacgttgggaggcaaccatgaattttgttaggtccacccccttaacttcagaggaaaagaaaaagaaaaaaatacagagaatccattgcaata

SEQ ID NO: 12476 - DNA, 5577 bp, Oryza sativa
gttacaagtgaagtgagagtgctacagagattaagtcagcgagccattggctaatctcgatcggtcgagcgagtttagtggccaaattgcgtacttgtttgaatgcatccatccattcataaggcggccactggattttagtgtgtgtatctagcttagccaatacatgctcatggtattcgttctcaaaggtacattgcataggttgtatgcggatctacaccttttttggacactgaaataccctgaattactattttctgcgtatctttttctcaagcggcaatatagttttatcagtgtaactaccccaagctttcaacaagcctatacccgatccgtcgtaaaaagccatcattaatccattatttctatattaaaataattcattactgctagctatcaattagaaacgacaacaacggttataaccagccaacaggacggtaacccgccaacagcagcaagtgtctaacggctagactgtgcagttgtaatcaaggtacacttagctaccgaacaaccccaattttttaaatcttttaaaatacaaccaaatttgatcccgaatcttaaattcctatttaaaaccaaatttattcagaatttcctaagccatccgatcatcagaaagatcctgaaaactagggcacatgaggattatctgcaaagctccagagccagtcctttaaaccggtagaatatccccaaccccgtccgtacgacccaggtgttccggtgcgggtagccaatagccaaagcccaaagagcccagcaaccgaagcggccgacgtggcgcatcctcagccgccgcctcacgccgatccaacggtggccagatcgatccgtgcaaagtatacgtggcttcgcacggacccatccatctgtgccctagtttaatcccccggggcgcgggcctaatcaacttgattaagcgccactaaccaccccctggaacgatctccccgatatttaggcggagattaacgaggcctctgtgcctcgtggggagtaattaatggcggagaaagttttggttaatcaaagagaggggggtaattagatcgatgagtggtcattaacaaacaggtgtcagcccgacacggaggagcctggtcgtgacacttgtcctccccgggatccatgttggcccatatgggtgggctctcattggccgaactgcaaaagctgatcatttcccttgtgcggaaatgtgttgttcatttttgttttgtttttgttttttttacgccttgtgagatattgtcaatatttcaagatgtactccctccgtattttaatgtatgacgctgttaactttttgataaacgtttgacctttcgtcttattcaaaaaatttatgtaattataatttattttattgtgacttgatttatcatcaaatgttctttaagcatgacataagtatttttatatttgtataaaatttttgaataagacgagtggttaaacgttggttaaaaagtcaacggcgtcatacattaaaatatgagggggtataaaatatgaaataaagaattattgtagttctagcttgggtcatgcgtgacaccatcatagtacggtagcagccgcagtagcaacagggtggattataaaggaagaagttgaatgcatttatgactctatttatcagggtttaaattatgacacatataatggaaaaattgtaaaaaccatctcaaatgtcactataagtttgagtttccccctataagacgatttgtggtaaatacacccccctctcttagttcaccttgatttgagattcccctgattgccattgctcgtccattctcgtgacaaacccccccccacatgtgttcacatgaatactaatacgggaggagttgtggtcaccactcatgttgatcaagcctaatgacacgattgtgacattcttacacatgacacgccaacaccttgttgggcagtgtgatcacgagtctccgcacttgaacatcagggttgtcgaaagatgagctactgcgcttgcctcatggggtttcgggtggctagtttcttcgaggattcaaaaacgatgaaaatgagctcagtgtgacactgtgctgctaagaaagataatgtgttcagggtcatatacatcaagagatgagctaagtcgtataacacatgagaaaagagaaaaaaaatagtgtgagcaactggggaggaatatcaaactaaggtgaactaggaggtgagtattcacaaaagatcatcttatagcggaaatcttaaactcagtgtgacatttggagtgatcttctataaatttccctaaatataaaatgtacgatcggggtttaaaaaaaatgtacaatcataaatattgtttcacctctgtatgttgatcgtgctgataagagtagtcatgagcaggggcggagacaggagtagggcagcttgggcttgcaaccctattcctagtcctaaatattcattgaaattccattttaaaactttaaaaactagaagataaaggcaaaattatatatattcaactaattgagccctaagtttagaaaaattttggctccgccactagtcatgagggtgtgcatgcacatgtatctttcgtgttatcgggcaaaaaaaaaacaatggtttagaatgtactaccaccatcctagaaagatcgcagttttgtacagtatatgtataatatttggccgttcatcttatttaattttttttataattagtaattttattgttattagatgataagatataaatagtattttatgtatgactaattttttcaaaaagaaatatatataatttttttaaataagatggacggtcaaacattagacacgaaaactcacaactggatttaaaatgggacgtagcaacaaggcagaggctgtactggccgagagtagccattgtttagttcatagtgggtgagtaaataaaaaaatgtaagtcgcaactgcaagttttaagatcattaagtcataaattaatatacattgttttccctcattaagactgagacaggaaaaaatcgatatataaccacatgttggccaatttggatggactctgattggccgtactagcgaactcactagttcctttgtggggaaatacgttatttgtcaatatctttttttccacgtcttgcgaattgcgatgtaggttcatgcatggcactacccaaatgaaaggagtagctgaccaggatgaaatacactcccaatggccaatgggcgttcgagtcaattgaccactcgattctatcgatttgttttgtccgagtaacaggaacagaacagcttgatctatcttatcgcccccatcatcccataaatggcttgattcctcaaaaccaaataacccacaaatgtctctaaaccagcaccagaacgtttggactttggagaggtccaaacctgaaacctgatggctttttcatgggtaaattgtacaaccaacgaccgacctgatcacctgaccaagtgaccatccttgatcaagctgtacagtatggagatgcacgggcttttttttcttcttcgcaaactctatctatgtacactcgaatactctcctctctccccaaattacaaacacaaaaccagacggctacgagtcggaccctgaacacagctcggcgcagcactcgtagcagccgaggcaggcgaacgccgcgcagacctgcgtcatcacgatggcgcactggtcgttcatcttgttgcaggccttgatgcagcacatgcagcagaggcagtcggcgaggcggctgcagcagccggcggccttgttgaggatctcgaacgtctccagcggcttcacgtcgccgaaacccgtgacgaggttctccctggtggcggcccggtcgccgaacccgagcttgaggcattggagcgggatccgtcgaggttcgtcggggcccttgtgacctttcagtttctgcttgacctgttcgagtaaacaggcaagttagttgggagttctgagctagcgtggttgtcacaagatccatttctcgtaaaccagtttataagcagggaccattggtattattataaaaacagtgggacttaccttttgtgctgcatctaccttctccaatgtttgaagtaggaccatgctcgtgtactctgaaggaatgctattttgaatgcttagtttcaccaccttcaaaaatcaaacgaaatggagttactgaaacccatatactgctaactgaatggaactcaaactactaaagaaagtaacatatttcaggggcaactgcaattcacaagagaatgtgacctataaagatttcaaactagttcagggaataaatgaaatggaaagcgaacatcaaaataatattcagcaccaacaaccacactagggctgagtttagttccaaactttttcttcaaacttccaacttttccatcacatgaaaacattcctacacacacaaacttccaacttttccatcacatcaaaacattcctacacacacaaacttctaacttttccatcacatcattccaatttcaaccaaacttataattttggcgtgaactaaacacaccctaaggctgtgttcggatatggggagttgggaactaaactccccgcacggaaaacggatcggtccattagcgcgtgattaagtatttactttttttttttcaaaaatggatcaatatgcttttttaaagcaacttttgtacagaaactttttgcaaaaaaacacatcgtttagtagtttgaaaaacatgcgcgcagaaaaagagaggggtgagctgggaactctgtgttcggcacaccaagttcccatctcctctccatcgtgtttcgtgcgcacgtttttcaaaccgctaaacggtgtgtgttttgcaaaaagtttctatacgaaagttgcttaaaaaaatcatattgacccatttttgaaaaaaaaagctaatacttaattaatcacgtgctaatggatcgctccgttttacgtgcgtaggagattggttcccataaagcccaagcgaactcaagcatttttcaatgtattgcccattaaatgcttaaatgcttcagacaagcaatgtgagaactttcaaacattaccgattatcttcactatatctcatgactccaaaattcagtggaggtataaagcgaagaacatgtataatgcaacccttagccaaaagcctgaaacataaactcacctttctctccagttgcttgtcagaagaaagccatgccttcgctgtgagaaggccaatctgctgtgccgccaaaacctagaaatcataaataaaaaaaatgcatatattattagtatactcgagaaatctatggccccaagtatgatattgtgcaagtttctcaatggaaagaagagaaaccaaatgtacacaatagtgagcatcttactttgtcaaggggtatatcctttatatgctgcaccttaagttcaatcgagatctctctcatgtcagccaagtaacctttagctgtaaccatatctgggaacttgcattggtatttcccagatatacataaaggactatttgatgaaatgtccggaatgtattcagaatcgat

SEQ ID NO: 12477 - DNA, 4951 bp, Oryza sativa
  unsure (1)..(4951): unsure at all n locations
acacaatagtgagcatcttactttgtcaaggggtatatcctttatatgctgcaccttaagttcaatcgagatctctctcatgtcagccaagtaacctttagctgtaaccatatctgggaacttgccttggtatttcccagatatacataaaggactttttgctgaaatgtctggaatgtattcagaatcgatctgaattggaggaaaggaacagtcagaagacaataaaactactgtttttttctagctactactagttacacctgcaaaaagcatacccacaaaccacccttccatacagcaaataattatttctatatacaggacaggctctttgctaggaagagcagtataagatggtatggcagcaatgaacacagcacacatacactaccagagaaaatgagttgggaaatcacaaatcaaatactgaaaaagagtcaatttcattatgaaacatgatcgcaatgcagccagaaccaccttgatggcattactcgtcttacatatccatctctacataaccaaatttacaatattgagtagttagtgatgaattaactcacttcaaattcatcaagatgtgctgtagcatcaatggagatgtttgcaactattgtactcgatgctttcctgaaccacctaagtacctgactctcaattgatcctgcaaaaacaattcaccaaaaaaaaaaggtttatgaagatgttacatggacttcataaaagtcatatttgtccaattaatgcatataatagaacagtattgcttagatatgaacttcaggaataaatccagatcaataacaataatgtattggtagaatgcccatgaaacttgagcagaggttgcaagatggagtgtcaacttaaacagcatgcagggatcataaagaaacagtgttacgtggaaaattgcaaaccaagagtacaactagctcttagattgcagagcaagaggatcccttcatagaaaacattattgccacctctaacaatatgaactgattgcagtttggtttttctattataatttggttgagataacagtatatatcgtgtgtctcaggaaaagctaagaaatccatggagaaagggtagactgtgtagatcattgttctaaccttcaagtttaaagaccaacataaaggtaagagcatactgtttgctatgatgagaacaaaagggtatangggcttggtacctgtctcaaatgcagcataataatgccccctgcctattgatgccagcatgcgcaagaaatagtggttgcaatacaaacctgttattccagtgataaaatgaaaagagcaaaaagaatatatcaggtaaactgtaagcaatcagtaacgaagtagtacaaaactaaaacagcagagtaattaaaatatggttcgtctcatcacaagctggcagcatatatcaccacactgactggtctgttgacttatggtgtaagcatttttctcttacacaagaaaggatatttggagatagagaaatacatgagcgttggtgcaaaaagtagggaggagaattttcatgtgatccaggagataagtcaagagttttgaataatgagataattgtatatttgacgctctccttaacattacctagtccaaaagtagaaatccgaggagatttagatcctctgctgatgagctccgttttcacagtttggcatatattatgttcatcatcaactgatccatcagtcataagaaagatttgtggaagcacatcatgagcacttgacaatgatgccattgcctttcatgaaaaaaaaaagtgagagtattaacagtaatagaataaaaaataatactacatatgcatctattcacaatcgagatttaatattcaataatacctcattcaaaggatgcataatatctgtaccaccaccagcaacaaagtttaagtttatccagtcaagtgcacttgctattgatttctcatttactttctccaaacacgatgagaatgagtgcagctcatcattaaatgttataatgttgaagtaatctccttctgtgagttctgacagagcagtagacatcgcattcttcacattctcaagcggatgtccttgcatgcttccacttgtatcaatgacaaacacaactgcttttctgaagacctattgaattgctcaggtgagatataggaacaaggagagagattttgtgaaacacagaagaaggaaaaagggaatgtacttctgtgtcaataaaccaaaagtgctatgaacaaggccacctcagtaacatccttatttactataactttaatgatttacaatcgcaaaatatcctgatagtatttgctaaaagaagtccagattgtagtttgcacatagctagtggaatttcactagaaaaagatcaccaaatggcagtttagaatggtgggtttgttgattggttctataaaaaagtagttctacattagcttcatcagaaaggtttctgctagaggccctcttctaaatataaaagttttgtcaactgcagatatctcactcaaggaagatatgcttaaataaataaaaataaaaactatgggacgaaaccccgcaaaagtaagagcaactaacctttctgttgccacctccaggtaaaagaaatatgcagaacctatctctatcatcataatcacgcaatgtcgatggttgaacaagcacaccaccagataagtcaccagaataacctataggaatgaacataaatcagacaaatctgaacatatatttagctattgcagttttgaaacagtaaacagttctcgagccagatttcagttacatctgcaactaacatatgctcacaaaaaaagaaaaatttgagaagtcttggaaagtcagattatcacaggaactagtgagctcataactacttaaagaagtgactaccgattacagctaataaagagatcacaaaagggaaactcacactgtatgaaaaattgaaatctttgcttgaccaattctcaacagttgcttcatgccggaaagacaacttctcaccctgcctacctttttcctgaaatagtaagggaaactcttttgaagattaaatgttgtaaaagcactgatgccaattgcccggaaatcaaaagagttctagcaaaaaaaaatgattaccttcaatgggtggcttgttccctgcagtaaaacctctttactgaaaccactattcacagtcaactgaattttctcccttttcatgaatacttttggcaatgggttaacataatatggaaaacggaacggtatgtccactgagaatcgtccattgtcatagtgtagcttctgagaccatctgattgtggcagaaatatccgccccaccctcaatctttatcggcaagatggcaatgaatcttcaaagtaagactccaattccaaaagttcaaagaagagaacaaaagacagttctgcatttagcatgtacctgtgatattgtcaaataaaataattggggtttcaagagtccgccactatcagcttttggagcattctctgtagtgtgatcttctacttcaattacttgagtattatatgatcttcttccaacggtaacctcggctcctagaattgaaccctattagccaaaccgttcataggttgagaacaagacaaacatggaaattaatgcaactcatataacataattaaacataatatactagtagatgcctaatgttcatttaatggtgatgtttcctacggatggaaagtagaatcagatgtttcaaaatatcaaatattagtgtatgtgagttatttattacaaatttccaagttgttgttaatcaacttcgctaggcaagataacaaccacccaacaccaatgaataatatgctatagtcatccaagacaaataacttcaccaccgaattatctccattctgcaagccattatattctacaaccagacataaaaggagcaatggagcatcatgtgtacttctagatgctgaagtaaagaacaagctatacaatatgtttccaaatgacacgaagcaacatatttcagtacacatcaacatatttcttcttcctagctgcctcatttttgatacacaagccaggttaccactctgctaaaccagcacattccttcttgtgtttgatttccataggacaaagcaaggaattactttcacttgcttatgccactttttactgaaaattgctcttgtaatataaccaaaggcatccatttagtcagctggaattcataaactagttataaagaaagtacagaatttagtgcagagcacgccatgatttgcggtcaaccacctcaagacaactcaatcaaacgaaccatatgaacaaaaaaaaaaaagagaacatattccacttggacaaacactgggttaagcaaacacctgaataatgttgccaccaaccattccaacagcacagtcaacaataaggtacaaaaccaacaaagcatccatgtgaagaaaacaatagaactaacggctcaatggagaatcaaaactgcaaatcgagaggcacatatacatgccgcaaaaacaaatccaacaaattcatggttcccaactatgtaataacactagccaaacagccggaatcatacatagcacagcaccaatcatttcgaacctcaccaaaccaaatctacgaggcaggagaagggaacaacacagctacactagggggtaaaacaaaaaaaatcgccaaaatgtgatccgatcgagatttacctggtcgcccatgggcacgacgatgcggacgtcgcagtcgcggctgcgggtgatgcagtgcagccaccaccgcgcgcggacggtgacagcggcctcgccgagcgcgcagtcgacggacaggtcgacctccttcatctggagcgggatcagcgcgggggggtcgaggcggccgtacacgtatggctggtagctgggcacgtcgggggtgtcg

SEQ ID NO: 12478 - DNA, 534 bp, Oryza sativa
acggtgtcccggatggtgcggaagtgcaaggcaatgatggcggaggcggcggtgctgccggcggaggcggcgcccgaggcgctcgccgcggcggcggagcacgggatattccggaacaccgtggcggcgctgctcaccatggaggacgtgcggcgcggcagctccacccacgggcgccactcgctgccgccgctcaccctgccggactccgactggctccgctccttccagccgccgtcccccatccccatccaatgaccaccgcctcttcgtcctcgtcggccgcggcggaggctttgccgggaaattctgcgctgcgaaatctgtaattaaatttgcttaattatcttcttgatcttttttctttttctttttttttttgctgcttcttaaataggagcggctaaataatgtaaaaatgcgagttaacatacatacagacgaattcatacgtgttttggctttcaaatattcaaatgtaatacgaattttcctcttgttttcgaatgttattgggttaggggcagtttgaca

SEQ ID NO: 12479 - DNA, 781 bp, Oryza sativa
ctctagttgtacatgagttgtacaactggatctcatgagcaattttacggttcttaaggaggtaccaaaaatttagtataaaatttggtaccttatagtacccaggtatcaaaaggtattaaatttacaatagaaaaagtgatacctcatggtacctcctcaagaaccgtaaaattactcggatctcatacatatagcagtactcttttactttcctccctgtttatccctaattaactttacactgttaggcctaattaattttctctacattcgtcccgactggattctcaagtagacgacatgcgtacgtagcatccaaatacacgactcgtgcgcccgtaagacaccaaactcccctcttaaaacgacgcgacaatcacaagccgccgcgcccctgcactgcaccaccctctcgccgccatgccgtcgcttgggatcgcgccgctgctcgacgcctacttccgccgccgcttcgccgcggcgggcctcgtccaggcgtccgttccgctggacggcggcgccacgacggtgcaatgctggcgcttcccgccgggggcgagcgaggagctccccgtgctcgtcctcctccacggcttcgggccaccggcgacgtggcagtggcggcggcaggtgggcccgctctcccgccggttccgcctcgtcgtgcctgacctccttttcttcggcggctccggcacagcggccgccgacgcgcgctcggaggcgcaccaggccgaggcggtggcgaagctcgtcgccgcggtcgtgggggctgcgg

SEQ ID NO: 12480 - DNA, 3482 bp, Oryza sativa
caagttcttgtgcttgccatgatgccatctgacatcgagatcaagtagttcttggatcatctggatgatccgtgatgtcacctcatggaagtgtgacgtaccactgtagtatcatacaacaactgattgatcactgaatcgtcgaaagagatatggtccctgaattcccaaccgccttcgtagctagctagcactagcagtcactcacctgtcaccaactcaccaaccaatcatccctggatggagatgtctccctcaatttcccaaccgtttcgccgttcttccaatcaattcagagtttcagaccgccgttcgatccagcctagcttttccagttagagacatcctactgtttttgtgtagttgacaagcacagaggcactcacactgtgtgaatgtaattgccatctttgccaggctaataatcttccaatcaaggtgagactgaatgaactctgcgttttcctatctgaatttcaacaaacaacaggcctacctgtcacctttccccaacctatccgagctggattctcaaattaactcgtcgtcctttttcacttttttaagataaaatgccttattcattaattgttcctgagagtcattatctttgctgacagcctcttgactttagtaccagtaacttgttctctaaaagaatataagaaatagtaacatttaacactgttgcagtatctctacaccgacaaaatagaagaaaagaaagagctgatcaaggggataacactgggggacaaagaaaaattccagctcactccacttcctcaggtatgcatagcatttagcagctgacaaataattacagaagtgctttacttgccaagtttacctttatcaaatgtctctgtctgtctaatctttcaggaagttcttgtattatggggagagcatgatcagatatttcccatacagaaggcatttgaagtagcaaggtcagtacttattccttctaatataattgcattattaatacatatgaagcaaaacttttgccctctttttgtttaaaaaaaaaacagtagaattacatgttgaagttgcaccttgtaatgttacttacacaagatgaattaacgcaaatgcaggcaacttggtgcaaatgctaggttggaaatcataaagaacaccggccatatgccacaggaggaggacccgaaacggttcaatgaggccctcctgaacttcttgttaccagctccaaattcgtcgttgtgatggggatatcaatgccaacttcttgagcggctatctgtggagagtacttgatctaagttgtacattgtcttatggcacagggtaaaacttgtaccttttgagataaaagtgggaaatatgatatagagtatatgcattgtttttcttctcatatacaaaattgggttgaatcctctgcacttgctagtttctacagtaaaataagggggggaaaatgaagttccctggatttaataaggggaaaaaaaccccctgtaagaatgaggggttacatacattaaaccaagcactggtaaaaaaattctattctgcgctaacttatgcgacgcctgatttgtcggacccagccaacctttacctcctgaagtaagaggagtttcgctttgatatcttgtgctaaggctccataagctgatctgttgagatccctcccctcaagcattctcactacatctggattgtctgtctgtccgactgtccctaggtaacactctgacttccttggcctgtttcaattgctctcttgcatgcaattagctcagcaaagcaagcatcctcagccgggatgatggaagaagttgtcctgcaccggatcggatcgacaagcgctcttggcgcgggtggtgatcgaatacgctctgctcgggtgcggcggcgtcaagagacgcgatgcttttgctgacatgatatgtaaacgatgcaaaatcgtattagtgtgatcattagggaatgaagacaaaagtgcaattaaaatgcttgtcagcatcacctctttctttctttctgactagctgctttttgtctgcaactcggcttgacgcattgctttgtcacgcattgagaatagttcccttctcctctgttctcatccaaagaatgatgaaaattacattatgttccccccaaaaatatggtgcagcttgttggaaagatttatgcatgaagctaagccttcatccacactatcttatgaggattgctaccgtccagcaggttgtaccgggcggtactggtaccgcgcggtaccaagacacatctaaccgttgaatccgggatgggtaggatcgggagagaaaagatgagcaagggtggatgagggagtacctgtttcgagtcgtcgttcccggcggcggcggcgtccaagtcattgtcattcccggcggcggcgcagagcaacaagggaacgctggcagcgcgggagaggataaagtctggcggcggcgcgagagagaaaaaagggaacggcggcggcgcgggagaggaaacaagtccggcggcggaagaggaacaagtccggcggcggaagaggaacacggcggtggtggcgaggaagaggaacacggcggcagcggcgaaaatcatccagcttcgctagggttcaagccgctcgatctcgatccagacccatctattgcacgcgaaattacaatactgcccttccaccgattatcatcactcggtaccgcttcggggacaaaactggtaccccgcggtaccgatctacgccagccgttcgatctgcctcgatccaacggtcaataatcggtaccgcaaggtaccgttggactgtaaaaatcctcctatcttataccacttgcattggagctaagcttcagcgagttcggtttaggattagactatggtactacaaagagtgactgagtgaagcaaaatccaaacagcaaaagtatttttcatatgtactagttacacagaggtaaaattaatgcatctcacagtttccttgaaaaatgcatcttgaagctaatgctaaagcattaaacactcagggttttaatgttcatgcatgatacagcttttctttttatcatatgcagttaatattaaacaagaacaacaaataataactaacaagaacagatagtgtcacacagtattgcaatgcacatttctggagttactttgtatttctctttttgaaactaaagagtcagtgcttatatatttgtataaaaaaaggattgcacaaataattttaggaagacagctagaaaaaaaacaaagagatatgtgcgaagaaagaattgttagctgccagttccaaatggctaatagagcaactgataactaattagactgaagaaaagagcagataacattgcctacagtgctcctacggtgcagtttctactttgctacgactgctgtgcaatggcttacgactagccaggagagatcatatcaaactagaacaactttcatcaattggaaatcgaaaagccaat

SEQ ID NO: 12481 - DNA, 2486 bp, Oryza sativa
actaattagactgaagaaaagagcagataacattgcctacagtgctcctacggtgcagtttctactttgctacgactgctgtgcaatggcttacgactagccaggagagatcatatcaaactagaacaactttcatcaattggaaatcgaaaagccaattcgctaattataaagcggcatatatcatgcgaacttatagataaatatatgattgcaggcttccaaattaaacaagatctgatactccttctagtggccatactgaatgaacaacaatacttgcgcagataattagggatagacattgagtaccttcttcacggcctcgcaggcattctcattatggcgaatatcgttaccccgagcaatcatagtgtggacgtgatcgagatacccctcccagtgtgattcatcagccagagtacccagtccgtccaactcttcttggctgtagtccgcgagttcgttaggggctaaaggggcaagtaaagagcttcgcgttccgcgctcggcgttgaacttgtaagggccttgacaaccttcttgaaattctcataccgatgagccttctcctcctcggttctgtatctccggccgtgctcgctcatccccagtcctcaaattttgccttcatggtcacctcatccaccacattgtcctcctcggcggcatcatcgacgaccgcctcctccttgtcggaacacttcttgtcatagagtggtttccccccatggttcatttgggagttgaggtaatccgtgtagtcaagataggcaaatgtgccatctttcctggtgaaccttgccatgacggatggctcgatcacgtccctccaattaacagtcacctcctcctcctccttcctggtctcctccccggctgctacaggtaggaaacaaattgaagctagcaacgacgaggaaccgaatctaatctaatctaatggcgctttctttcaagaacaaggcatagatagatacctgagtcatctctatcttgcttgaaatagaggaatccgagcagcaatccagccaacgaactcgtcaaggcaagaacacctttcactgcgccacggccgacgccgagatccctctgcgcggagatggacgggagcgtgagccgctgcgcgcgagtgaagaaaattttgatctgagatctgggggaaacgggagagcgtggtgctggactactccccgccgtcgccgccgccgccgatcgctgcgcctgcgcgctgcgtgcggagaacctccgggtgaggaggggagcaagggcccggaggaacatggacatggcctcgatcgatcgatggaatcgctcacctccgccgcgcgtcgccgcgatttctagggtttagtgtttgacggacttcgccgcggatgcgcacggtgtcgaacggaattccgacaaaatccgatcaaattttgtcacagtttaaaactcgatcagtttgaactttgaagaggtcgcatgggccttgcgcacgcgcaaaattgggggccgggccaagctctaggggttacaaccatccttatttgatgggccaatatgggcttctaccttttgtctgactgccaactaaatgatattgggccgagatgttctcctactagaggcagcccaacagatttatctcgaccgaacaaattcgatccgacggttgaacagatttatctcgtccgctgttacattgttttttttaatggaaaaacctgtcacattgttcagctcatttggatattacatggaaattttctggcagtgatgagtacaatcatgtaatcaactgcactaattgttcttgagagtcattatctttgattacagcttcttgactttagtatcagtaacttatttatcaaaaagaatgagtaacagtaacaggtaacactgtgttgcagtatctctacaccgacaaaatagaagagaagagctcatcatcaaggggacaacactgggggacaaagacaaattccatctcgctccatttccccaggtattccatagcgattagcagctgatgcatcctcccaagaggggtgtgcttaaggagcttacgtccttctaatggtctttgttgatctgtttctcctttcagccagttcttgtattgtgtgggagagcatgctgatatatttcgcgtgcatcaggcatttagagtatcgagctcggtacctattccttctaatataagtacagtgaagcatactctttccggtgttccatttagttcatgtctatgctccataatgtccttgatccgtcttcaccataaggttctatgctcacagtgagcatgaacagcgatattcgactgtcgattataatactgtggtagtgctggctcccctgcttttcgcgtttcacgcacagtatcacaggaactgtatcgttcatcatatgcgagcatcggctcacgcttctgtccatctccgagtatcatgtaacgtgatcgagcaggcagcaagcttgagtattctatagtgtca

SEQ ID NO: 12482 - DNA, 1065 bp, Oryza sativa
cccgatgtcgccggtcgcgactccacaccgtcgccggcctccatgacgccctcccgctgccgcacgacgctggcctccacgacaaccacacgccgccggcctccacgacgcctgcacagcaggcctcgccacccacgaggccgcacgaccgcctccacgacgcctcaaccaccacggccgttgcctcgccagccaaccgtcgcagtcgatgccgccacagccgtcgccaccgtcaccggctgccgtcggcagccgccgccgccgccagctagatctggctagagacgtcattgcctcctcccgcatcgccgacgtcaccaccggctctcgcggcacctccaccaccacacccgtcgtccggccacgcctccgtgctcggctaccggagctagctccagcagcgtctcccgccaggtcgtcaccgcccaaacccaccgccaaaactcgccgccgagctaccaggacgccgccgtccgtcgttgggggaccggatccgggcaccacagcaccggatctggacgccgccagtcggcgtcgacgccatgccctgagctcctaccgtgccgacgtcccgaccgtcttgaccgtgaacgcgggagagagagcccctccgccgccgtccttgcagccggcggccgcgaggctggggaacgttctcgcttgttaaagcagatttaataatatcgtcaacttgctgactataagacaaccacatcatctatagcctgttagtataggctgctcatatagcaatggtctttattactatcatatcatttgtagtaacagataatatatttttaagcatgaaccaatctccatcaggcttatttctttttctttattgtactgcgtgttgcagccggtgataattctttcgtcgactcgtgttctcgctctaccattccctgctccagcatatcagtgagactgacgtgatcacgctatcgccgatcttggttggcctattagacatgctcttacgctctccggtttatgttgtgacacgatgggggataaacgcgtgacgagacaactatgaggctgtcatatggatgtcatttt

SEQ ID NO: 12483 - DNA, 931 bp, Oryza sativa
tttctaaaaaaacgttctgattcgctcatatgccaaatctttggttctgtatatggcaagtgcctcaagtattaatgcttgatcttactgtgtctggatgctgtccttttttagggatttaatgaacggcttgtgatgggaagcaggccgacacttggcgttatgttcaagaaggtacattctgtcattctccattccacgtatatatatgctttttaattatcatatatgtgcataatttccatttttcgtatgtgatttttttttcgtattgttctcagacccttgatgtagttttgcaagtcctcatctcatttcctaatgtgaagcccctgcgatctaaggtaagtaactgttatcaacatcttttgcaatttactgcttggatgattaaccaatttgtaacttatgcaatgctgaaatacagatcatatcatttctccaccgtatggttgagatattaggcatttcggtgcttccatgtattccaattgcactgcgacagttgctcgttgataatgaggtatttcatgtccctgtttcctggttattggttttgcaagctattgcgatctctaatagtaactgtagcacctgtgttccctttttcggtaactgtcctgttttagctgtatttctctgaggaataataacggcaggactttggaaactatcgtactttgtaatgtttcttttatatacttatacaacaaaaaggtgcctctgttgttaatcataccatcaaaattatttcagccattggatcatagtattaaccattaaattagatcgatgttctgttctacaaggaccgctttagggccatacagtggattggcccagttagactccacatctcacttttccccctctttggcccatccctttgagcggacaatgtccactttatggactctaataataatttagt

SEQ ID NO: 12484 - DNA, 1029 bp, Oryza sativa
actatagggcgaattcgagctcggtaccctgtttttctagtacctgttgaactgcatattactatttgatgcaacatcaaattagtaccttattatttctctaaaaacaatattgtcgtacatataattctattttgcggcccttgctgacatcatctttttacaggcaaaagatatgtcggaatttctgtacttaataaaccaaataatatgcaagtttaaatcttcagcaaatgccttattggaggatgtgtttcctgccatcgcaagtcatttatctgtgatactatcacacgatgccttttcaaatggttttgcaagcaatactgaggtaaattgaattggtaaataagacccactatattactgcattaatttgtgtgttaaccaattagtttaatgttgttttctctaagcattttgttttgttgttagtcactaaatatcatggctgttaaggcgtcgctatggcatcgctatagtgctagggcaccctgagggggtcaaggcatccctccgccttagggcttaatgcagagagggagagggagaggtgaaggcggcagcaactacacccttttcccttttctctgctccatgtcatcaccattttgctcccccttagctctggtttccactctcttctctcccctgcgccagattcatcttgactcaagggagcagccgccagatccatccaagggaaggagcacatacagagagaagcacttgattcattctgaatcagggggaagggagcacagatagaggaatagagctagcatgattaagaagagccggtgcgaggaagaagcgatagagccgtgaggaagaaacgacatcgggggcggcgctgtgagaggagagacacacctggtgcgggtgttagggttatttctttgtctttgggctggtatgaaggatattgggcttttgtgggctggcctgctaggctggttttcttctgatcgctgctaaccacataggttatggcatcgccatgccttagcgttttactgctatagctta

SEQ ID NO: 12485 - DNA, 697 bp, Oryza sativa
tcccctacaattaagaatgaaatgttagtacaaaacactcatccggtcgcaaataagcacgtatgataataacaacttatttacttacagtgaactagagcaaccaagccttgctaggcccgactgtagagtacggaggaagggtgttggtcggtcctaggtgtggagggcgcatcacctgctcgaagcgcgcagtgatatcctccttccacccaaaaacaccgtccacgggaccaactggtgctcccgccagcggtagcccgagcaggtacgacacgtcctgcagtgtcggagccatctccccacagggaaggtggaacgtgtgcgtctcaggtctccagcggtctacaagagcggcaaggagtgaccggtctgcatcccaccgcttcgctgggtcagggtcgtcgccgccgcctcaacaagcctacaaagtggtagaaggcctgccgcacgcaacctgtatagagcaaacttcaaacataagtacaacacaaagcaaagttgagttgaaatgtgaacatacgcgtaccaaggaacgtgacgggggtcgacacgcaaccactcgcgcgacgtgcgtggacggaaggtgccgagctgtgcaccctcgactgctgacaggaacgagcggtggttcctgtcaatcccacggttcaacagcgccggtgtgtcgtacgccatacctgcatcaaataggttg

SEQ ID NO: 12486 - DNA, 631 bp, Oryza sativa
catctcacttaccacaaaagctgaagtgatgtttcggtgatacttctccaccccttgtaagtagcacttgtgctcggtcacaatgctaactttccaataatcattccatttacccttatatgcatggacacgccacggacaatcttccttcatgcacctcacttcatacacataatttgttgacttgaccaccctaaactctctctgcaaggaaactgcccaatgcttcaccgcctccttcatctcatccttatgagcataccttgcaccctcaattacctcgttctccttatactcccagggtacatgatcaccctctgatataacaagtccaaaaaagtcctcatttgcccaatcagtggccattacattaccttcctcatcggatgatgcgtcgtcgtccacttcctcattatccgaatcttccctctccatttcatcaacaattataccgactctctccccttaatccgccatgcccatagcctgctcctcccttggttgattttcctcattttgcatcgatggtccaacaacatcccctgcattgataggaccctctacatattcggtttgcattgaaacatatatatctttctcttgtaccgacacaaatataacgaggggccat

SEQ ID NO: 12487 - DNA, 4633 bp, Oryza sativa
ttggggacaatgtcaaattggcgtacttcatccaagaaaagaaaggcttcactaatcagcccttctttcatgaagccgtcaactagaatagtgcatgtaatgatattggggtttatcttgttgtcaagcattagttcaaataaccccaatgcttctttaaggtatctatgtctacaaaatgcatatataagactagtgtaattgtaaacatctggaacaaaattatggttaaccatgtcaatccaaagaccataggcaacctctatatccatatgtcggcaacaaccatgaagaacaatgctgtaagtaatttggtcatgcttgaaaccttgatatttgagacgttcgaaaagttcaagggcctcctcaacttttccagctttgcaaagaccatgcagaagtgaactgtaaatgacaagagtaggactgactctgtttctttccatttcatcaagcaaattagagcctaatgatagagcaccttgtttgcaaagcgcatcaactaatatgctgtagctatggacatctgggacaaccccacctttcttcatctcatcaaatacctccatggctttgtgaacctgattatcgttacagaaaccatgaatcactgcattaaaacaatagctgttgcaagggtagcctctctgccgaagcacttgaagaaagtcccatgcagattcgacttgtttggcacggcaaagtccataaaggtaggttccgtaggttgccgcagtcggcttcacgcctctgattttcatttcacaaagaagatcaaaagcttcctccaaacatggtttatcaccatgtgtatacatactcatcaaaactgaataagagtagacatttggtgagggaccagtgctcttcatatcatcaaacaaactcctcgcatacatgaactgattcctcttgactaaggacttcagcaagaagttgcaaagctgaagctcaactccaatcttcttggcctcgatgtaggtgacaagagcatcctcaaacattgacaactctataaaaacccgtatgagcgcagcataaacttgaagcaatgttatcgatccacccaaattgttcaccagcataagtgccaactcaaacaactccggaccagcatttccacagtaattgacaatgctctgaatcaagcaccggacctctatgactctccgaggcaagaatgactgtataagcaatgcaaacaacccaattgactgggaaaggccatataacctctcacactccctgaagcttatctttcttgcgccgtcccagtttgaagtccgcactgctagtgtgatcaagggaagaaggcactgacgtctataatcaccagaaatggtactctgagtgggctcttgatgatccaggttgttcaagcaacaagccagtgaagtaaatcgcgacgcctgtgggtggtttctggttatgagggctcgacgcaggaaccctggcactgccctgtgcatagacaagggacgcccaatcccctccttacattgacaggatatgagcaggaagaagatcctacacagaaattacacttcatggaccaggcctccgagaaagaattcgcccaggtttacaaatttgaatcaaatctcctgcaaagagaacaaaaacacaaaatcatatcgctataacaataccagtcaagctctcacttgaagcaaagaaataatttaaaaaaagaaataataaaatttgtgtgttccagagaatcccctggtcagtgagctcccgcgaacgagagcccggtcatcgctcaccgacgaagcagccgtccactctccgagtctccgggcgcgagctggatgagaggggcagggggtgggcgggcacagcggcgaggccatggggagcttaccgggagggacgacactgaggtgagctggaggaggagcacgccgaggaagtggcggaccgcagtccgtcccacgggagcagcgctagggtgaggcggcggcggaagggctcgccggcggtgggcggagggatccacggcggcggcggcggcggggaggcggggaagagcgagaggcgatggccgtgcagctcctggggtttaaggatgtggttgggccgtatctgctttccatgggtgggccggattgcgcggctcagaagatcggatgggctcctcttcgggtgtactgagttagtgggcctcaaatatgggcttcggtttacggaacatccagcccataccgtcgtgcggcccgtccgaccgtaccaaagctcatcagttcaagtagggtaggctgagtgggaaaagctaacgcgcgtgcccgttggcggttgagcgttccggatagtttagcctaactaactaagttattagtagataatgacgataattaagatacgatttcctttttcccggaagattttttctactacctgactgaaaactttcaagttagatttgaaaatttttgaagccaaattttaaaaactttcaaaactcaatttgaaaatttttaactcgaaatttaaatgtgtaagacaaattttgaaaactttcaactcagatttaaaaactttcaactcatatttgaaaactttcaactcgagatttgaaaactttcaagtacagatttgaaaatttttaagttaagatttgaaaaaatatgaaagctttcgactcagatttaaaaactttcaacttgatatttgaaaactttcgactccgattcaaaaactttcgatccagattcgaaaactttcaactcgagatttgaatactttcaaatcagatttaaaaattttcaagttaagatttaaaaactttcaaatcaaaacatttaaaaaaataagtgtgctaaagattaaaaaaagtaatcagaaaaaacgggaaaaaaagcgaaaaaaaatcgcaaaagaaaaaggaaaaataaatcacgaaaaaagaacaaataggctaatgggccttgggctgggagtagctggcgcgcgcgcgagactagcaacccccaggttgagtctcacttttccaacccacctatcttttttttcacgccaaactgctgaatggtgtgttttttataaaaagtttctacacaaaaattgttttaaaaaaatcatattaatctattttttcgaaaaaaagataatacttaaataagtatcacatatataaaatacagtatgagtattacacattggtagtttggtaaaggtagtacaaaatttaaaattatgttgtcattttaatatattttaataataaattgagaaaaaaaacatatatatactattatacgagagaaaatataataatactagctgcgcaatctgcacgggccaccatgctagttaattaattaatcaattaactagtcttgatttttgatcttgcaggcattcacgtcccattgacgggattggagtttgggacgttgcagtctacagataaaaatgctaaaagcgatgttgcaaaacaaaaaagaaaagacagagaaacgatgaatgagatgtttaatcgtgcgctaatgagttacttcggtttacttgcgtgagatgttagatcctactccctttctaggttaggtttttttggatttgggacggagggaatacatcctagccaagtttgtcaggccattttagattaatgccaaaacatactctaccaatatttaaatagttttctagatatattttggtatttggaatagtgcatacggtggtttatatcattggcattaccaatgtccaatttaaaatttctagattccactcaaagctttgctctaagttgacattaaaaaggcaactctacctcagaaaaaaaaattggtggtaccaaaatttatctaagttttggcactagcagggtatacaaactagctcgtcatttgtcaacattgacaatctttcaaataaaatcttagtgccctataaaaaataatcttagggagaagaaaatggagaatttaaaacatttagtatatacgcctaactgcaagtccaaatatactttctctagtcaacattactcgtcgtttccgagaagcaatttgcactgagtgtagtttaattgagttgtctgaaacgacgtatatttctgtccagagggagtatatatttatggcaaaatttgctacgggactcttaaaaaacgtgtaattagctgtgggacaccgtaaaaacgtgaattggctatagaacaccgcaaaaaagtgataattagctactagacaccggaggtattattttattatttcctataaaaacggagagagagagtgttgaaagtaccaaaatacccctgtgtcgttttgcttgttctggagtcccactgatgccgctgccccatgccagcgagctgccacgccatgaccggactaaacaaggagagaaagagataagaaatagaagaagaagacaagagaaaaaaaaaaggaagagcaacctgtagccatcgcgtggccgccggcgaacagcacgccgtgccgtgccacgccaccacggcatacggctgccgccgggcagcccacaccgagaccgcggcgctcacacgcgcgccttggcacgcactaccgtcgctcacgccgtgcctctgccctcgtcgtcgcacggtcatgccggcgccgtccgaccattcctcattgctccaccgccgcacatggca

SEQ ID NO: 12488 - DNA, 530 bp, Oryza sativa
ctcggtatggcataatgacaaccaatttggcagaggtgtacaactgggtaatgctaggagttcgggtacttccattggttgctattgttgaattcatccttcacggcacgcaagcgtactttagggatcgatacaagaaaattagtccgtccatggacgataacaacatagtgtttggcaacgtattgacaaagtacatggaatataaaatcaaaaaggcacggagacatcgagtggttgctaaggcacacaagtgcatcggtatgaaataatgtgtgctgataacgagcaggcgtggtatctatcgcaggcgagccgtgcaggaatgtgtcttgaaggcggatggtggatgtacctgcagttgtatgaagccgaagcttcatcaccttccttgctcacacgttcttgctgctgacggtgattgtggcatatcttcaaatgtgtacgtctcaaattatttcaagaaagaagcaatctttcatacatggagtgaggagatatatgggttcgggatctgaggatcttacaca

SEQ ID NO: 12489 - DNA, 598 bp, Oryza sativa
cctattaaaagagatagaggaaatacctgcaaaatggtatccaagtaaggcactagcttagccttcaacagcctgatagctctcatgagcaagtatcctgcatggcagctcacgtgggcattctgatggtgtatgccacgctcatccaagaacacagtaagcagatgtggcacatattggtcattctcctgcatgaacttgatatagcggctaattgtgtctaggtacactaatgcaactaggcggtgtgtgtggcatgagaatctcgctgaaaggagcattgggacaagctccctaattaacccagctccagtccggatctcttcctcacccactatttccccaagccggtaaaacagagtaagcgcgacctcaacatcctcaacactaacttctgcagatgaaagggccgtcacaagcaaccctcttatgaacagctgagtggcacctggtgccacacgacaaatgctccgaaatagtgcaattaaatccttccgctgctctgccatcaggtcttcctcctccttccctatcttgtcaaggacatcaagatgacccctataaactggatcatatgacatctgcatccgcaccacct

SEQ ID NO: 12490 - DNA, 976 bp, Oryza sativa
atgggtgcccatcacgcgtgtgaaatgtgggtgtcgtccccttcgggcccgtccttggccagcccaaagtccaacagtttccctttgtaatcttgaagggagggacaaaattcacaggcccaaaaaccataagcccatttgatgcgattcttttacttgggcttattactaatgaatgggctttaaagtgggggaaattcaagttgggcctgattttggcccatcttgagtagtaacccattaaaggcccaaacttaacatttgctttttctttcaaaaaaaagaacattgacacggtcatggaaaaaaatgtaaagatttgattatattttttagataataaagatttgattatatgacccgataaaattattttcagtgacgcttttcagtggtgaaactaaaatttgggcctccttttagcccaatcttgagcagaactcacttacggcccaacctatgaaccatagcccacatcactaagctttcctttccttttctttggtagagaagtacaatatgataataaccattaactagtactagttaagtatgaagtgatgcataacactataacagcataagtacagtatgatactaagtttctctgacataatcatgtcataaaatgcttcaaaatccaaactgtgccaagtacaatttcctagtcattactctaccttttcactgatgatgatgaaaaggtcattaggatgatactatatatatagtatatcatatgtgatgtgtgcatcaaaaactcctagctaactgagatgcatgcatatgagaggtgtcaatctacctaggaaaagctacagggcactcaccgaatcgagcaggatgttggaggccttgaagtcacggtagatgaccggcttctctgcgtcgtggaggaacgccaaacccttcgcggcgccaaccgcgatgtttaatcgggtcgaccacggcagcactgcaggaatctctgcagaaa

SEQ ID NO: 12491 - DNA, 2212 bp, Oryza sativa
ggcagcactgcaggaatctctgcagaaaaagaagaaaagaaaagaaaatatcttcagaaatctcagcaggatcaacgtcagctaaagccgcgcatgtcatcattataattaattaatcgatagctgatagccatgttatgtatacacatcaatcgaataagaaagctggaaaaggaaaaacaaagcagtttatgcgtattgttgcagcagaggagaaaaaaaagacgatgaacagtactggctagccggccatgcgtgttgtcgcctttgtggaattttggtttcttgttctttctgccttctgaattttcaagaaatgttattattgtaatttggagggattcgatatccagtcaacgagttaggagatttcgtcatgaccaagaacaaatcaatcagcttgagccagtgaggcagctgggaagattgcagcacactagattactatgtcaacctgaaattgatccaacaactacaggtgacctcactttcatctgacgtctgtaatctagcattagaaaacgtctagtagcataatctatagcttgtctcgcaagggtgagtgaatgtataattgacccttacctaatgaaatactattttccatgggttttgcaagctcataagtgagcagagaaggccagtcaaattcagtttggtcagaactctgaactctaataagctaaagaagttggctagccaaacgaaggaaaacatatccatcatccaagctgaaagcctcaaagacgcaaccaagttttttgagtagcaaagctacccatttgaagtagacttctgaataatggctttgcttctctctcattttgtgatatctataatccattattaagttggaatataacctcattttctcaatgaccatcagaccatggcaccatgccgtgccaggtcattgcgtttgtgtgagaatggtcaagccaacttctgttttaaatctccacttcacgaccgtaccaaaccactcattaaccatcagttaattaggtagtcctactcgaactaaagcttcaatttgacacacacccatgacatggtaaagagacatctcgtcagataaaaaattagcacaatggcaagttggcaactagtgctatagatcaatggaacagtagtacaaacttaagctgaaaatcaattagcgaaggatcagttcagtgcttacgtttgaagaggtggttctcgaggctgccatgctccatgtactcgtagacgaggaggcggttctcgtcctcgcagcagtagccgaccagcttcaccaggttgggatgccgaagctggccaaggaagatcacctctgcctgcaagcaacgacgtcagaatcatcagaaatcaggtagtagtagtagtagcagcgaatcagcagcatgatcacgtccatttcagtggcactgttgcattgggcagcatgattagatcactggaaacttatccgaccgtcgccggaaccgtcacatcgtccaactacccctcccttgttctttgcctcgcacgtcctaatcgtgctgcttaagatatttttaaacctgtttgattatgttctagatgatcgtgtgagtagtagtagtattagttgatctgaaattaaacaatctgtaattaattgtttaggccaagcgtttcagaaaccgggtttccgaagctactggcccctgacagttactgaattttaccagataaaatttcagattcaatttttttaatgaataattggtagttaactagtcataagtcgtaaaagttcaaaattttcaaatataaaatttgaataatacagtcttttaggtggtaacctctagtcgaccgataaccaaactaattaccgctgatcagtctctgtttgatgggaaactaaatagcattaggaaagaaacgattgggtaatttgactgaacattccctgttgctacaggagaaacgacacaactttgcttctatgcaataaataaaaggaaaatcgacactttcccaaagaaaaacaataatattaatttaaaaaacaaaatcaacgatatctcatatctctcaccctcaaaaagaaaaaaaaaatactgttcctcacctgcaaatttcagttatctagagggttactcaatgccctaggatattcatatactgggatacatatatttgagtgatccttgcaaggcaactactactctaccaattaagctatatttgatggccactcttt

SEQ ID NO: 12492 - DNA, 1747 bp, Oryza sativa
cgaattcgagctcggtacccctctgacgctgatgattactcggtccgacgctcccttgaggcgtacctgtggtggtcgttcgggtgggtgatgttcactagcacccacgggcacgctgtggacttccggctggtccactacgcacggtccatcgcggatgctcagccacaggacgtgccgcagtggagctggggttctgccgtgctagcagccacgtaccgtgccctctgtgaggcgtgcacgaagactgacgcgggagcgatcatcgctggctgccctatgttgcttcagctttgggcagccgagaggtttgccataggtcgaccagtggtggacagcgcaccctacggggttggtcgcagcgcgcagtggccagaggacggtcccacgatggggacttactggtgtcgacgtggggttagtgcaacttcgctgcgttataagtttatcagtcgtctttttttttcttcacataacatgtctaattccgatcatgtttattgcagcgtcgttacgctcacatccaggtgagacgtggttacccggacttcgtgttcgagtttgaccgtctccagccgagcgacgtcatctgggagccgtacacagaagaggccgtcgctgcgagagcaccgctaggactttcgtccttgtgcacacgcgaccaggcttactggctcaccatcctgccgatggtgttcgacattttcgttgagcctcactgcccgcagcgtgtgatgagacagttcggacttaggcaggtgtttccgggcaacgtgcagccgaccgtcctccctgccgaccactcgtgagttcggattgttcatttctaaatttttatgataattacttcatcgagccatataatttacctctcttcacaggttgactcgacggggacagctagcaggcgcactttgggctccacgtgtacagcagtacgttgacgactgggtgttagctacagaggaggtgatcaacgagctcttcccacacacggaggagaactactgtgactaccttcgctggtaccttcctcgcactcgtgcgcgtgtgaccttcactccagacgccccagagccgcacgttgccgctgtcacggacgcgtatcccacgcaccgtgaccgagactacttcgtggcggtacgtccaatttgtattacttcttacaattatttcatttatcttgcataatataggacaactactgaatttgttatttccatcttgcataggctgatgccgcacgggatatcagtgccgatatcaccgcagtccaagtgaggttgaacagaggtttgcacttgactgacgttgagcagagggtgaccttcgaccggatgcaggagaagatgcgtgcggtcatgcgcgtcttctcctgtcgcagcgccgtggacgtcgtacctccagctggtccggtacaaccacggcctcgcgcgcctaccgtcggagcaggacctcgacctacggcacctatttcgcacggtactgctcagcccagaggtttcttaagttttgtttctgtttttgtacgaaaacatcaccccgtcgtaacttgatgttccatcctcgcaggacctcgtttgccttcgagcgcccctagcttcggagcagtgcgacctacagcaccggtttcgcacggtacagttcagcccagatattagttcatttttgtttcagcttttgcacgattatgtcaccatgttttaactgcacgtttcctcatcgcaggacctcgtctgccttcgag

SEQ ID NO: 12493 - DNA, 632 bp, Oryza sativa
caatgtgtggcttggtgttgaaccatcacatttcatatgaacatgttactgtaactaaaaaattcaataacattttttccattacagatcaatgcttacctagtttactcactaatctgaatgccattttatacatttctagtcagcattggataagttcaatttcatggtttgctaagaatagtaacacacaccccttttgttgtgccagatgatagagaaggtttgctcttcattctttcctcaagaaagttcataacttccttctctttcggaccagcacttgtggcctgcaatgacataggagattcatgtttctcagatacagaaaatgcttgagcttatggggtggtttctccatctagattgttcagtggctctgtgacctaatcagtttctagttgcacatgataactgaaaaaaaatacagcatgctatttgcatttggggtagtcattcacaaaaaaacacgactaacttgtgttatgatgaaaagagctatttaatgaactgcaaaaaattcctagaataccttgtgtgcaaagaattgtccagttggatcacatgtgaagagctcgggggttccttttttttcatcaattccaaagatcatagaactccaaagaaaatgg

SEQ ID NO: 12494 - DNA, 3436 bp, Oryza sativa
ttgggctaacgataacaggtgtgtgcccactcgtcacgtgtatgccatgcctgacacctccagcttatctacagggcgagtcgagtcgacgccgatagcgtgatcgatcgatcgagctcgtcgtcggctacacattggtgggtcgatcggcggcatggcgcagcagctgggcctcctcgccgccgtcttcgtgtcgctcgccgtgcacgtcgcgctccactgccccatccagccgctcgccccgccgcccgcacgcccacccgccgccgctcgcttccctcccaacaacctcctccaggtacggtacgttgcgttctagctcgccgcgccatgccgcgctcatgtcggccgttggtggattcatggtttgcgatgtggcagaatctggagaagcttggggaagggatgctgagcgcgccggaggacgtgtacgtggacgacgccggcggcgaggtgttcacggcgacgagggacgggtgggtgcggaggatgcaggcgaacgggtcgtgggagcggtgggggctcgtcggcggcacggggctcctcggcgtcgccccgtccgccgacggcgccatgctcgtctgcgacgccgacaaggtaaatcaaaacaagaaacatttctacgatgatacgcttcactgcttcagatgaagataaccgaatgagagacagtgcaaaagttgtttactgttggtgtaaaatactccctcgttccctaaataagaaagtatttttaaacatgtttgaccattcgttttattcaaaaacttttataaaatatataaaactatatgtatacataaaaatatatttaataataaattaaatgatagaaaaagaattaataattacttaatttttttaataagataaacggttaaatatgtttaaaaaatgtcaacggcgtcaacatttagggacggagggagtactaattaaaatctgcagggattgttgaaagtggatgagaatggacgcgtgacgcttcttgcttcgactgtcgaaggctccacgatcaggttatcttcctgcaaattacttgtttcactgcaaactactatgcaatttgcacagtgcaaatctgtaactgcgactgcgaattctctactgttcttctccgttcgtcgtcttcaggttcgcggacgcggcgatcgaggcctccgatggcacggtgtacttcagcgacgccagcaccaggttcagcttcgacaactggttcctcgacttcttcgagtaccgcttcaccggccgcctgctcaagtacgacccccgcaccggcgaggcctccgtcgtgctcgacggcctcggcttcgccaacggcgtcgccctgccgcccgacgaggccttcgtcgtcgtctgcgagacgatgaggtagtaacaagctcaacttctcatctgtgaaatgacacgtgcagtgacctgagtaacattttaaggttacgagtgcaaatcttcttaggaacgaatttcagattggattgtttgtggggctaagttcctaatttaaatggctgcatatatctgattggatgtagaatctggatagaaaatacccttatctaaaataataataaaaaacgagtaattttacggttcataaggatgtaccatgaggtaaaaaaaattagtataaaatttggtatcttatagtatctagatataaagagatatcaaattaaaatagaaaaaaaatagtatctcatgtatctccttaagaacggtaaaattgctcataaaaaaaagagtctgttcactctatcgtcaagtgaccatgaagtgatattgtcaagtgcaggttcagatgcttgagagtgtggctgaaaggggagaaggctggggaggcagagatcttcgtggacaacctgccggggaatccagacaacattcggctgggttcagatggtcacttctggattgcccttctccaggtctctgctctctaacctttctgctgccataagcatctacacaacattttcagtgctcaaacttacaattttctgtgctcaaactgcaggtgaggtctccatggctggacctgatctctcgctggagcttgacgaggagggtcatcgcgtcgttcccggcgctcgtcgagaggaccaaggcgacgctcaagggagcagtggtggctcaggtgtcgttgaacggcgagatcgtgagggttcttggtgactctgaagggaatgtgatcaacatggtcacttcggtgacagagttcaacggagatctcttcctcggcagccttgcgaccaacttcataggaaaattatccctggctaaggttacacgggagcaggaggatgcagttccttcgtagacagttacagtttgaagtgttgatgtgtgatcatcagttggtatcgtaaatccgggggcaactcataattgacacttgacacagcttgagcgcagtcatacatatagctatagcgtacagtaatcagttagcggtaatggttttgcataacttccatgctgtaaaagatttgaaagactggtgatcgtcctatatcgagcactttgttctgctctcgtccttcacctccgcgtgcgcttgaatttcactgggtgcagagttacagttggatcccctttcttgataaatccaagctgacaagaaagtttgacttgcgtcgttcagtataatggcagtgcaaatatttcttaacgttttatttagagaagttttacattctttaagaattccaaaatttttagtacattttttttaccttacactgggatgtactaaattttacactagaaaatatggtatctttcggtatctcctcaagaaccgtaaaatcactcttttatttaacaatagtgagtgcaaacagaacatatctacaatagggctaagaatgagcactacctcaaattctcgggcatagaaatccccctccaggacatgtttcaacgcagattttgccaactggaaacaaaatcagtaaaaattaatcacaaaggggatcaaaatattggatcaccgtattgccaactggaaacaaagtcagtaaaaattaatcacaaaggggatcaaaatattggatcaccgtattggatagggcttgtgactacaaaagtgctaatgtacaaataaatacgcaacagcatgagggaaaaaagaacttgcaggcatgcattattgacagtagtctgtcgaagatgctgcacagatagacatcccaaaacgcactctgttgttaaagaaacagctaaaacttcatgtggtaagcatccaaagagaactaacagagtggtgcccttaataatgatgttctcaaattcagcttcagagaaaagggaacttttgttgtgttaaatactagttactagtatttaagcatgtatgagatttggatatcttgtactgtctgcaatgtgtggcttggtgttgaaccatcacatttcatatgaacatgctactgta

SEQ ID NO: 12495 - DNA, 1638 bp, Oryza sativa
atcatttatgccctccttgagaagtaatgaaagcaccaagacatagctcattgcatcccattggccaactgaattttcaattgtcatattaacattccatcagcaaagggaacagattagtttgacgctcccttacatagtagtggggcatatagaaatatttgcagattgtatttcaaatttaagagaaagtagagtgtattctcgcttctagggaccaacatgaaactgtggggcttgggaatgtcaaaagaggttgtgaccaataagattcaaatgtcgcaacccagtctgcttgagaacaattaaaaggcatttatggcaatagaattcaaacactacctagtggcactttaaacatcatgagaataatatatgaaaggttggttacagaaaacatatacattgtcaaagtacaaagaaatttatcgctcaagttaaatattctaagaatttttaagaaatcagtgtgcccaacaagctacataatcacctgaatagtttatatagagtggagatttagattgccatttgatccaagtaaatctgatgtttaggaagtgataagagatcacatattagactacaaactgcagtttcacctccaatcggacacctataggctggaggtcacaatcaaatgcctataaaccctatcaggacggacattaataaaattaccaagaatttaatgaagcaatagacaaacagtataataactacttgatggtatacatttaacacagtaaaacaggtacgagaaatttagatagatatagattgtatggttgacaggtcctaccgaaattccatcacggaagttaaatgacttgtcaaggacactctgcaaacagcaaccagtagcgaacttctcaatcataaacactcggaagccaggaagctgaggaaaacaagaaatacatgacattatgagtaatgcaactgcccaagtactagatagactcttcaaaacatgacataagaagaactgaacacaacaataccttatcttcaatttcagagctactacaccagtctttgataaggttgacaaaagtctgtacgcatgtctacaaaacaataaccgagtataaaatagacaattctatttaaagtggagatggagaatgtaactcgcttaaagtggaaataagaaattcaagatcaattaaaccccaccttccgatgtgatatctctttatggctgcatgaagtaatcaaaagcaactgcattatgttctctagataatgcctacaactaggagttaggagaactgtagacagatcatgtgttgctatatgaagcaagaatgcgtaaaatctcttttccagctcttgcagctcacgcatttcctgcaatgaacaaaattggcatgaatacagtatacaaggaactacgcaatccatgaaatacctgtaaaagcctggctacatagattagccaaattggcatgaacaaagtagacaaaaggtagcaattcagatggggcctactagctgatgaagaaccaagccagctacaaacaatagtgtgtgactaactatgcaataagccaagaacattatcatatcaagatgattgccatatatgtagcatggttgttaaggcggtaaggctatagcagtaaaacgctaagg

SEQ ID NO: 12496 - DNA, 1430 bp, Oryza sativa
aatcataattggcagcacaaaatagcattgatatatctgaagcatctgacatgaactggcatcgcttagtgcaaaaattctcataacgtacgtcttaacatgcaagaagtacagtagaaaacaaactaatcaagtcttcttaacgcaaatagcttgagacaagaaacgactactacttcagattaatagatctcaaaaaccaagaagcagaacaaaaggcagggccaggaccaaaccctaggcggtgagcacgacggcgccgccggcggccttgatcttcttctcggcgaccttggagatgagcttggccttgacgacgatgggcttctccggcagcagacccttcccgagcaccttgaagtagccgaactgcgtcacgtccagcaggggcgccttgccggcgccggcggcctccgccgcctgctcggcgggcaccatcgaccagagccgctccacgttcaccgccggggagtagaacttgttgcggagcctgtggaagtagcgcatgccgaccttgccgaagtagcccgggtggtacttgtcgaagaggatgcggtggtggtgcatgcctccggcgttgccccggcctcccgggtgcttccggtgcttcccgatgcggccgtggccggcggacacgtggccgcgcttcttgcggttcttcctcaggctcgtcgtcatcgccgccgccgccggcttaccttggggacgtgttcgggaatgggagggatggaggcggcgaggcggagttggtggattggataggaggaaaccttaggaggcgaggaatggtgagcttgatgggctattgggctggcccttgctttttttaggcttgtttctctcttggtttgttatgctgggatgttgggctgtggtttggggttttatcgccattttggtccaagaaggaaggagattttttttggaagctaaaaagaaattagatttttgtttcttgatgtgttgtcctggtgtttttgttgtggaatctccatgtagatgaactatgcaaatgcatcacaaggggatttgctattttaagagtcccatgtcacaccggacacacggttggagccctaaaggaatcacgtgacatagatgaaataggagaaagttgtctttcaaaccactatagtaagccagacaagtgtcgataaatatttttttcttgttaaaaaacatcattggttttatgtttaacattttggcagtaagattgccacatcccaatggatagaaagttagataagagacaacaaagaaaggggaaaataagagaagagaagcgtcttttgaaccattgtaagaactcggaagtggaatgtgttaatcacttgacatggttcttttctcgtcgagtaatatcactactattagtttatcttttcaacacatgtgtttgatgagaccaatcagataatatggtaata

SEQ ID NO: 12497 - DNA, 1482 bp, Oryza sativa
gtaatacttaaacatgttttggtcgaattttctatatgatgagaaaaatctaatacgaagtatgaaacacactggagtgtatggccatgcttgcttccatccatccatttccacgatacaaaaatgaacaagaaaaagatggacacaattaattagcacgctagtctttgcatgtcgcaatacaaggtaggtaaaggccgggggaagcacatcgcaccatcaccacatataaaaatcgtcacatcaacctcatccaaatttcgcatcatcacaaaaacaaatcaaatcccctccaaatttataacccattaatcaaaattaaaaatatcccccaatggtcaacacacacacaaaaacacacacgagatgatcaaaggccattccatcccgccctgacaggtgggccccacctgcagcctctcgccttcgcctatatatccactcgtgacacacacagccccctctcgcttgccacgcacaccaccaaatcgccaaccaaaaagcaaacccccgcgtcttctccgatcagctccgctcgctcgccgccgacgagctcgccccgccgccgacggcgacggcgcatgctagctgcgtatagcccgcggcggagatgaggtcatccagcgattgcaaggttgtggcggcggcggcgaggaagaaggagaaggagcggcggcgtggccgtggtcgctgtgggggttcctcctgaccggctgcctcggcggcggcggcggcggagggaagaagaagagcggggggaagaaggtgcgtccccgcggcggcggcggcggcggcctgcggcggctgtcgttcacggacctgacgggggcggcggaccaggacctgtcggtgtcgctggtggggtccaacctccacgtcttcaccgtcgccgagctccgcgacgccacccgcgggttcgtctccggcaacttcctcggcgagggcggcttcgggccggtctacaagggcctcgtcggcgacggcgtcaagccggcctccgcccgcaggccatcgccgtcaagctctgggatcccgagggcgcccagggccacaaggaatggctggtacttcacccctccacgtgtcccttttccacttaatcatcaaaaaaatagaataaaaaagtgatatgatttcatttgattaattagacatgcacgcgttaatcactttagttagttaatcatttaatgcgataattaaatcagattgatcgattatgtttgtataagattaacaattaagcttggagtaattaatctgagatagtgtaggccagcttccttggaagagtccctaaatctaatgcttgggggaaacaacattttctcacatggtttcttatagtaaaagagtggccatcaaatatagcttaattggtagagtagtagttgccttgcaaggatcactcaatatatgtatcccagtatatgaatatcctagggcattgagtaaccctctagataactgaaatttgcaggt

SEQ ID NO: 12498 - DNA, 1989 bp, Oryza sativa
tattagtcatgttagttaattaagtaattaattaattgagtagttagcgattaagcagagggacatagtagttgctaggaaaatactgggtttgaaactttgacgcacgcatgcagcgggattggcctggcaaactatgtcctgcagtctgcaactggagtagtagttttcttacatgcaaatgtcaccattgacttgcagcaggagtattactggccaggtgcatctatctgcttacctatctctacagaaccgtaccatattataatgttttgttctctctatctcttgactattgtctagcttaattcactaacatctatataaatttaaatacatatatagatagcatatatacttgagataaagtctattttccttcatcgaactagttcactagatcatacaacccctaaactattttttccctcattatataacctatacaaacggtacacgttactctataatggtatttcttttttttctctccacattgtcatggttatggattgcacatacctaatagtagttgactaaatctcggaaggacccaccacatatcatgtcctatacggaaacaacctgcggatatggagggagttccggataaggaaagacaaccagagttctacatggaaacgacaaggactactcagattgtatccatattggtttcccacgttctacttgtacaaggggacacctatgggtataaatacaagaccccctaggaggagaggggagaaccaccatggaagacacccatgacaatcaacacacgcccaccagaagccacaacatacaagcctacatacgccaagacacgccgccggatatcgacttcagggataggcatggctattcccctacggtgtctccggataccgtcaggagatacgaaagcgctatctctgatctcgccgggcacggattcgagaaggaagactaccctgttgtcgactacgagtcagaccttcagatcaacatgtggacaacagttagatatgctgcccacatattgtactggtgtgattatggtgaataaaagcaactccggctccggccaacaggatgtagagttattacctgacagctcaggggcctgaacctgtataaaaatccccgtctccgtctcttttacctcagtctcgcgtatatcctagcaccgacgatccccatactgtccaaataccgtagtcgaaacatcaaacgtcgacagtggcgcgccaggtagggggattttggtacttcaggatttcgacgagatgggtttaagagatggattctccaacaacaagctacttgacgacttccgaccaggaagattcaacccggccagagtacgtctcccaacgagattggaatcatcgtcaccatctattcgatccggtgagatcgaccaagcttcgacacgtcaccacggcagagggccatggtgtcagcggcatctaagactgatccaacaccaatccctcgacgcgtgggacatcgactggcgtaaggcattggctgcccgagtagccaaactcggctggcgtgaggcattgatctgttcattggcttgtagtctaatcggagttgaggagttcctgtgattgcactagaattcaattcctagttggcaatcgagctgctcattctggtgacgtaagccaaaagcaaatagatcaactaaacagccaaaaagccgcagtacaaattctaaggtaattagtaagattaatttcctaattaatctactaatttcgtagatatatccggcatatatctacaaaggtacgcaatattttatatataatttaccgtacctattttcagattatacggcattgtcagatctataatttattatgtttacctagagcatgttctttatacagtatatatcgcgcgagcgtccccgatgttaggccaactgcggtctaacgctggagcacgctctgttttcctctgtataaatcatgcttgtttacggtttacataatg

SEQ ID NO: 12499 - DNA, 5278 bp, Oryza sativa
atccgaaacaaaccaatagaaactatgacatctgtaattgttttgttacccttgagtgaccactatagtctctgtaaacactagcaacatgtggtactccatattttaactttcggtttgatagaccagtcgttcaaaatagtttttaaagttaaaattagttatctgaaaacacttgttgcaaacaatggtatttgataaactaatcattcaaaataattttaaagttccaattctgttatgtatatcatgacctatgaactgaaagaacacacgaattaaagcaatggcaatttatggtacttgattaaagcaatgacaagcacacgaataacaggaacagctcctttcaggaatgttacatcgtccagaaacatcagcaggatgctcatagaattttccttcagactaaaacatatattagcaatgcccagaaacaactccacagctggagttgtcagagaagctacagcaatttgcgattcaatgactgaatcgacaggaaagttgcaagatgacgaacagtatagtagtaacatttagaatgcagaggaactaacagctaatataaaaactgatcataatctcccgaccttacatcattaggaacatactttactcttttcactttcaggtcagctaaaacaaaagcagcagcaaatagaagaaaatcaagaagcgacgggcttcaaagctgcagatggcagcctagaagaagtgtgcaggaacacagatggaactatccccaaattatccacagaagaattttcggagtaaaagacaacctggtttctacctcaaacgaatcggaatagctatacaacatttgacagttttttggatgaaaaactttcatatgaatttatacctcaatgccatatgaattagcacacgagcttaaaaacatgtgcaaattcaattaaatttctgtcacggcctaataccatatgattttaaaaaggacaaagttataattgaaagaaaattttatacacagtaaaatttatgagtgtgtgtactccctccgtttcacaatataagtcattctagcattttccacatttatattgatgttaacgaatctagacatatatatttatctagattcatcaacatcaatatgaatataggaaatgattgaatgacttacgttgtgaaacagaggaagtattacttagcaaccctgtagctgtatctcgtagaagagtaaaccgaacgccagcaggtttacacagctgaggccgaacatgagccagaagaagcaatccagccgtcatcgattgagatcgtcgggaatccacccgccgccgccgcccttctccggcgccgtcgcccacgcgaccaccgcgacgatggcccgagttgaggtagcttccggccgccacggcgacgaggctcaccgcggtgcacaggctctttatggtgtcgggcgcctggtcgtagaagaactcgagcaggccgacgctggtgaacacctccgccgcgcccagcgccatgtacgacggcgcctgccacacgatgctcgtcgccgcgcgccgccggcggctcgcctcgagcagcgccgagtacgccatggccagcgccgacagcgccagcccgacgccgagccgctgcagctgcgacaggccgcggcggtcgccggtgacgcggcgggcgagcggcatcagcgcggcgtcgtaggccgggacgcagaggaggatgctgaccacctcgaaggtggacagcgtcgccggcggcacgtcgagcgggccgacgcgggtgtccatcgccttcccctgctccacgaacgtcgacgacatctgcgccgtggcggcgaagaagaacaccaccgtcggccacacggtggacagccgcagcagcatcttgacctcctccacctgcgtcaccgtgcacagcatccacgggctcgccatcgccaccgccggcggcgacgccactacggccgccttgtccaggaacgcgaactgattggtgtgctcgatgatccggtagtcgccgtcggggagctgatgcaagagcgagctgtcgcccggaagctccacgccgcgatttctgacggcggcgacgaccacctggcagagccgcgtgagggggctccccggcggcgtgtggaacgcccggaggccgcacagggtggagcagaagaagaaggcggcgagcgcggcggtcatgaccgccgccgggatggcgaagccgagccaccagccggcgcgctcctgcacccacacaagcacggtggccgccagcagcgagccgacgttgatgcagaagtagtaccagttgaagaaggacgccctcgccgccggcgccgcgtcgtcgtcgtcgaactggtcggcgcccagcggcgaggcgcacggcttgatgccaccgacgccgagggcgacgaggtagagccccaggaacacggtggcgcggaggacgccatcggaggatgcatcaaggtgtggggttgcgaacgacgccgagactgtgagcgtgatcatcccctgtcacagattgaaattttataacgaaatttcagaaatttttcgttctttattgttttttcagtccactggtgaagaccatcaaaataatttgtgaaacaaaaattaaatcttaaattttgattgacctttaagaaattcttgattgccataagaagatgttcttttctaaagaacttgtgaaaaaaaaacataatatcttcttaatttttgcttgacatttcgcagaaattcttgattgccataagaaatttattgttctctctctttttcagtccctgtaaagcatgaagaccataaaaaaatttgcccaaaaaaaatcttcttaagctttgcttgacctttaattccgaaattctctattgtcatatttgatatgcttttgtttgttatctaaatcttgttgtaaaaacatttcattcacaaaaatgtctgaataatgaaaattgaataaaggagtatgatatattttcacattaaaaactaagaaaaatctcttcaaacattcagtttttcgcattaacaaaaaacttgtttgagcatacttttcttaataaataaaaaagtataccatggagtagatggagaggaagaggaggatggtggtgcggcgacccaagaaggagtcggcgatgaatgcgccgacgagcggcgtgaggaagcaggtgcccgtccacgccgacacgtccctggcggcggcgacattgctctcccctaccacgccggtgaggtagctcaccaggttcctcgcgatgccggcgaacgccaggcagtcgctcagctccgtccccagtatcagcacgcacgccctccacccaccgccgccgcccttgtcctcctcctccttgccgccgccgccgttcggacgaagcagcagaggcctcttctcctcgtcttctgctgctgctgccgccgccgccgccgccatggagattttgcttccactgtgtctgtgtgtcttgctaggagctactagctcatggacttatgtcatatcgtatttccgagtgaatatttaagaaattttgatgagaatttagtgggggaaatttagattggagagaggagttaggtgtatgcacaagctgcaattgccaaaattgatttttgggatttgactcaaggtagtgtacatgccaacttattaaaaaaaaggatttttgttacgattagcctgttgtgttggttaatctagcgttgctgaaatgatggagtattttaagaataaaaaaaaaattctaaccttatatagattatttttttctttcatctaattttattattggtctatgattacatgagaggagaaatggggttctatactatagagttgcactcatagaattgatagttgacgttttcttttctttcttttttttttgaaatgtgtatgtagtactaatatctattgagttatttgttagaatctggtttccttatcggagattgaactagccattattttagctaatgtatttttcctttcagcaaagaaagctactctacaaaccttattaatttcagcaatgatagaggcaacgcatttcaattatctttagaaaaaatgcgcaagctgcattcgtagaatttgattggttcatgtggaaggtggggtttggatccagggacttaactttagtccctgtctttagacactaatttagagtattaaatatagactacttataaaactaattacataaatgaaagctaattcacttgacaaattttttaagcctaattaatccataattaaagaatatttactgtagcattacataggctaatcatggattagttaggctcaatagattcgtctcgcgaattagttcaagattatggatgggttttattaatagtctatgtttaatatttataattagtatccaaacattcgatgtgatagggacttaaaagttttagtcttatctaatcagggcctgaaatctgagccacgcaaaccaccaaccgcacgacaaggttaattagggcctgttcactttgatgccatttccaaccttaccaaattttgataaagttatcaaaaaagtggctctatttagtttgctgccaaattttgataactatataagaaatcctaccaaaattttggcaactatgccaaaattttggcatagttgccaaaatttggcattgccaaaatttggtaaggttttttttggcgtcaaagtgaacaggcccttaatttccatgtctccatcacactcacagtgccagcggttatactgggcagactagtcattcctctgttcctctttccacgttcatctgtaggatttaagggcctgtttagttcacgaatttttttttaactgtcacgtggcatgtttgaccggatatttgaaggggttttcggacacgaatgaaaaaaataatttcataactcgcctggaaaccgcgagacgaatctttcgagcctaagtaagccgtcattagcacatatgggttattatagcacttatggctagtcatggactaattagactcaaaagattcgtctcgcaatttccatgcaaactgtgcaatatgttcttagacagaaaaagtaggtagtagcacacattaattctagatgaagaaaaaaaaaactatgatatctctcattaaataatatgtggtgaataaaaatattgttgggagtaagaccggacagaagttctaatgattgtagctaacatataaatttataaaaaatgttggtcaaagctaaaaagtttaataagtataactaaaaccacgatgaatttaaaaggagaaagtacacaattaat

SEQ ID NO: 12500 - DNA, 939 bp, Oryza sativa
tttggaggcgatcttttcgagcatgcggttgtgccgcacaccccccctgaacgcgtagatcaccgcgtgtgcagggatgcatggtatggtgttgcggacttgacagaaccgctgaatgtacgagcgaagtgactcatcatcccttcgctgtactgcgtgcaggtccgcttcttcacctgggcgcggatatgtgccttgaaagttcatggtgaactgttggcacaaatcctcccaagagtggaaggacgcgggtggcaagttcattatccaaccccgtgcctgtcccttcagggccatgggaaagaaattcgccatgaccctgtcgtcacccccggcggcctcgatcccggtcgtgtagacctggagaaactcggcggggttgacgctcccgtcatatttttcggcgatggtgggccggaaccttgggggccaacggacgttccgaaggctcgccacaaaggctctacagccgacaccaccaaccgggggcacggagggttgatccccgcgtctgtgttgatgtgacactccggacgaggaggcgccctccgttgcgtgggcagcacgtcggccattacgccggcgctcgatactgatgcgggcatccggccccccacgcagatcttcctgggtcggaggcgctgacgaaggagtggcggccgaatggcgagctacagccgccgctcgccgcgccctccgccgaaccgagaccgcgcaggcccccctttgccggttcggccgggggccctgggccgcttggacaaagagcgccccagggatgtggcccctagcgaagaggatcggccccaccgaaaggtgcagcggcccgtctactttgttagtgaggccctccgggacgccaagacccgataccctcaggcccagaagatgctttacgctattctgatggcttcaaggaaactgcgccattatttccag

SEQ ID NO: 12501 - DNA, 1922 bp, Oryza sativa
caagaaacgagttcttgcagtatattgttcttcagcgaatctttgcagaaattgtcattatgtgtaacataaattggttttggcattgtcattcaggaacaatgttcacaatacacatgtgatggaacagttaatagtgacaaaaagcctgcactgaagcagagtacagggcattggagagcatgcttcttcattttaggtacttctgagaagttcacaaaattattctgtttgtgctcctcaatttccttgattaaacatacgtaattcacctaccgagtcctgaacatgtcataggtgctcaattcgctgaaaccttgtgcttcttcatggtttcgaagaacttagtcatgtacctcacgagtgcgctgcacgaaagcaacatcgacgctgcacaaagtgtgtctatttggatcggcacttccttcttcacaccactcattggagccttcttggctgatacatattggggaagatactggacgacagttatttccctctttattatcatcatcgtaagtgcaacaaaacagatcagtagcaactgaatgatataagctgcagtctcctctgtaatttgctgctctgaagagttgtgttttgtcagggaatgctcattgtgacggtttcatcatcaccattgttcctgaattcttcttactacaattggaacatttgccgtgccacggtctacacagggctctaccttactgccgttggaagtggatgtatgaagccctgcattccagcctttggagccgatcaatttgacagtgctgacccggtggaacggctggcgaagggctcattcttcaactggtattactttctcaatgaacgtcggctcactgctgtcgacaactcttgctggtctgggggggggccaacataggggggaccgtcggttttgcaatcccaatgctactctcggggttcggccttccccctgtttttcgttggaggaaaggttaacggtacaaaaaaacaggaaggaagcccctgccaggggggcccaaggggggggtgcagctggaaagaatcataagctgaaattgcctgacgatagctcactcctgcatgaaggttcaaaagtgactgaagatgattacaggactcaactcaccactcaattcaagtattgctcattgcatcaaccatcaagggttatgtctaattacagcttaaagtttgtggacacaatactcaacttatactttccccgtctgaaaatatagcaacctatatctatgtatctgaatagctaaaagttgttatatttaatgtagtattatttagtacagtacaaaataatgtatttcccgggaacaattctcactgtcaataaggctcccacgttattctagaccatacgttttaaaaaatcatctgtagttgatttgactcttacctcgtaggaggtaatttgtcatcacttaccatatcatttcatttataaaaacatatacattgatcctctactaatattcctgaatgtcaaatacaaaatacaaacatcaaacacttttgaaaatatactgacaaatattattaaaaggttgaacatatactccctccgtccacaattataggggattttggtccctgggtttgtccaaaattataaaggattttgtttatcccgaaaggatcattacaacagccatcaataatcccactcccatccattcacatatgaaaagacacacagagaaaatcatgtgtactactagtactaatccccagtccccacccttgtaaggaaaaataaaatataccccgttcccaccatccctaatccccatatgtccttagatgcactttttccctcttccttaagccatgtttccttcgtgggactaattcatttaagccctatttgtttcagtttaagattattgtaatctagattattaaatcagatt

SEQ ID NO: 12502 - DNA, 802 bp, Oryza sativa
ggccatggcgtactcggcggtggtcgaggcacggcggctggggacggcgccagcgccggtgagcatcatgtggcaggcgccgtcgtacctggtgctgggcgtggcggaggcgttcagcgtgatcggcatgatggagttcttctacgagcagtcgccggagtcgatgaagagcctgtgcacggcgctcgggcagctcgccatcgcggtcgccaactacctcaactccggcgtgctcgtcgtggtggcggcggccaccacgcgcggcggcggggccggctggatcccggacaacctcgacgaggggcacctggactacttcttctggatgatggctgttgttagcgtcctcaacctgctgcacttcttgcattgctcaatcagatatagagccaataacaacacgctgtcgtcttgacatttatacctacactcttcttgggtgcacattcgtcatggttcatgccaaattaagtatactagccgttaacccgtgcgttgcatgggatatttattaacacgctgtaaatattaaattataactatatattgggtatcttatgaattataacgacttggttaaaaaaacacttaacatcaattgctaattgctattattaatctctaaaaaaaatactgagttgagagtatgagataggaacataattcttaattatgaaatcataaagtattaagttctgaaaaaaaatgaagagtttgtatagtactttgtaagtataaacagttggttagattagtagatctaattatgttattcttatgttttaaattatcgcattcagaa

SEQ ID NO: 12503 - DNA, 2262 bp, Oryza sativa
  unsure (1)..(2262): unsure at all n locations
acaaaatttcactaagcaatacaattgttctttacttttaatcactgttgagagaaccactcctttcggcgtgacgcagttgtccattcgataatagagatagttggtaacttcgttaacaccacaaatctttaggcgagtctcgtgttagttggaaaagggggccaacacgaggtttgcattttgttagggattgttttttttcactgtgttgagaaatgacatgtttattttttgagaagtttcatggcaatagtaaaacttgtcttatttttttgaattttttatagacatgtgctttgcattgctttgaaaaatgaattgttttgtgaaaggttgcatatttttttagggaaaatactgtaggagtgcataaatatatttaatagaaacaatatttaccctgtacaataaagatatgttacaaactttgcagccattgttgcatttggggtattgaacaatcttttactctatagataaccttgctagattcctttttgaaaagatccaagcaaacttggaagtaaggagagttgtttctgaaaatcttattgtttcttgtgttccaaacgctcctagccataattttgactgtgagaaccataattgcgaaaaaatcatggagccgccaatgactctgagagcagtaacgttgaccaagaccaaagcaaacaaccaatgttaaggctgtgttcggaatcggacgttcccgcgtacatagtaagaacggaaaacggaacggtccattagcgcgtgattaattaagtattagctaatttttttttaaaaagagatagatcaatatgatttttttaagcaactttcgtatagaaactttttacaaaaaacacaccgtttagtagtttaaaaagcgtgcgtgcggaatacgatggacaaggattgggaaccttgagttccaaacacaaccttagacgtgtagtagctgtatcataatttaccaattttagtatcaaagccatgcttcctagaataacctggatagaaaaatctacaaccccctagcaaaaatatcttaagtattgaaaggttaagaaaaaaacttgatcgaggcatatattggctaaaggtacaaataaaaaaaagggagaaatatcaaaccaaaaacagagaatgttagctcttgtaccgattggcagatctanattattatttatttttgtaggtccaacccacagggaggcgacagggacttaactgcaataggacgaacagatcattgcacatgcagaaacgaaaacaaaataatacaggtcaacaatacatgatcactgtgttgtgcacgtcagtctgacgcctcaatccttcccgtgcacacaaaatttcttatcctcccctctccatctctccctgcctccctcctgctcagctactactactagtagctatgctgccatggaatcgagctgctccgtacagctaattcttcaccatcaacctactccatcctctctgctcactctgaattctcaaggtatagttctcatcaggtagatggccatggaagcagcagatgaggagagggcgcctctgcttcaacctcaacctcaaccttcacgggtatctaacctacctaccattgcttcttgacttctgcatgcatatcattggaacaaagtcgaacaatccaccaagattctttgcttcaagtttcagcttctgcagctcatagtttggatgatttttctgcagggggatgcagattcagagtatacaggtgatggatcggtggacgtcaacaaccagcctgctctcaagcgcagcacggggaattggagagcatgcttcatgatcctaggtaccaagaataattagcaacagcaattcaattcaaatcgctgatcttccatatatctgtttctcacaaccttttgaactaaaattgcaaactaaagttaatcactcaacctaaccaggtgtcgaattcagtgagaatttggcttactatgggatctccaagaacctggtgacctacctcaccaagattctccacgagagcaaagtgaacgccgcgaggaattcctctgcttggtcgggcgcctgctacctcacgccactctttggagctttcttggctgacacatattgggggaaataccggactgttcttacttttctcccgatttacatcctggtaaggattgaatactctgttgcagaggctggactgaactccattatccttcccaaagacaactctgcactgtttgcactgtattgagatttgaactgttttgtttt

SEQ ID NO: 12504 - DNA, 3106 bp, Oryza sativa
tgctactttgaccaatgatatttataaaagtaagatgttttaaataaaaagaattacatattgtgatagtttgtttaatgataaatctaataacatcaatgttacataactgatcttttttatatttttgctattaatagtcaaagttacaaatatttgacttgacactatgctaaaaatgcttatattttgggacggagggagtaatgtttttctctccttccatttttctctatttcctcttctcctttattctcttgctttatcccccatgtaggggattcaataaataaagacttgagagcacataacaattttgtctagcaagtttcataactaatttcattgtaaagtgaagtgcatgggcaatccctaaacttgtgcaggtgtgtcatctagttctttaactcttaaaatgtatttttcaggtccccgaacttgtcttggtagtcatatatatccaaacggaatccaatccacaatgtacattgacgtgacatgccatggcggcacctacatgttagtgagacccacatgccagacacattgaaaaaagtaaaaataaaaagaacatattttctcctctctaccttagaattttttatttactttatcttttctcctctctacccaagaggaaaaactgtgattttaattttttttatatgtgactgacatatggttccaagctactaacatgtaggtgccactatggcattccacattggcgcatggagtgtgtcggagcctatttggataagtatgacaccccacccaagacaagttcgacaacgtgaaaatatattttgagagttcaaggacctgatgacccacccacacaagtttacggaccacccatatactttactttcattgtaactaggtgatccccgcgctttgctgtgggaattactaagtaattctcaatatatttttttttgacaatcaagctaggagtgaaaaggaaaaaaataatgaaacatgtaccatgaaataaacaaatgatacccacgctttaatgtgaaacatattgataagtatatgttaaatattataaaaatgatagatagatttgttaaaatataatgcaaatgatgtgaggggtgatgattggatatgcttgcatattgatttgtagaattaaataaattgtaaattgatgttgtatgcttgcatgatgttaaatatgtaattattgctagtgagttatgatgtggcatggttgcatcttgagctttagatttagtgggctataactttatagaaagtataggtatgcccattgcattgaatctcttgaggcacttgtaaacatttcaaattaaataaaaaaattaatggaaagtagttgggtgaattccgtgttacactaggtcgagttttccttgtttcactttacaccaaatttaatacatgtctacacttacaacatggtatattgggataaattttactttgtactaggtttatgtcactgaatgtgtgggacatcttgtaaagcataagcggaatccatgatactccatgaagttagatcattttttcatgaaatttctgtatgttgattaatggtgtatgatgacgtacgtgttaactgaaaattatttcaatacacgtaatcgtgaatgaaaagcctatcatcacgaaggtattagtgaaataaggtactacctttatattttaatgtataatgtcgctaactttttgtctaacgtttgaccattcgtcttattcaaaaaatttatgtaattatcatttattttaatgtgacttgattcatcatcaaatattctttaagcatgatataaacatttttatatttgcataaaaattttgaataaaacgaatggtcaacgttggtcgaaaaatcaacggcgtcatacattaaaattaaaataaaaatacggagggagtataattttgtgatacgaatgcaatttatacttaaaaagtatgttgaaggcaaataccaacagcaagccgtgctggaaaaggaaattttgaactgcactcctgtttctttggaccatcaccacttggctggtaacccgtgtggcagcggcactcgtaatctcctggagtgttcctacagacaccgtggcaaggatacttgttggggtgtgcgcactcatcgatgtctgcagatttattcgaatataagagttaattttggcctctagaggcagtacgagattccatatatggttaaaccattgctgttttttatatatgatatgtagttgtctttaataatttgtttgactatttgcagttcataaaaaaattgtgcaaatggagaaaattaatactaggtatgtatgcttaaagtattttagttgatatatatctcaatatatatataatattccaaatcttctaaccttaattaaccaagtaattaaataaatattgttgtcctaagtttaaactatatatgtcacatattaaagaattaaggtagtagttacctttgcatcctttattgggatcgtcgtcgtaagggttaccctcgtagccactgctgcagttgcagtagtatccgaggccgttggtggagttgacgcacgtgctgttgacgctcacgcaggcgtatccagctggcatattcttcttcgacgtctccacctccggcgccgggcaggacgccacgtcgcggatggcccagtccagccacaccggcatcctctgtttccggtccatgttgagatcagacctctggaattggtactcttccttgtcgacgaggaaggcgtagtcgcaggggctgaagtccacctgttcgccgcgcggccattgctggaaggtgacgacgttgtcggtgagctccggcgggatgtcgacgtggcagcagccgacgccggcgcacttgccgttcttggcgctcagcgagtcgctgcagtaggtgacgcagccggcgtagtagaggcttgtgtagaggccttttccctcgctgtccccgtgcttgttccatgccacggtgttgcatcccaggacgacgaacttgttgcgctcgtcggagatgcggtacacgccggtcttgttcagctccacgtcgccgtaaaactgctcggtgacgttgccgctggagttgtagcacctgtacgcc

SEQ ID NO: 12505 - DNA, 1150 bp, Oryza sativa
tttatttcaatatttcctaagatgattcaggagcaaatttgttgtttgtcaccctctggccatacgggcaatatttcataagctcaaaacatggtgattgttcctcagatgtcaagtcttacgtacagtttttttttttttttttttttggggtgggggggggggataattgaagtacctgaattgattggtgggctgaattttatgacttgcttcagttgttgaagatgaattggatggctcatataaaagtgacttattttctggcaattgcagatggcacttcctaacagctgcaacaatcacctgacagaggctcttgagggggctaaatcccaggttcctaaacctgtaaactcttgagccggcaatgaatacagggaaactgatgatcatgaacacagtcgggattgcgcaacccaccccccatccaacattgtcttgcaaccaaacaagcactgtgcttgacagcaaggtgctgacagtagtcatgtagaaggaccaactgaagaaggaggccttcttcggtaactcctccagatcagtgctatcaaactggtcggccccaaaggatgaagtgcatggtttcattgcaccactcccaagggcagcaagatagagccctagatacactacggaacgatgaacattgccatgttcagaagatgtcaagaacattggaagtgatgctgaaactgtcacgatgagcattccctgacaaaatggaaatattcagagtctgcagaaggtactagctgatagtgcagaccatatctgtgagctgcatttgcgcttacagtgatgtacaccgggaggaaaacaacaattgtccagtatctgccccaataagtgtctgccagaaaggcaccaacaaccggtgtgaggaagcaagctccaacccaggcagagacatttctggcagcatcgaccttgctttcgtggagcacagtggtgaggaatgtgactagattcctcgagattacaaagtaggtcatgttttcacaaaattcaacacctggtatgcataaaaacattcacaaatcacaacagaagaagacaaacagtttgaaaatgatgtttatttgttgcatcagttgctctatagtacctaaaatcaagaagcacgccctccagttccctgtgctgtgct

SEQ ID NO: 12506 - DNA, 2838 bp, Oryza sativa
gggcgctccacccgctcgacttgttccgcaagagcttgcttagcggccagcaccatagaccacgcggcgacaagggcagaggcggcggtggcgccgccaggagagacgaccgccgccacgacgacgacgaggaggaggccaacggcggcatcatccggtcagcggcggagctctacgaggcgggcatccggttcaggcgtcctcatcatccggtcggcggtggagctctacgaggcgagagaagagagaggagagggaggaagatgggaataggagtatgacacgtgggaccatatatttttaataaataaggtgctgactggattgccacgcgtaggccacgtaagacaaaaccacgctggattgggtcgaggggggtaattcgttcggtattgaaagttcagggtgagtaatatctggttttcgagtttaggggggtaattcgaccgaccgtgatagttcaggggcgtaattcgtactttttcctttacataattataagtgcgataagaagatggtgtttgaaaatgaagatgaagataaaagattaagtattttacgcaaaacgaggaggtaataacgtgcgattaattgagttttaattattacaaacttgaaaaatggattaatcttatattttagaacaactttcatatagaaagttttcacacgaaacgcaccgtttagtagtttgaaaagcctgtcacttttgtccaaaagttaccattccaaaaggttgcatttttgttagggaattttatgtcttaacagtatggtctcgacatctctctctgttgggttacgcacaggctatgatagtataaatcaaaattttctagcgcataaactaggaaccatgcaagtattagatcataaatcgttaccactcgacgcgctgcgcagcggaagaaagcgctaagaaggcaaaggaaccctcgcaaagtagcgcacgtcgatgtagaggaagtagtcgatcgtaccggctcgatcttctcctcctcgtgcgttctcctcgctgtaatcccacgccgatcagcaccgcaaagcagcggcacctctaccagtatccacacgtacagggacagaatactacgcgcagatatgctagtacccgcgtgcggctaggattttgctcagggaagggagtggcagctagggtttctcacgtgatgcattacctctgccggtcacacccctcacgaatatataggatccatgacttaggcccgtagaacttccattcggatctctatccaaattaagctcatattggatctccatccaatccccttattctggcccattaagcgtgcgaccctgtaggttcatacacactcggctataacccgaaaactctttttcggtccacgtgtcaccagcggtccctagtagaacatattgatccactgggcatacataaagatcatatcggctaaacctctagtgtatacttgtatgaacccctttgcctcacgatatcgatgaagctcaaggctagatatgtgccatcctctaatagcttaatcattcactcgagcctgtgatatattatataacttgtgatagactcctcaatcacctttggtatggccatgcacttccataatctataacatcgaggggaccagagatacctctccataggaggggcaaatcctattttgattattcatatcccactacatgtttcatagcatacccgaaaactacttttataactacccaattacggagtagcatttagcggtccctaggaatcatgataatcttaggtctaaggatccaacatcaagactaaatgggatcattgatgacacaacacatatggctcttacaatatctcatattgggtctattcaacaatatgttccccaacatgtgtccccattattaatttgttatctctataccataattcatgagacatgatcatcaattaatacatgtgctgatcatttaaatatatttgttatacatatgatatttgatcagggatcctttagaaatagtaacaaccaacataaatagtctcatactcattaatcaataatgagctatctatttcaagtaataaagtcagataaatatgtaaatatagtatgtgatacaatcatctctatgattgcctctagagcatatcacaaacactcccgacgagcatatgacgtcctccagcgatatgatggccaccaccttcaacctgtaatggtctatctcgggctgtacgcctgtacctcgtcgcataagagcaggtacaataacgtgattaagctggctccaaattttctatcaccttcctaatcctagattaagctagcaaaattgaagagagagaaatgagcaggcgcttaacctggcgccgggcgctagcgcttcatccgaagccgtatcgctcgcatgcagcccacgaaggtgattaaaaacacgttatgtagttcccacaagaaaaatccctgatcccctcctccaccgcatctcaaccaccgaaaatcccatcgctccgccgcccctcccttcgcgttcctcttcgctccttggacgcgcatcttctccgctccctgcgcgtgaaatcttctccgcccccttgcgcgcgaaatcgccggcgacgcctcgcgttcctctccctcttctgcccgtgcgtgcaaaattccctccgcctgtgcgcgcgaaatcgccggcgcctcgtgttcctcttccatagccccgccgcacgccagccctccgccattgcctctctctgatcccgctaaatcttgcccccgatgcgcgcgaaaatgcctctctcccgccaaatcgaagccaaattgatgcccaacaatctccccagccggctccgtg

SEQ ID NO: 12507 - DNA, 3253 bp, Oryza sativa
tgaactatctagattattaatttctactgccagtaataaaacaaattatgatcaggttcttgaacaaggctgcgatagtggtgacaccatcgtcgttaagcggggagaagggtaacgtgccagcggcggcggcgccggtgagccgatggcggcagtgcacagtgacacaggtggaggaggtgaagatgctggtgcggatgtgccccatctgggcatgcctggtgctcttcttctcggtgagcagccagatgtcgtcgacgctggtggagcaaggcacggccatggacaaccgcgtgggccccttcaccatccctccggcctcgctcgccaccttccactccatcggcgtcctcctctggatccccgtctacgacgtcgcgctggtgcccctggcgcgccgcgccaccggcaagcccaaggggatcacgcagctgcagcgcatcggcgtcggcctcgccgtggccgcgctcatcatggcctactcggcgctggtcgaggagcggcggctggcggcggcgcgcgccggcgccgccaggacgagcatcctgtggcaggtgccggcgcagctgatgcacggcatggcggtggtgttcaccagcatcggcaagtcggagttcttctacgaccaggcgccgcgctccatgaggagcatgtgcaccgcgctcggccagctcgccatcgccgccgggaactacctcagcgcgttcctcctcgccgtcgtcgcctccgccaccacgcgcggcggcgaccccggatggatccccgacgacctcaacaagggacacctcgactacttcttctggctcatggctgctctcttgctcctcgacctgctcttatttgtcttctgcgccatgcgatacaaagggagcactgctgcttcttgatcgacccacccaaaaatgtcactctatgtatggcatttgtaggactgtacaaaaattgaattcgaaaatattttatgattcactaatattacatagatgaacccctttaactgcacgccaagtgtgtaaatgcaacctcagacacaaagcatatttaatttacaacctcttgtaactactaactattgatacaaaatagagctcttttttcatccttgagaaggtaccatgaggtacaatgaggtactagtattatgaggtaccaaatcaaatctagccattgatttgggaggggcacgatcggaaaaaaagaggctcgctcattgggccactcggtcgacaccgccaaagcaggtgcaacaatcccttcaagtccagcacgagtcgtcgtccgccgcagcagttccgccgccgtagccccttctcatctgccggtgtcgccatttagttccgccgccggcgtcaatgctggctgggagcttttagttctgccgctgctcgacgacagcctgccaccgccgtcggccggcgcccgaccatagccgcccaccgcccgaccacagccggctgagcacaggtgcccaccgccgttgcccgccgcctgagcacttttctgtccgtcgccgccagccatcccggacagagcaacgccgccagccatcattcttatggattaggggttgattttgtccagcttcttattatttgcagacttgttccaaacctgtattgcacaagaagtactgcattttatatttgcaaactttcttatggattaagggtgtattttgcccagcttgttgttaaactgcatcggtattgaatgcaaagctcacatgttgtgtgcctggatttgtacttgtgtttaaatctggctgtttcagttaaattgcatctattaatcagtgaatgcaaagctcacatgttgtgttcctggatttgtacttgtgtttaaatcccaaatatccatgctagcaagtgtattagtgccaaatatgttatacggcagaagcagaaacaccagctttcatcagtgaaataaacaccagctttcatcagtgaaacaaacatcagatttcattagcttccacatgggcaactagtagacactagtcagttcagaaacagcagcagcaaaaaatcataggcagaaccgaaacagccagattttcaatactgaagcatccatttaggattaaacatatgtagatggttcatccattaacttaattacatcatagaaaggcatcacagtacataatagaaggaacattaagactaagcacatcttcatttagtcttaacgattactagggcacgactgaatgaagatgcacgcggccaatctacccgctgttgcgtagttctaaacaccagccccaccctacatgcggcaagatcacctccattgctcgaagggggccacgagcggatggacctatctagggatctgccatcccccatcatctgcgctgctccaactgccttcgcccacatgtaaatcgaagagaaatacgagatcaagaaagagagctgagagaatcaaagagaggtcttccctctgcgtgcgcccatgaaatcggacagaaaaacaagagaaggaaatacctctatgtgtgccaaggccggattcgagatgtgcggaggaagaagaaggccagcttcgtttctttgagagacgaaagaacgaaagagggacgagagaaggaaagagccgagcagaatcatcggcctctctctcgctattgcggcataaggcgaaattactttcctaccccccacctgcggtaccgcgtatatcagcccgtgcggtactaggcggtacgctgcaatctcatccgtccgatgaggccggatcgacggttcagatttggtaccgcatggtacctcaaaacctcaaggagtaaaaattctctacaagatatatacagtttctcttagcttgtacatctatgttagatgtatagccaaaggccaagtttagtttaaggctgagacaaaatgagtttggatgttgattctcccttgtttgtcatgatcacgcttcccaaactgctaaaacgtgcaattttatttttttaaaaaaaaaatcaaataaacatatttttcaagtttataataattaatactcaattaatcatgtattaatgattcgcgttgtttcgtgtgccactaaaaattaaggaaaacttcatttttgaaactcagcctaaatccattaccaaaaatatacaatatgcacccttttatagaagctaaaaatcgatgtagtcaatatgtaacgtacgtgaaatgatgtagtacacaaagccggctatagtcaaagtggcgtatataacaaaagctatatttagccaaagaccttc

SEQ ID NO: 12508 - DNA, 904 bp, Oryza sativa
ggtgcttcatgtcttatgtataaatctggtcatgaagctgtgttctctctgtgcctcgtggaagaatacacaaacatggcaagattaagtaagctaagggtggccatcatccagaagaaatagtccagatggccctcattcagattatccggaatccacccaggtgctccactgctcgtcgtgatcactgcgacagcgccaagcacgaacgtgttgaagtaagctcctgaagcgattgcgagctgcccaagcgctgcgcaaacgctcttcatgctgtctggcgcctggtcatagaagaactgtgacataccgatgcagctgaaaatctctgaaaccccttgcagaaagtatgctggtgtctgccacaggatactcattggagcagctacattgtggtctgctaagccacttgattgcacgattgccagccgcttcatctcgagcaatgctgcgtacaccatcatgatcatggacagtgaaaggccgattccgatgcgctgcgcatgtgagaagcctttgtcctgtccggtgaaatgcttcaccagtggcactgatatgatctcatacacaggaaccaagacaaggacgctgagcacggcgatgatggtgagggatgcacgtgggattgcaaatgaaccaacatggttgtccatggccattccctgctcaatgaacgttgaggacatctgcccattgaccgcgaaaaagatcacgaaagatgcccagtggggaacatccgcagcagcatcttcagctcctcaacttgtgtcactgtgcagagcgaccatgagctcatgggcttgatgcacgtttcgtttgatgggggcaatacaatggctgccttgtcaaggaacctgaagaacacaagaacatggttataacttataaggaggatggattctaa

SEQ ID NO: 12509 - DNA, 19422 bp, Oryza sativa
  unsure (1)..(19422): unsure at all n locations
ttgctatctacccattcggctacacaattgcttttatttcccctgttcaatgatttagagttatccactatagaagcatcaaccttattaatattttccaattttagttttgtgcctctagctctagattgatcacaagcaaaccatgtagacataaactttggcaatgatgatatagaaaatttaaatactttattattgtcaacaagaacattaatctccccaatcgatcctttagaattattcatgatgaccgtactgatgtataaattatttttagatgaatgatcaaactgggaaataagtacattacctgtgaatgctaccttatctgacgtgttggagaagcatggagatttatttacttgaatgatatcttggttcgtccccttatgaccctccaacatctcctccgtgttctcaaggtttcgtgccctatcgtcttgctgctcatcaacttccttggcacaaaattcatctggcaaaataaaaactcctatgtctccagagaaatcaagcatagctacctcgtcttcattagccgataattctggatttatcggcttttgttcttgtgaaaaaattggttttgaccctttacttaaaatataagaattgattttttcctccacatctgtcacagcttgatttttcgtttcaggatttataaattatttaataaattatattaaatgttcattaatttacaagtgaagttaaatgtgggaaataaaatatcctaaatataaagcatggttggatttaatttttattaaattctccatgattaattatactctctgaaattttctcggatttttcagagctcaattcttaattttaataatacaaagaatatttcagtaattattcacatattaaattaatcattaaatgagctggtttcaattttgttaaatacttagagtgtccaagtatgttaaatatttttcttggaattatttgagcattagaagtatttttaacaattgaaagatcattttggtgattaatttaattagaaagtaattaaaatcaacttttccttttcgggccgaattaggaaaagtcctcactctcggcccaatctcctctcggcctgcagccctctccctctctttcccgaagtccagtttctatccctccttcaatcgggctgtgtaatagaagcccagccaaaagtctgttttgcctccctatcgctacagtaccttcttctactcctggacagagccgagccagccgtgccatgtcctactgccgccgatccccttccaaaatccggcctcctcgttgctcctttttccaaattagttacgggaatagaatcatctcaatctcctctacaatttccctaggaaatccccaaaagtttctatggaaatcttttccaatttcgcggttcaatcttttctttctccggcgaagatccaaaactttcccgagtttttcccgtcgatgtgggcttgatcccgagctcccatgcctatataaaggaccccctagtcgtcctctacctatctcctcaagtcccgtcttccgtcatcgccggaatcgctctccccgcgagctccttctctctccacctctggccgccactccagccgccgtgcgccgtcgcttcggtagtcgccgtcggtcgccgtccccttcatcagcatcacgaggtcgtcgccgtccccgtccaccgcttcgccgccgccgtagcacgccggagcgccgccgacaccgtcgacctgaagctctccaccgtcgccgtcggtccagccgcgccgtgtcgtcgttgcagccgccgctttcggtcgtcgttgccaccgtcgggttcgcaagaaggagctgcaccccatctgccccttcgtcgccaccaaaatccaccggtgctccatcgtcgccgtcaacccgaagctcgccgtcgcgttttgatctccggtgaagccctgctgctcctcccatcatcgccaagcttcgccgctgcctccattggattcgcagctgcgaagtgaagcccggccacccctccgttgtcgccgcacatcgccggaaagtcgtcgccgccgtggacagtacctcgccgcccttcgaagctcgtcgccggccatcttccgtcgccgttcatcgctgcgtaagtgctggtgagcatcgtcgttgcctcctcttcctcccggtgccctccgtttgcattattgtgccgtggttcgccggcaaccaccgctcctatgctgttcacctgtcaggttttccttaatccaatctaatctaatccgtggttcgtctagcgttgtcgtctccgtgtgttgctgaacattgtcatcatccctccctctccgaacgtttttgatcggtgagacatctgtctgtgtctccaagttgccctagtgccaccgtgtcgcagctgtgtgccgctttaacctacccgccgctttagccgttgctcggtagccaagttgtctagccgtaggtgcatcccttaattcctaccggcctatcgtttgccgtaccggaactttcctgtgaatcatttctaccccaccggtttagccgcagccgttgttgagtcgttcactcattcgttcgaacgaggtgttccccgtgcttcgttcgttcatctgtgtggagtcgtcctttagtttagagctgttcagagccgccggttccgttcaccggtttcggttgatcatttgggtgatcccgtgtcacgtagaattgactcgttgcgtcgatatctcgtgaggcccgcttgctagatcaatccaagccatccaatcttggtcgactcggtcaagattaatctcagccgtccaaaattgatataaatccgttctctcttttcagtgacattatttctttttaatatatgtcatctaccaaatatgatctaatcttttccggaggttgttttaatcttttgtctcagttataaatcatttgtaaatgatttaattaatttggaataatcttttctttaataggctttaattctaattaatcttgtaaaattcataattaattcatatgaaatcgaatgaggccgttcaagtctcataattcatctaaaattatgatctacatgtttgtttaatttatatgtattgtttatttggtttttattagtctttttcctcgttttgcgttttagcttgtcgtttccatcgtttcgaaggtttgcgagtgcgccgtaagtattcaagaagattaattggagcccattattgcaaggcaagtcacacagatcccaaacacaattcctttgagcatgttgatcctatatttaaattctctatttatttcaactgtgcatttattttggaatgtcaccgggtggtgtgaacctattcttttgttatgaccactttgcattgcttactctattctttgatacattgggtgataatttgactagttggacttatatattggttcagctagatattagatatattgcttagccatgcttagaaacattagcacacgattgggataactaatgtttcactactacttaatgatggacatgataatggtagctcatgatggctaatcgtgattggttaattaattaatgtgcctactaaaacttgataatggtgggttgtgagcacatggttttgatggtcgtgctcatgacaattaaggaccggttcacgagtttcggttgtgaaacattaatcgtgccaaccacaagccatcatgggcaacagctttaccttttgtatagcatggttcattgcgggacaccagactgagaagtggcggagataagcccacgggggtcgctggggagtccatgccttatttgtaagggggtgattatgatccaggaatggtgcactgctttgagttgtgttgtgcgaggggtactgtcacagctcctttccgaggtaccgtgatggtattgaggcgcatggtgacatgttctagggctgtgtcttgtgggtacagtggtacatctctggccagagtaaaactattcgaatagccgtgcccgcggttatgggtgggtcgaacaatgtctttcatgattagtcccacactactcattaacaataatgtggtaattgatggtaattaatttacaattctcgaatgtttgctaaatgctacttttgcaaatgagctctatattatgccattctttggtatccttgtgcacttgcatatttgctgtgtggcttgcggagtattccatgtactcaccttgcaataatcaatcaaaccttagtggaagaaaaatgatccagaaggagaagacgtttggcttatacccctgttgagctgcctgtgggagtggagccggagcttcgctagaccgttattccactgctgtttttcttttcttttgtaagtatgtaacgttattattatgatggatttgtatattaaattgtcagtttgtgtacctcggctgattcctggacgaggattttatgcacaaattatttcggaaattaccttgtcttcattagccgataattctggatttatcggcttttgttcttgtgaaaaaattggttttgaccctttacttaaaatataagaattgaatttttcctccacatctctacagattttttctgtaagactatctatctttacattgaattcctctacaaattgccccccaatgctcttagtatctgaattctgctcggccatgatcccagtatatgcacaatcaatttgctgtggactaaaagcattgaagtgtgatgtatcataagaatatgatatagagggctcttcatacgacatatgcaatggggggacatcaacacgttctttcggcaatgaactatgagaattgccgaaagtctggagagattcacgtgatgcactatatgccacaaaatcagacagaggcgtatgtatactcgttgaattttcattaattcggccataatcataaatagcacatgaggccgaattataagcgttggacattatacaagatgaaccatgagcacgagaagaaatctccgattgagaaatatttggtatggcatgtaatggattaatagaatcaactggataactaatattaccatgtccatacatttctttcatcggcaaaatttgttgtgtagtaataggttgcaaaataatcaccggtgaatcaaaaggtgcacgtacattgctagcattattaaaatttatagtatatgaattactttgcatagactgtgacatgctgtgttcataatttaaagagctcaaataattattttaactatcattagccgatgcagtatatattcattaaaagtagatctagcaacatttatatgagaatttataggacttgcaaaattatttgaaggaatagacaaagtatttacctcgcagttgacgtagtgaggtagcggtgtagcactccagtacccatccatgtattttcagcaagccttggccttttcctggtgcaattgatacgtacacctagcaaaatccaaaagagattaatttgcacttacagatcaagtgttactcctatatgcctgggtttggttgctgtgtagccgtgaaagctctcctgaatttcctgatcaagcactgtttaatatttgttagccctgcatgctacctccccaccgaattaaacaattcggcagaacagaccgccggcgacggccaaaatcgatctacagagaagattaaaaaaattaaatagagaaactatgccgcggtagatcggctgatttcggccaaaaagtttacggccaaaacttgtccccagcggagtcgccaaaatatattgacgcttttttagtcaacacaagatcacctaatgatttgaggtgcaatcaatagagtcgccaaaatcgatagatcaaaaccggctagcagagccgatttcaagattaattcactttcacggaatcaagtgactaatttataagcaaattagcaaggaagataaatatcgtacttacgtgacgacgaacgactagtttccgagcaaactagtaaaggataaccttctcgctttcgtggagaagcacgaccgtttttcagcgcaaaacggtaaagattaacaaaatagaaaagatcagaaagtaaagaataggaaacggtagattgataaatagtagattgaaattgttcggacctctcgccaacgtcggagctgtaaatttatactggcaccacacccggcaccataggtctcccttcatgttcggtggatccatccttccttcctatccgagtcgataccgtaggcatgtaatcaggctaatgatgatcttctataatcttcaccacgtaccagtccacccgattcacctctgtggctatccaaaactcctaatcatccggctgcacctgcatggtctgtatacatatatgcatatctccaaaataggtaaaattctacagccacccaacaaactgcacacacatttgaccaactctcaagcaagccattcaatgaatcgtgaagctaaactacacaatctggcatgcctaaatgaactaattactagccaaattatggcataaacagatgttcgtccccgatccagcatattacagcctatcagagttacaacgacctttgtccagacaccgcgggtagtgtggagattatgggtaccccatacccacacggcgtggttatccgactagttataggagataacttatatctatggaatatgtaacagatcatgacttgggtattacgtttcctttatattacgaaacggcctaaagtcctagtttgataatattgtaaagtagatttaggaaaccgataccgtattggttaaggtttctatcttataatcctgccccccatcctatataaggtgggcaggaggccctctagggggcatgagacaacctgatcgtcagatctatactatacccggcggattcaaatccccaaacaggagtagggtattacctctcattgagagggcctgaacctgtctaaatcatttgtctctgcatctatctacttttaggtctcatgtgctacccccttttattattgccgaatttatgtttcgacaggtagccgctccttctcgcctatgctaggtcgctatgcgggtacaataggtgtgcatctctatttaggaaagagcctaggataaagtccaactcttgctccattgctctatagctagttgaacacaagtcctaaattgtaatcgataacatacacatatttaacaaaaactgtaacaaaccccaccttaacgaatatgacacaccaacctaaatttatcccgtacactcgatcttcggtgtacaatcggacttgagttggtccttttgctgctcacgttaagccgtcccaacaagcgttcaataggctcatcgtaacaagagactccgcctatcaatatatgcaaccttttcctcttgactccacctttaatagtatctcaacttcccacctatcaccacagtcatcttgtcaatagaaatttaattaatcctttcaaggtgtcacattataaacttcctgaagactattttcaccttcatctttcggactattttcacctccatctttcgtcttaaatttttcttaatctaatccatagctagataacatatgtcatcaataaatagataaatcaaactcatcagacattaattaagagaaacctttcttccttctgtcctatgaactgagctaataaatccaatattcccgcttctcgcatctgtagagtaaacccatgatactgcaagaaaattcactgttgccttgaataactcgaagaaattatcaccataatgtttgctctttctttttagtaacgtagattttatatatctctcttatgcaaatcccacagattctgaatattttcgatattatcaaacaaacccgttgaatccatcaacgtatttaacccgctgttgtcctcaccgcacacaatttaactgactttggcaccagctaaattgaacaagacctgctcatgtgaatagacggtcatcgtcagtaaccagccaaccacataaacagtacgaggccccctaaacagtaaccagttatcaacagtagttggcccacaataaaccagcccaaaagaaatcggaaatgctttccatcgagcgtccaatcagacgctactttggacgcctcctctttcttcccgatttgatttacctttcccatagtgcaatggactttaaaaatgttgcacatatatagtattagttagatatttcaatgagtaattatttttatgtttcattagttcctttgtaagagttgcgtgccatactttttaatgatccagtaaagatttcgctttcaatagttatagatagatgattcatgtataaattgaaaatgtttcagttagaaatatatttttttcattctaaatatagccacgtgtgatcttattttgaagatttatttgcaacaaatataattaataatacaatcaaatcgtggatctgatcaatagtttttctgttaaatgcattgagcaggtaagtagtagcatatctctaatttttgtcaaattgtaatagcataaccctacacagacgaatagtaatggtattttttaattcgaagaagttgtaatagcatgatccaattaaccgtagtttgtacaaatgtggcttatatattacaaaatgtagaatatgtgcacttgacggtcaagacatttaaaattatttttcaacatccaaaaattaagaaacatatagcacagacctatctatctgtaacggctcagcaggcattacaaacaattggttacacatgtgtccaatcatctgtaacggccggagacccttaaggataaaactcatctataacagcttaaaattagcagccgttacacatagaggggacagttctagggtcttcctcttggttaaagataaaactcactagcaatagaagcacactacgctgcgccgcctgaatcaatcgcctgaatcaattgaagtccaatatgttcgaggaataatatgcatatactattcacccatagcattggtttatttttcgtctatatcccataaactacccttataaaaaaattgcacatacaaaaatatagtgtataggctaaaggagaaaaccaaaaggtattggaagtttgaataaatagaaaaaaggggcaaattacatgtcaattacaatgagtttacataggtttcaatgctaccccttttctctctatacgctagaatcacattggactattggatgctaaaaacagaagacctaaatgcctactgttggtccatattaaacatatgcaaagctaaaatgaacagatagaaaatgatgttttttaagtgcaacatgcaagtgccctagtcaacaacaatcctccgttatgtgcggttagtgacatcggtacacctaaaaaaaagtatactacctccgtcccaaaatatatcgcaattttgagctgtgtacctaaacatacctttcaagatatagggccagaagtttttatattttgggacaaaggtagtagaaagttttaatagtaatgttagtacagctaaaacagtatagtatcaaccacttatatagagagataatattttcgcttggcatcacaattctaaacacatgcaaccaatttttctaccaaaagttctatcttttttggagtggagtagtacaaagtgctgctaccatgtggccacgtggcaaagtttatgagcgaaagcatgcataatcacttaaccaaagtatggatgcaataacataagccttatagttctacaatgcatatatacttcttcaggttaggttccatttttttcttccctgttccttttaagtagccggcaaaatatacaacgcggaaacaaagagcttgtaaaagcacagtggcagcaggctacactacagtttgacgaaacagatcgactgcacaacttttaggatttaaaagtgtgctttcacaaataatgaaaaaaacatgtgtaaaatagactggtgaactaaacagtgaaataatctatctgagcacagacatgtaaaagcaaaccaactgaaagacaaaatataaaaaaaaatggactatgatattgctttacctttgcatcgtaacggttaggatatgtctagcaaagcattccgattgaacagttgatgcacaaactaaattgaaatgtaccttcaaaagaaatttacgttcgtctcagatatgaacaggaaatcagctttccgtgatggatccaatccatccatgtctttttcgacctaataaaaaaagaatatagagatatgtgatgaagcatgaataaatgaaggtcattctcgagactgctaatgttttcatgactcaaaaatggagccatccttcttttaaagaaaatgattgaagacatatcctaacagtgtatatagtcataatcaactgataacattcttttggcgcccttcatgttttgtagagatggcatgaaagatacacatcaatgctagtttaaaattccatctcaagtgaatctcagtggaaacaatataccttgatgaggtaactaaagtagaaactaaatattttaaatgggtgtaactcaatcatcaatgacataatggagctactgaaatggtgagaatcatttcctccattagctacttaaaagaggctaacagagcatgaatactcaattcacatcatatcacactggaagaggcactggcaacacatggatgaacaaattcttcgtactcagcaacaccaacagaaaaaatctcttcatgcaagcaggagaaagctttaaaaacgaattggtgagatcaaatagtagagacacaaaggctatcaaagtacaatgtatatatggaagaaatttcatcagagcatatgagagcagtataataacgccggttgttatgttaccaatgtaactcagaagttgtactggatggtctttacaaaaattaagctcaattatgtagttatgttgttatacaacaatttgtgtattattcagcaaatgaaatgcaagatacatgacgacgatatacataattaaccttaatcatagaatcattatcataagattaaagatcaagcaaaatagcaatatagtctatatggctctggggaacttgaacggagctggcagtatttttcccttacatatgcaagcagtgtaagtaacattttacacttgatggtgtaaatatccatgtctaaatatttttttgtataaaaagaattagtaagaatagctaatcaggttgtactggtcgaaaaagaattaaaacaatagcaggagcatctgtaatatagaaacctataaagggtgaaggagatgtaacaatgtacaataccttcaatagctttgataataataacagctttgataataataactccatgcaactcccactaaaagtatgatctaacattgttaatgttatgataggatactctgcatagagatgaagagatcaattaaagaacacatctcaacaacatatggatttagaatataacatgtgaatataaataactctgatatggtgacatacatctagttcttatgtagcaaaaaatagggaagcaacctagataagttaaaaatgcgaggcgactgatagagaggattttaacattgaactcataaatcccttccctaagaaatgtgctatcacttgccatatactttttgcttgtctgatgcactctacagatatttttatgatcatatatagacataaaaggctaatgaattagcttcagtcacttactgattgtactttgagataccggtcgatcaatgcagtaaacatttacccaatcaagttaattaacatgtaaagcaaggcagaatgggtatctacatccaagtggtgtatgtgtatttgcaggaaaaggtattaattagcaaacagacatacatatgtgatcctttcgtttatgcttccaaaaataaatgcaggctgcacataaaaaaaaaagttttgaatcaacggaatatggccttctaacagcgaaatctgtggttccaaaaatagatgcaggcctgcacataaaaatgagttttgaatcaacgaaatatggccttctaacagtgaaatttgagaagcataatgcaggtaaagcatttgtaacctcatatcttcagacttgattgaccatgcaccacagaaaaatcaagtagagatttccaccagtcatataagcctgatatgaagaaagcatgagatgcaggactgtaaagagaactgagaaatcaatttgaggagtagtatcagcaggaggagatttggctgctgccacccatgtcgagtttcacctgttggttgccgcgtgcttgtaggcgctcgatgcggaacagatcttgcagaaccaagttctcgtgggatggagaaagagacgaaatggcggcgacagtggacatcgaactcgcaagaagggggcagcagccgccgctagctcgctgggaagacgacgacagtaaccactggctccgcaccgcggcagcaacggctggctcagcgagcttgagaggaaggcagcggctccggcttcgcgagctcgaggggaaggcggcggctggccataggctccatgagaccatgagcagacggcggaggatttctgggaggggaaaacgtgagacaaaggaaaaaggaaagcacgaatgaccagacaaccatcgtcgccgagccgcggttgtcttcgtcatggtcgtgctcgagcctacacagggtggtggcggcggcctgctgaccccgtccgggcggcaacggcggctctcattcctctttaggacgccggatccgccggtaccggcggttctcgttcctttctctggagcgccggatccgccggcgaggagaacggggtcaccggatccagcggccccggcctcctcactgggagatccggcggctcattggtagggagcggcaatggtggcacggcgagtaggttgagggagtggaggaggagtgaggcggcaatggcggcaccgcgagtaggttgagggagtggaggaggagggagttgcggcggcgacgacgcacgcgagggaaggaggacggagaggctgcggcacgattgaaggtggtgggcaaggcggcgcgcgtgggaagaagaggacgggcggctagggtttgtacgggctggcgaatccagaccatccgtttccaatccaacgatctgacgatggtggaagggtagtcaggctgggacacgtggacggccagatcgaccttagcatgtgatccgacgggccacattaacggggatgtacatgctattagcgaaaagaacaagggattttctgaaaaaaaaacgatgacgtggcgccctaatcctcagccattcccacgattttaagtaaacaaatatatgtcacggttgctactctgtggcacattttcttttttaaaaaaagatccaattaaccagataattcaaagcatcattagaaacatttagaacacataactcatcaaaaaacttgttgaacctgaacaagaattcatcacagagaatcaacactacaatatgaacatgagaatcaccttgccccccagaatcctcacagagaattgacattcagcccgactaccatctcctctctgcgacgctgccacaccaccgtgagccgtgtcatcccttcatcatccaaaccaccactaggcgccacgagcttgaggaaggtggctcaccttagttggatcctagtgaccgtgtagtcaacgtcatcgcagccctcacgctagccatcaccatgccgacgcccacgcccttcgtcagccgaggctcgccactgccgcccattgtcgcatgatatggcggttccaaggccagctcaccgccgtcgccgagtttagccgttgatatatatgccatcccggctatggggagagggagctcccaaggcagtggcgtcggtggatccgctcacctctgctgcacccacggccactgttgtcgctctgggccccaccgccacctgcgccaatcgccgtaaacaggaaaagagggagggaggagggggcaaccaacgtgaggaccgttaacagagataaggagagagttgcaagctggtgacggatatggggaaggaggggaggggaaatgagaattcagggggagtgggcgggtagaagaagtttgagtaagttggagttgattataactagaaatcatatgcaacgacttccaatgttgagcaattatataggagggatacagatgtaacggctcctaaaatagagtcattacagataaggtgcacacatctgtaacggcacacatgagatggctgacatctgtaacagcttatcaagatgagtgctaatccctaatggcccgaatgtcgcccgttacaaatatgtggtatgtaatggcacacttagacccattacagatgactcgttacaatattatactccatctgtttcaggttataagatgttttgactttgtttaaagttaaactatttaaagtttgactaagtttatagtcaaatatagtaatatttataatactaaattagtttaatcaaatcaataattaagtatatttttataataaatttatcttggattaaaaatgttactatttttttctacaaacttagtaaaacttaaagcagtttgactttgaccaaagtgaaaacgtcttataacctgaaacggagggagtatatatacaattgatggataccgattggagaggccattaaattttccattctcacacgatacatttataattttattgtaaaggtaaatgacatgaagaaggtacataacaataacacaagtactacctttgaccaaattattttatttatgatcctagacacatatagaggtagctggcgtgtctaattaatcaggtggcggtataattggcgttgagcttgagtatttgttgttggaaggcgtcgacgtggtcgggcgtaacacagccagacatcaccctagccccttcctttgtgggcatgagcatgaagcagatgggtgtagttttctccagtagagagaagagcatcctctgcgggtaagtcatcaccctcgccgtcttcccgctgccgaaatccacctcctccaacccgatgtttcgccatgatgtcaagtaaagcaagctctcgtatccatccacctgctgcccatcgctgagctcccgtaccatcctgtcgctgccttctccgaactgctccggtatgcgctccttggctcgccgtatgatctccacaacgtccatgatgtcgccgttcgccaccgcgccgctcttcgccatggccatgtgcatcatgctgcagttcccgtagtagccgtcgttgacgcctgctaggtactttcgtgcgttcactacgaagactagtatggcgggagcctctggactcgccatcaccgctcgtgtacggcacttccaaagcacggcggcgactgcctcgaacgccgtgatggtgggggtggagtgctgcccaccatcgtcgttggttcgtcgtcctcggaatcgtcggatgtggttgatcaagcttgtcgggacggtgacgttgttgaaggtgaggtctaatggcttggaggccgggtaaaacctggaaaagggccttggggaagggaggtccaacttgggttgcgacaatgtcgtcttgcctgaccgggacgatggacggcgagggcagcccacgggcaagctcgccgacggcttgtatgaactgtgctatgccgacaccgtcagccaggccatggctccatgtcaccccgacgacgaagcctccacaggatagcgtggtcacctgcacccacagcagaggaggagggccgtcgtcgccgacgtcgggcgtgcagttgaaggcgagctgctgcaccaccgccgtctcgtcgtcggtaggttggttgtcggcgacacgcatgagctcctccatggtgcagtcggcggacgcggccacgaacatgactccgagctcgctggtgcagtcgatgtagaaatcgccgccaccgtcttcgtcatcgttgcaggaaagacggccggcgataggatagtagtggacgagtgcttgagcgagagccatcttgatggtgtccgccgtgggctgatggtgatggatgatgggatgctcgaacgcaagcagcactgtcattggcaccatggcaagaggcatctccagtggagagagaacgatcttgctgctggaagtcttcaccggcggctccgatggtcggacgactaccggcgccgacttgctcaccacagtgctcatacttctctatatctagctctaacaataagtcagcatctcgtaagcaaaaatataaacaaaagcatcaacttgttacgtttattgtggtgcaaccaatctactagagtttaagttctagacttaatataagtgttcgtatttatgactaattttttcagtggtaggcggcgtatccgtccataagaattaacgagacgtcttagttactttgtcaatctttatatatgtcggtatagatttttgaaattgctcgtaaggatagagtgtgattgtgtgtgttaatagagagaagtgtatgcacattgtggacgtatagatttgtactctatttaaaaaaaattatatgaacaaaatcatcgtaccagtagacagtagttgactcttgcctcacttcagttacgaaccagctgctgttgcctgacgagggagtggagcaatgccgagacggtatgagctatgatccccttttaaaggagccccatcttacccctaaccattaatacgtaattctttttctaatttaaaatatgtattttcatggttcaattaaaaaattaatagcttgaaaggagaggagcattacacgtaacatgcatgccaaattaatcatgcacggcgggaattaattagggaactagttattccacgtcatgcatgtttttcagaaagatagcttttcatgtcattttaaattctcataatttagtgtaaggtgggtgcaatttagtgtaaggtgggtgcacaaacttgtaaggtgggtgcaatttagtgtaaaaacttgaaaaactctcgtttcggtacacaaacttgcgtagtgcgtgcgaaccaagggcaagacatgacttcatcaccaatcttattgagttggcttgtgattaggatgccacattggcgcatacacacgttatgggggcgtgagttggctacacatatttgcaaataacccctcatacatcttccgattcctccaaatcttcttttgtgttgtagcccacgatgatgcccatgctagagatcagttttacgatagcctaccgccaattgagttagcaacaaaaggagataaatcaggagattgatatttggatcaaggtggaaggccgcgaattggatccaggcggtaggactttgctgggagaaaacacgccggccacgtttagggcagcggtggcagtacgttgccgccggcgctgaggcaacatggtgccagggctgcgaagtgaaggtgcacgatctcctgtatacagtgagtactttagtttatcatggtcaaaaatgagattgtctttctcaattccaatttttatggagatttcttcctcttattgtcgatttattaggtattgcaaacgagaaggactatcagttgttttaatttatgccaagagctagttcatggtacacaaaagctataatttttgttgacatttatggtatagaagtgatcatggcaaatttgtatttttggagagcaatttgatcattaatgtactgctagcttctgttgttaactatgctttcttcctggatatacccttaaacatctgaacctaaagtaaactattctgaagatgaataattatctgtacacaatatatgtagattccaaagatgaagaattcagcattgagatgcaccacggaggcttttttatgggaaatggtgtaaaccgggcttatgttgatggtagagtaagctggtttgaccattgtgagtcagattcttggtcactgttgtgggttgatgatttcattgaagaattaggatatgagaaatctgataacaccaaaatttactggttgcttcctggcaaacaattaaatgatgggttgaggagggttaagtgtgatgcagacactaatagtatggtcgctcttgtacctagggtccgatcatttgttttgtatgcagatcatcaagacatagtcgacgctattgacttagatgatgtggcaattattggttcagatcctttgcgtactgctgtgaaaccaagtaaaataattagggctaagagtgatggtggggagttgattgtagataaacgtgctaccgacgctaaaattgatgatgaagaggagtcaagaactgaagatctagattttgttgatagtgattatgagattgatcatggggatgatgacttgtttgataattgtgttgaagggcaaattgagttagcacataataaagaggagggttcagactatggttcatctgaagatgaaaggttgatgatgccagatatttctgaagaagaagaagaagaagaagaaatcaagttcagttttaagagttttagggctgatgtagacatggagacacctgagttcaaggttagcatgatgtttgcagatgctgtagagcttaggaaagcaatagatcaatatactataaagaaccgagttgctattaagaagacacggaataccaaaacaagaattgaagctaagtgtgctgaaggttgtccatggatgttgtctgcatctatggataatagagtcaaatgcttagtggtaagggaatatatanataancnngccctgcttggttctttnggagatcaaggccgtcacagctaagtatcttacaaaaaggtacattgaggaatttagagataatgacaaaatgacactgatgagctttgctaagaaaattctgacggaactacacttaacaccatctaggctcatgctaggtagagctagaaggatggctatgagggccatatatggagatgaaatatctcagtacaaccaattatggcactatggacaagaattgagaacctctaacccaaggagctcattctacctgaacctactttttggttgcttccatactttgtatatgacattcaatgcttgcaagaaagggttttttgtctgggcgtagacctatcatatggctcgctggatgccatataaaacaaaatctggtggccatatcctaactgctgttggtatggacccaaatgactgcatttttcccattcgcaattgtagtagttgaagttgagagcttgaaaagctggagttggtttcttgacactctaaaaaaagaccttgccattgagaatacatctgcatggacagtgatgactgatacgcagaaggtataacttcgtctgatttttcataatatacataacttacattttagttcctaactataattctttataattcgtttccaggggcttgttccagctgtgagaagggagttttctcatgctg

SEQ ID NO: 12510 - DNA, 1227 bp, Oryza sativa
gaacggacatccggatatgctgtaagttaggcacgtgagtcatgctggccacatgagatacacttgcaataaaccaactctagcaccttccatcggtgttcgagagataattccgctcgctcactggttctcgcaccagtacgcagcaatctctcgcaccgcaccttccatcggtgttcgagagataattccgcttgctcactggttcccgcaccagtacgcatcaatctctcgcaccgcaccttccatcggtgttcgagagataattctgctcgctcactggttctcgcaccagtacgcaccaatctctcgcaccgcaactcccatcgttgttcgagagataattctgctcactcactggttctcgcaccagtacgcagcaatctctcgcaccgcaacttcagatggtcgaggtacgactacagcaataacgtagtggtcctcgtaccacgactcaaaatgatcgagagacacctactcaccggttctcaaccagttaatcgtagtgatctctcgtacatttgcttctagtggtcgagttacgactactgcctggtcctcgaccagcgatgtagcgtttctcccactttccactttaagtggtcgagttacgactactgcctggtccacgaccatttctcccactttccactttaagtggtggagttacgactactgcctggtcctcgaccagcgatgtagcatttctcccactttccattttaagtggtcgagttacgactactgcttggttctcgaccagcgatgtagcgtctctcccactacttccactttaagtggtcgagttacgactactgcctggtcctcgaccagcgatgtaacgtctctcccactatttccactttacgtggtcgagttacgactactgcctagtcctcgactagcagtgtagcgactctcctactacctctatttcaacaaagttgatagcaggtacacaatatcgccaagtgttttacccagagatcccttaccacgacgacctagcgttgaaacctatcctactgtccctttacgccgtcttgacaaggcctccgaggaacctaagggatcttccgttggggatgcccagagccgataaggccttgtcggatccttcagagacgaaagaccatgtaagatctggtcgtgtaagagttctcgccgtgcgtattaaccaagccgtgtaatcggaagttgacttttccaacttcacggctgggggct

SEQ ID NO: 12511 - DNA, 699 bp, Oryza sativa
tgacgcggcggagctgaggaggaaggggtccttcttcaactggtacaccttcatgatcaacagcgggtcgctcctggcgtccacggtgctggtctggctgcaggacaatgtgggctgggggatcagcttcgtgatcgtcgtcgtggtcatggccttcttcctcgccgtcttcttcgccggctcgagggtttacaggtacaggccggtcagggggagcccactcaccggtgtctgccaggtggtggtcgccgccgtcaggaaatggcatttggagttgccggatgatagctcgcttctgtatgaggctcaagtcgcagatcaccggattaagcatactgatcaattcaggtattcctttgttttattattggtcaaaatatgatttatttgagcatcaacgtgtgatggatttgagtcaaaagtcttgaaataattaaatagaaattatagcctgctcatatttctttatcggcttaaattttttgatataattggttactgggtacatttacagtactgctaatactccctccgtttcaaaatgtttgataccgttgactttttagcacatgtttcaccgttcgtcttattaaaaaaaattgtgaaatatataaaactatatgtgtacatgaaagtatatttaacaatgaatcaaatgatatgaaaagaataaataattacttaaattttttgaataag

SEQ ID NO: 12512 - DNA, 3681 bp, Oryza sativa
agtttttttactttttcatttattaatctttaacagtgtcaaataagcttcactagtttttaagcaattaaaaccggtgaaaagggtttgaatgacaaataaaaaatttacatttaagtcccttaacgccttctggaaagggaatttttagaaaacgatctcccagagggcgtgaggcatctagatttgtaaatttcgaaacgaaaatctgttttgtaaatattttaataaaaaaatgtaaaaataggaaaaagaagttaaaagatcaagcctgtaggatcgtaaagggcatttcccacccaaaaagccattgaggtgaggggctccccgacttatatcttaggtcctttacccttctacaaccaatacctttgattttacaaagcctaccagaataccataataaacgttccctccgttacatacatatgagaagttattttaggtttgttctatgtcaaggtttcctaactttaagcgagtttattgaaaaaaaaatacaacactatggatttcagtgaaattaatttgattttgtaattcaattcactggcacataaaacattttgtgatggcgatccataacttatttatataggcattgtttgaaccgcttaatatttgcatagacggatcctagaaccgcttaatatttcacatgcaactcccttaaggaaccaatttgtagttttttatttttgtaggcataaaataatctgaaaaaatatgtacaagtgcgtatataggatttgatccagaactctttcttcttgcttagcctcttaccatctcacctatgaagcacttcgtgaatgtggattggatgctatcttttaacttcacctctccaaaacttggcacattattatactctaaatgatattaaatacaaaggttcttaactacaaacctgtaaatcccgtcgacttctacaactatcatatcgatcatattttcaattgaggtaatttgaaaaactcaaaaaaaaaatcaaaatagatctgagagcatgtaagaaatattaacatctcaaatgaaaaacgttcaactaaaatgttgaagatctcttcaagagatacaaatttggttacaaagtttatcatcattcaacttcatataagttatgatttttttcactttagtagtgcctccattttcagtggcagttttttttaagagatccgcatatgaaattatttcataggtagctctctaagaagtctgccaataaaatcattaaagagtgttttttcaagaagtccgcttataaaactgtttttcttgtcatttatagaaagtccattttaacttcgatagaggtgaaccattttaacttagatggaggtgaaacatatatgcagtaatagatatacataacacagaactgagttaaacactacatatacaatagtgattagacaatcttgtgttacacagaagttgcttctctgctttcaaatacagagaacataaatgagagatagatgcttgaaatcaatctatttcaaatgaaagtacattgatttataaaacaggttacacatatataacacaagataaatatattgcttattaaacctaatctcttccagtcgtcgatctataggttagagagttctttgtggctagattggataaaagctctgcactgctacttgagctgttgtcatcaaagctcttagggagttcatctatactattctcctcaaagaactgttgacgacttatgttgtagttttcttgtttaagcttcctagatcttcgcagcatcataagtcgtgccactacctccttcatatcaggacgctcgtcaatcttttcgtttaaacattccatcgctaacctaccaatttcttctaggattaagacatcttcctcgatggcaatatccttgtcgaacaataacctcccactatttgcttgatcatatgcctcttggaactcaataatgaggctgcggttcttgccatatattgtttgccttctgctgatgagctccagcaatacaactccaaaactaaacacatcacttttttgtgttaagtgaccagtcatatagaacactgggtctatgtaccccatgcttcctgccacaaccatggtgaattctttgtctacagtaagaagcttggatgtcccaaagtcggagatctttgcaacaaacttgtcagttagaagtatgttggcgggcttaacatcaccatgccgtatggtatgacttatggacgagtgcatgtatcttagaccttctgcagattcaattgcaatgtctaggcgtagatctagtgtgagagggactaggtgactggcatcactatggagaatgtcttttaggctaccattagcggcaaactcatataccaacattggaacatccatctccaaacaacagcccaatagcttgataatgttattgtgcatcattcgcgattgtatgataacttcgtttgtgaaatcctccttttgagcttcagttacctcaattgaagtcgtcactgctaccagggtattgtctttaagtctacctttgtagaccttaccaaagcctccttgaccaataacttctgaattgttttttaggattttcttcatctcatctttggagaaaatcacaatattgtccacattctgtagtattgaaccaccattctttttgaaatattcgttcatttttctcctttgaagcatcattagtgtgaaaagaacaacaacaaccaggaaggaaaatcccaaactgacacctagaaggatcacaaattcatgtgagctaatataataaattcatgattttgtattactccctccatcccaaactataaggtacactaacacaaagactaataaataatttaattactcccttggttggaccacctcaatgcatgcaagtaatgtgattattggggggggggggaggggagatgggtgttgagggtagaggatttaaaacaaagtgaatttagaggagaaagaggttctagttaatatatgcatgtatacacgccttatattacgagatatgaagaaattgggttgtgccttatggtttgagatggagggagttgattttgtgacaatagaaagagaggcgaattctcactttcatgaacataactatcaactattgttgtattaatattatatatgtacattggacatgttatattagaattattttaatctataacaacataatagcatctgcatgcactttcctaccctaattttggctccttaaaactagaaatccaaacttcttttttgagaagctggaaatccaaacttgaaacaaagtagttgagtgtacgctgtgtaccttcttctattttacactaggtactaggtgtttagtgattgcactcaacgtaaagtcaaagtatgcatgaaaataaatcagtgtaaaattaattcaatttactcaaaatagtatacacggaggtacataaatagtcgcataccaagggcaagctgtgctgcaactggaaactttggattgcactcctgtttctttggaccaccaccacttggctggtaaccagtatgacagctgcattcgtaatctcctacaatgttcttgcaaaccccatagcaggggtacttgtccttgttggatggatcgcactcgttgatatctgcatacatgggtgcatataaactattcattggccggttcattcgaag

SEQ ID NO: 12513 - DNA, 2683 bp, Oryza sativa
atcctccggttcaactccattttgagatccgacctccggaatcggtactcctccttgtcgacgaggaaggcatagtcgcaggggctgaagtccacctgttcgccgcgcggccattgctcgaagtagacgacgttgtcggtgagctccggcgggatgtcgacgtggcagcagccgacgccggcgcacttgccgtccatggcgctccgcgagtcgctgcagtaggtgacacagccggcgtagtagaggttgcggtagaggcctttgccaccgctgtccccgtgctggttccacgccacggtgttgcagccgatgacgacgaacatgttgcgctcgtcggagatgcggtacacgccctcgttgttgagctccacgtcgccgtcgaactgcctggtgacgttgccgccggagttgtagcacgtgtacgccaccggcagcatcaccttcacctccggccgcgggaacaccgtcagcttctggacctggatggcatggcggcgggcggcggcgagggtgggcactaggacaccggtgctgttggtggtgttgcaggcgatgtcgaagccgtccccgcgggagcagttggggccgatgccgaatggataagggatatcgacgtcgccgcacctatccgggcagccggtgattccgtcggcggcgaaagcgaaacggagaagaagcagcaggccgccggcggcaattagccagaacgccattcaacttctgtgcaacagctacctcttcccgcgcatatttatatttcaattggatcgacgacgatatgatccagtcaaggaatatatatatatatatggagagcagaaatcaacgatctgtcacttgctactaaaataactccatttctagaatttagttcgtctaccctttgtactaagataaatttattatttccatactctttaccaatccacccaataatactgctttggtactgatgaatgactctttaatcttttttccactatatttgttttgagcgtccaacactaagataaatttatttttggcacggaggaaatatgaatttaattttgcttacatagtgataagagtaagcggccaatatatataatcaaggaaaattaatgcagatataatatattggtactttttcctatgtccattataattggttttcgtctcttatagtttgtatagtttgtgttagaggacgtactcgtagatatatgagtatggtgttgcgtgtaataaaaaaagagagagagagactgaaaataccttgtatagtgtgtggagcacctagcatatatattgcacctggttaaatctttgaacttatgcgttttacataacactccccgctttttagatcataagtcgttttgactttggtcaaaatcaaactgctccaagtttatataaaaaaatagttatattttcaacccaagataaatataatacgaaaatatattcaattattgatttaataaaactagtgtggtgttgtaaatatatataactagatttgtctataaagttagtcaaatatgaagtagtttgactttataccaaagtcaaaatggcttataatatgaaacagagggagtagttgtaaacccactctttgcttcaactgagttaaacttcagccacttagttcttggatcaaagtccaagtaaagtataacaaaataaaagaaagggagacaaaaagatgacaaaaaccaacacaccaacaccaatcacaagaaatgaacatctaattcaaagttcaagtctattgctaaatcgttatacaaagttggtgaaaatctgcatgacaattaactctaaatttctacattcggtgtgcatggcttccttgtcctcttcacatctttgtagcttgatccagaatcgaagccaatatattgatctgaataatacctacatataccattttgttggagttatgttaaaagccatgtcatttctattaagccattaagcctaacataatgcaaatgcaccaattaaaatatatttcttggtttttgacttcatgccaacaggccggttcccaaaatgtgagagacattacagggacttcgcaaaccaaaggaaatgaagactgctctgcatagaaatttagcaaaatgacatttaaagaatagatgttagatagtttcattatacataaaaaacaacagtttgtactaccattccgatttctttttgctaaattatctttagtcaacacaactcctttgattaaatagcaaataaaaatcttcacttttataggcatctttaattttcataacaccttattcctatccactttcccattacacctgtcactacttggcaatacaataatacaattagtattactaattttgcttacgtagtgataattaagaggcagtactggccagtacgatatatcgagcaaaatgtggatatgattagattggtacccgtttcttgtgtacatgcatattgtccattaattaatatatcaaagagagaaattggagtaccttttatagtttaaatttgtgtggacaaacctagctagcactagcagattgcaccatcctcaaatcgtcaaactcaaacgttgaacttcttgtatccttagccagcacaacattcacacgtactgatccattttcttatagtgtgccctgcctgcttagcaacattatactccctccgtttc

SEQ ID NO: 12514 - DNA, 2429 bp, Oryza sativa
acgaaacggagggagtattaacatagcatgtatcatccatcgatcatacactacttaaaaaaaggtttttcctgccggccaaaacatgttttcgctgacggctggctgtgccgccagtgtcgccagtgaaaataagtcatttgtgctggcggacagccgaccgccagaaaaaatcagttatcgctggcggcaaagttaagtcggccgccagcgaaaatcggccaagctaagatagccaccagcaaaagtcagtttttgctggcggcagagttaagagacctgacagcgaatatatttttggagcaaattttttttttttgaaaatttggatccataacaacctgcagaaaatcacaaattcgaaattattgtccccaaatcctaaatcattgtcccaaatccccaatcacagttcacatttagctgcagaagtaaatcacagtcacaatcccaaaacaacaacaggttgccatcggtgagggagccaagttgccgtcgtcgagctcccgctcaaggcagcccagggccgccgtcgtggtcgccgcgcggtcgctgttgtcgctgcccgccgaagcccgcccgcgagaccaccgccgccgccatcgtcgccacccgccgaagcccacgcccgagccgaagcgcgtgcacgcgaccaccaccgcctgccgaagcccgcaccctcaccacgttgaatccgtcgtccgcgccactcccgccgcccgagcacttcccgctgctgtctggcggacagatccgacgcccgcgcctctcccgcgaccggatttgccgcctgcggccctctggcggccggatttgccgccggcgcctctctcgcgccggtcgatgcggcagctcgacgaggaggaaggaggaaggagactcgccagatctggagggcaaggggaggccgcaccatccacggtcagctccgcgccccgtgcaccatgtgcgtatcgctggcgtcgccgtcgcaggctgccggctgccgagaggagggggagaggcgtgggtgtgggaatggggaagaggcgcgggcgtggaggaggaggaggcacggtgcagtgctgagacttgagagagagagagagagaaaatatcgatggggacgcgtttatattatcatgtggctaactttcctggcggtcctctttagcagcagcaagcgaaaataactttatttttacaatcggacctcttaactaaacgctagtgaagattctccatttttgttggcggtggtttaagtggttcgccagtgaaaataaagatatctcgctggcggcccgtctaacgctgccgtcagtgaagatccattttcactggcgataagtgcccctcacccccctcattatgtacttgttggcggttttcgtattttttccgccagcgaaaatcatagggcaacgccatgaaaaatcttttttctagtagtgatacaacagatcaacttcaaaaattaatttattcaaaatgaagaatatataataaacaaattcggtgatgcatcgtgaattcgtgatagtactatttatttcaaatttgtgtttttggttatatgatgtgtagattgaaattaatgttattacgtgtttgtggagacattgtaatgtatgctatttttttttaaaaaaaaaatcgtcaccaccattggatgacgtatggcatatttggcaatgtaaatatatgcgcaacagctgcaattccacacaactgttgctgacggcagtggtatacgtactacgtacgtcctttatgattggcacaaattgcatgaaaactattggtaaatatgccaaaatttcaatgtacggttgtgccgtcccaatcatatcgaaaatatcagaacagaatgcacgacccggccgaacttgtggtgcatagtttgtgacgtcaaccttcgagtgtaatgaaataatctccgacatcaatgttgtacagtggttgaaacatatattgtcggtcagtcatcaaaactaaagcacacgagatgaatctgatatcttggatgtgtatcatatgttgcaacgttgacctaagagcatgtctaataggccaacctagctggactggcgatagcgttgggaatggtagagagagaccacgagtcgacgatagaattatcaccggctgtagcacgcggtgcaatgaagaaagagaaataagcctgatggagattggttcgtgcttggaacaatagtaaataatgtagtaattagtaggacccatatcaattaaaatatatattagctgttaccacaaatgatagtaataaagaccattgttatatgagcagcctatagtaacgggctatagacgatgtggttgttttatagctagcaaattgacgatattattaaacctgctctaactaaggttaattttgttccgttaatccctaaaggaaggtctagaaaaggattaaaggtaat

SEQ ID NO: 12515 - DNA, 7378 bp, Oryza sativa
cttaatttttgaggattttactttaaaaaaatatgctccaatagatttcctattcagatgctaaacttgtggagtttctatcctgtaatattcgctctcaatactgaggctgagtgagggctcctctcctattcccaatcctacgctcccgcgtcttctcagcctgcgaggagtgaaaaatcatctttttcgcgtggctatgtcaaggcgtctccaaccaccgccgctgactcgatctggtcagatcgagcgccctccgtccaggtctccactgctagcatggagcctcatctcgtcggccctctcatccatgtccactgggcctgcgccgatctggacccacctttttccctaacgtcacgctagcctcctccgcctcgtctcttgattttcaccgccgcctgggctgctactaccttcgtctgcaggccttcaccccgccgccgaggggacggcgcctcctcgccgtcggccggggaacacgccttcttcctcgtcactactggtcgagacccaccgcatacagtcgtcaccatcaaattgactccgccgccagcaaccatgtccccttcgctgcctcactcctagtggcaagcactccaggctagacacctcaagcgaacaggcctcctgccgtcctgcctcgttggttcctatgctatgagaccttttctttctctgtttatctggtaggaatgaggaggaagagagggtctagcagcctagcagggtgagaactgagaaggggttgacctgtttgtgtggttatgctagcttggaacctcctatgcgttggacatatatcaaagtattggtactgtatcattttttttcttgctcagagagaattaagtcacccatggtctcactctcatggacctctacacgtccaacaacatcatcggcacgcagcaggacaaataagttgatttcttttggtagctttacatcggactcacttttttgttttagggatttaattttacctaatcttttggaggaataaaaaattttacacattaaatttcatttaggattcccaagattatttttttggatggaatatagaaaaaacttttggtgatgcatatgtgcaagaatgaaagaatacatatcgaaccaacttttaccttgccatgatggatggacgattaagtagaggcaaaatggatagagctttggcaggaaataaacggagaacaacaaatgtgaagaaaccgatgagactggaaaagcgaaagggaagggaaaaaatgaaaagcaaagcaacaattttgtagtgctgtggagcaaggggaaaaaaattaattcagaccctacaaatttacatccaccaataagcaacaagcacctaagcgtctaatggcagaccggcccatcaatcaaccaaacagctgtgtctactcaattgtagcaccgaataaaatcgataatatacactgtagcatatatcattgctagaccaacaccaatggagtagaacacagctcgggcccacaatacagagatgaaggatgtataggcaatgtccaccatataggaacgatatgactgaggagaccaggagtaatctagccaatagcatcttgcatactcttgcagtagtggagtgggcacacagtgctcccactacagacgtggtcttcgaagcacgcattaaaatccacccataaacaaaaaaaaatgttgtcacacaaggacaagggaacggcatggacatattctaccactgtgtgcatcaaacactggctggctgtacacggcaacagcaagagagagccatacaccatgcctacccaaaaacaaagcaacaacttagtattagctacttgtgtttttcgtcgctgcttgcgtgctctttcgtcaaccatccacctgtcaaggtgggccttgctgagtctgtctgccattggtccattgcggtgccgtatcgatgattgccagagccacacgatgatgatcgaacggtgtatgaaccaagcaaccacatgactcgaaacccagccaaaatccagcgccggatgacgtgtcggcacccagcgagggccacgccagggcaaaagccattttgagccgctaatccagctggtttgaagtatttaaataaatgtaccagtctacccacgtggcaagctcttgtataataaaatggtgatgtacggactccataaaattaatgtccatgaagccataaaataggaacgctttaattgtaccagccaccaaacagaaacaaatagataaactttccaataatttttattccttgcaaggcacagccgctttcctagcccatactataccaattactaatattctacggaaagcctctaattacgtgtatgtaatcacatatggaaatcagcaacatgatattttgcgacaatcataattacacatgatcttctctctagcattttataaaatatatatataaacttttattttgagaattacacagtacaatgcagacactcacaacacacactcacccttatgaacgcacgtacgcaaaccctacccctatgagcatcttcacacactcacctctatgaacgcacgtacgcaaaccctactcctattagcattttcgaaaactggaccagcaaatcatggagattgacgaagtcaccataggcgtctcgctgtcaatgagtatgttgcttaccactgaaagcacaatgtcgttaaatcctggaaaattcgctccccatgggagcgaacccaggacataaggtgctactgaggctcttttaaccaataggctagatgccctttcgcaaaatatattgaaaaactaattaacataaaaatcctacaagtaaaaatccaaagttgatgtcaaaatatcaatttccaaatgatataagcaatgttttctagttaaaacatacatttaaaatgctgaaagaatctatatattgaaattagggatgagaagactgctctgaaacatgtggaaactacctatttttgcttccatattttttggaatcagaattggaaattctgaaatccgtccctaaatatttaataccattgacttttttaaacttgtttgaccgttcgtctaattcaaaaacttttgtgaaatatgtaaaactatgtgtacataaaatgatgaggatgtaggtcccgatcttccgataggtattgataaacaacgatttgggcgaagtcgcgacacaactcgatctggcttctgaacgaacacgctattgagccccgcaattgcagcaccacgtctcctctgattatcaaccatgtcgaaacccggttgacctcgccgagaaggctaatccctgcatgcgaatcaaagaacacaagcaagaataagatatattgcaacacaattgcatatgaatgattaagcactcgaatttggggttccacaaaccgatctagcggcgaaactgttcttgacagaattatctaagcaaaacccaactctaaacgatgacggctactgaataaatgtgattagggacgtcctagggttgccctagggcgcgcacccccttgggctaagcccacaacacaattacaaggcccaaaacccaaatcagattcggacatggcttgttttgcaaattcccggcagctcggtaggaattttgacgtgggaccaaaaccatctaaaagtagacttcataagctttccaacaagtacttatgggccccgaaattccttctagatcatttcttgtagaacttcatttcttgtcttctatggaccaaaagtgacgtggtgagatgaaagaagaattggagaaggtcttggtttggtacccaatcaacttcttcaatcatccatgctttccttaagcttggtctcttttctttcgcccaagcaagtacctctgcaaacgaaaacacacaaaactcattgtgtagcaacgtttgttcaaatatataacaagtaaatctaatgtagaacatatgcacctttggtttattaatacataaggtagtcatggttatatccgagctagttgtgtcatcatcataaataaagtatatttaacaatgaatcaaatgacgaattaataattatttaaattttttaaataagacgaatggtcaaatatgtttaaaaaaatcaacggcgtcaaacatttagggatggagtatcaaacacaaacacaaagcaaacatgaatcaaagcgaacatggtaatgaatatttataggaatataaaaccccataaactgagcttcaaaattttgtctaaagcaatagataaaaattccaaaacttagcaactaacgatactacgagaccactttatcataaggaaatatcacagatcacagttgactttgccaagtccaaattttcatcttttgagatagtaaacacttcccttaaaaaaaatctcaaagtgaagaacaccacatctcatactgatatttatagggcagaagtgcacatctcagtatcacatatcacatttataagttattaacaatacaacatctcacggaggacaactggcatttatagagtaggaaatgcgcaacacaaacacagtcattcactgactcacaccacagacttagttcatttccgtttccaataaaaaaaattgaattcgtttcggtgaaattttctggaaagtttttgctttccgacagatagtgcccttcttgtgtctctgttgtcgagaaaaaataaatccaaattcgttttcgatgatttgtgaaaatattctgatagacccttttctttctttttcgaaaacaggtctggcatcaaaacaactttctgaaccattttcaaccaatttcaaatatacacttattgcaattttttatgggaaaagctcaggtattgcaaatttgagaatttaaaatgacatgaaaagctatctttctgaaaaacatgcatgacgtggaataactagttccctaattaattcccgccgtgcatgattaatttggcatgcatgttacgtgtaatgctcctctcctttcaagctattaattttttaagagtaaattgcgtccgtggtacacaaacttgttaggtgggtgcaatttagtgtaaaaacttgaaaaactctcgttttggtgcacaaacttgtataggtgcgtgcggactatgactaaatagaatagcaaatctaattttgctgagttggatgatgagtagaccgccaactaagcattcacgtaagaaggacaggtttgcctgctcgtaagcaatggccctgttttatcagaaaaccccttctattgtttggtatttcgatcatgtataatttttcagtgaaacgaatctgagaggtgttcatagcggcggggagctggggaggtcgaatccgcggtggctgtagtgatgggggtcgagcccgatagctacgtcgtggggggagtcgagtccgacggtggctacaatgggtaggtcaagtttgacggcagtggctgcaacagtattgccgagactgacgatagtgacagatggcgaggaggtcaagtttagtgggagagcttagaagttgatgctgcggtaggcatttgagtggcttgctttaggccaacatcggttatctcagactctgacaattcatatagcaactttgaagcctagctccaatgcttcagtgcagacattgaagcagcaaggaattaagccattgtgccgtcagattaacagcatgaacattaaatccactgaagcaacaaggatgtaatgcttaattgtacacattgtgacaaaatctgaacacaatgaaacacgtgagtgcatattttgaacagaaactgagatcctgaataaaattcagtgaatagcctgaatgaaaactaaatgcataacttgacatgaatttgattgtgcactagtaatgtagctcaaaatcgataacatggaaccaactttatgaatgcatagtataaactactgtttctttttcttgggagagtttttcttcttgggtgctgcacttctcttcctcaatgtggccctgccttgtttggttgatgtggttagtggtggttgaaccccttctctcctattagtagcaatgaaagcagactctagcactgctcctggattcaccctttcttgatggttgctagcagcctgtaaaagattatgtactaattttatgatggttgctattagctgacaaaatgctagcttaatgaaggattgttttttctttgagaacttaatgaaggattgtcacctccttaataaaagcttccaccacagatgaactcagatagttagaattttgttggggtatgctaagcaggtgcatttcctgaaacaaatatatgttatgtttaaaattccttgttagtgcagctaaacatatacacaagcaaaatgagcatcaatagtacctgagtgatgacaggttcctaaaacaaatatacaatgagtttaaaattcatagttagtggagataaacaaatacacaagcaaaataagtataaatattacccgagtgatgacaagctcttctgaatcaacaattgatgaagtcgccatttgctgcataggttgcttctgaagttttaagtcagccttcctctgtttacaactagttttgttgtgaccaccatttttgcagtagctacaatgcatctctactccatgctttgaaattttagtcccaccctctagttcttggggctattttctcctagttttctttggcctccccactttcttctcatatactggtggcttcacctctataccctgcatcttctcccagtggatactatctctcagtggcattatgttgtagctataagcttgttcatagcacctggttgaatagcaaaatgacactacatcctctggcttgattctttcatgtcttagacagaaaatggcatggttacaaggaatcccagtgagctgccacctcctgcaatcacatctctttacattaagttcaacaatgtattgagatcctctgtcgctaacctgaaatgctcccatcccagcaggcaaaacatagcatgtattagccatctctgtatttttctcgaccttccgttttatttttgggcagaggccacatggccaattcctttctagttctttttgcttggtgtacaacctgttcatgatctgatttctaatcctctcaagcatagacaaaataggcatctccctggcatcaagaatgtacttgttaaacacttctgagttattgttaagaaggatatcacacttcggaaagtcactgaaaaaggctcgacaccattggtttggaggaatttcttcaaggtacttataagcttcactacttaatgccttcatcttttccatattggcattccactcgggcacagtgctagatcttgcaatagcccaaagttggttctttagtgtctcccctttatgtaacacttgaaaa

SEQ ID NO: 12516 - DNA, 1600 bp, Oryza sativa
agaaaagaccatctaaaacacatgacgagatagattaagcgacatacctataaaggagtagagtggtggcggttgataagacatataaaaactgttaatagaacaccaaatagaatcgtaatgacgattaaaaggagggacgataagcaggccgtgaagcaaatgaacaaggcggttgccgggacttctagaaagtaaaaaaataaaccccattgataatcatatttgatttttaaaatctcaatgacaataaaaaggagaagcagcgggcgggtgttaacaaccaaatttggttatatcagtatcggagatgaggataagaacaaagcagaatcaaaggtggagattgatttgagaacagagcaagaatcagctggagtccggatcggctacgatcaggatcggctgggtccgagtcagactgggtaagccgatacaaccgattctgacaatacgacttggtgtgcaacatcaggttgagttgatgtgcttcaagatgattgtcgcgcatggatagagtcttgagaaggcaattgtatctattaattaggatattttatgtaaattccttagagatatgtttgggcaaaaatctgccgcaaagacttatggtatcttagagtttgttagagataagagtcgtgtccgatacggacatagtttgtaattttcgggtataaatagatcccgaaccctatgtaatcaattaacacacacgttcaatacaatttcggcgcatcgccaccctttcactttagttttatttcgacgagttcttgctttcgggttgagctgcatcggttttgatctttaacaagaggtaaaacttgttatgacggcttgcgttcttgggattagtgcttccatctttatgacactctaatcttgtttatgtaattcgtcgagttatcatatatcttatataatctttggcaatctcgctatctaacctacaatcggctaacatctatcgatagagggcaaccaattaggttagacatcgatgttgacttagattatatgagatatctaccactctatgaaacttccagcggcttgattgtctagatattgttcttcttttcatacttaatgttgcatcagttgagtttgatctattaagtcgtgcttagaatatcaatctctagcctgccttcttgacggagcgtggggctcctcaccgggagaccgcgcaggcccccctttgccggttcggccgggggccctgggtgaggttctaagctcttggtttgtggaaagttcgcgagagtggaaacacacaagacacgggcgatgtatacaggttcgggccgctgagaagcgtaataccctactcctgtgttttggtggatctgtgtatgaagaagctacaaagtgccagccagcccccgatcgttctgggatcgttcttctctccaaaaatcatccatcccttctaagtgggcaaggtcctccttttatacctcaaggggataccacatgcaccatctctttcttttttggggggactcatcctctcttccctccaacttgacttctcttcattaatggacggagatttgtatggctgccgtccgaatgaccttctgatgggaaggcc

SEQ ID NO: 12517 - DNA, 8252 bp, Oryza sativa
aaaccctccccgcacctcctccgtccgtttccgcctctcgccgcccttcctcctcgctagattcgagcccgcgacgtcgctctctctctccgccgtcgccgccgagctccggtccgccgccgtcgtcgccccggaccgcctcctacctcggcgccgcctccttcggcttcgccgcatcctcgccgacctcgtccacctctccgtttcagtcgccgaccgccggaacgccgtcgaccccgtcgacccgagccgcgccgccgcctccctctgctccgaccgccccctccgtcgccgtcgtcgccccggggtgagccgtggaccgtcgcctcctttcccccttccctcccctctctcggccgccgttccgctgcgccggtggtcgccggcggcgaccatcggggcgcgggcgcgccgcctcccaccgaccgcgccggcgtggccgccctcgtgcgcgccgagtggctgccgcgtggggcccagccgtcagcagcccgcgccctcgggtgcggctaacgtgtggggcccacggcgccggccggtgcgagccgggtgcgcccggtccaccgtgaaccgtgaggctgccgcgtgggccccactcccgtggacccggtccgcgcgcccctccccctcggctgacgcaataaaccctttttaaattacaatttaaatgaagaaattcgcgaatattcatttaaagagcatataaacttcagatggccataacttggccatttgaactcgaaattggaccgttcaagtctctaatttttccttaagaagtcaagaacccatttttgtactttgttcctgcttgttatatggagtttattagagtaaaagccttttcttttccattggttgtgtagacgctgcagcttcggaagatccactcttcgtggaggttgaagccgacgtttgggaaagcgagcaaggcaagtcacatcatccttgagcatattgaatcccagtttataaaattattttgatttaaattattgcattatcactttacttaaattcccgcgttatcactgttttatttagccatacctatttacctttgttatgaccttattattattgttattgatattattaccttgttcaccctagattaaacaaaaccccaactagtggacactctactcatggtaccactagtatgatgttaggtagatgcttcgctggttaattaggcaacattaggtggttttacaactctagactttgggaatattctcatcacctggacactatgaaatggatggattattgtggaattggattcacacctccccctctattcaaaaccctcaaaatggttttaggctgggctcggggtgcatggttttgatagtagcacctcggccatataaggaccggtcttcgggcctctgttgcaaagcactaccgtacttccacatgtctagtgggtaaggcttagtttgtggctcagtctggttataaacaaaagtacacggatggagatggacgaagtcgggggtcgatggacatctctaggacaaatgaaggctacacgagctgcggcccggtagtcgagatgtcatggcacagggccggtgtcctgctgctaggggctcagtcctgcctacctgtcccgggggttccggccgtaggtggggttgggttggtactcttgtctatggctaggatgggttggaaactatgtcacgtcttccgtccgtataccgtggtggtatgtggcacgtggttacatgttaggaagatgtgtcttgtgggtaaagatgtacacctctgatcagagtataatctattcgaatacccgcgcccttggttatggccaagccgagcaatgtacccaagttagtgtttttaattcttaaaacctgcttaacaactaaaatgtggaatggttggcctgggttggcttgggacgagctgggacccagggtcgggttgccagttcggtctgaatcatcgtaggccttgggttaaggcaggttcgtgtgggttcacggccttgattaataatattgtatagctctaggactgtatttacaaaatagctttgagcaactaagtgtcttttaatgctgtttactgcaaaccctaaccctttatattttaacccccttgtactcccttgcattgattctgcacttatgggtgtgtcttgttgagtacggtggttgtactcagtcttgctcaattttgcccaaacccaaaagaggagcccctggaagatgaaggctttggtgtctagctcatgcctgccgtcaagcgcctgtggtcgtcgccctagtcttccgctgtttttcgtttgtcttcttgtgtgctgggtcttcgctgcccatgtaataaattaattaattacgcttccgcttgttaaactctgaattgtatcaacttttggtgtaccttgcctcttgggacaaggaataatgcacgcacgtaaggaacgcccgttgggttatttccggtcgtgacaatggtcaatgaaaaattgtagtctattagcttcaattgtagaaaatatatcaacatcaatttgatcacttaatcgaccataacatgtcaaaggatttggttcatttagtctatagtgcatcatatatctataatattctggcattgtgacgtattttcttccaactccgtcataattattatatttaatgccaagatggaatccgcgttcaccatatgggaataataaagggtactgcaaggccatataagatgggtgcaatggagaaatctggtgcagtccatggtttttatcatacacaagcatatcaaatttgtattcttttgcagaaaattcacctactattattccacgatttcaccacttgttggtaggttatactgaacatcgtcttttgcgttgcaacctaaacggcgaagggttatttgctgatcaccatgttcagaaagacgttctttagcatatctgaagttttggacaagggcattctcagcatcaaacatcaatgacagggcagcaagtatttcagaatctgctttatctacattatcaccatcattttcaaatatatttagcctgttttgtatttcattttctgaatcatagatgtataattgagcgaatttcggaggtgaaccacgagatcgcacaagagtaccaattcggtggtgcacaactccattgatcttgaaaacataaggtgcattcccagtattaatcgatttgtcaacagtagcacccattgaagtgaaaacaaacattgagttatataatcgtatttgtctcaaaaatctttttgatcgtgcatcaccattaaagtttaataatgttgcaagtggttcaggaggaggacgtaacttaggtaattgtatttgaccacctttgcaacatagattgtaaactatttttcttttcgtgatagcagaagtgcttttgactctttcttggtaccaaaacatggcaccacaatatgggcattcatatgttggaggaccgtagtatgatctgtctgggtacaatgctgcaatgcgtgtattgaagaatgtcagaaagttttttttcggaacaaaaatagtatagtttgtatttagtatagtgtgcaaaccctttagtgatagaatatattctttatcggcccgtgatgaactaccgatgctcttagtgttgatagctgcagtgtacaaatataggggaaatgatgaacccagatacgaagaataacacgatccacatctaagaaaattgaaatagcataccatgtctacggccttcagtcggcgacgaaggtatttttgaacgcaagaagcaacgcctttgtctatttaatttagtcaattcaggtgtaaaatccatgagtgatctcttacggtcactttgttcactcgcttgatttggtatgattatagcatgttctatatgcatcgcaggttgccgagaaagaatatttgcaactcgtctttgccggctagcacgaactctgcgtactctattggtactttcttcattcatttgtgaaaacatttcacacatacagattgaaggaattgagggaaaaaaatacaggccccaacttaaatcaagagataaaataacacatggtccgttgttccatattacattatagatgttcatgatattaagttaagcatagctgcagtcttgcaaaagggcctatatggatttaaagtacgtacacataggaacaataaaaaaactacaatgatatgaatccgagcttactattgtcaataaaataactaaactatattgaacaacatgcgcaagtgatatcgttagaaagtgattgtctgtatgatcggcatgatttaaaccgtcaaatacaacctagaagcagattaaagggcagatcatcctaactttctgtgcactaccattgactgaaaactataatcgtgcactacaaaatcatatagtcagtagctacaggctcgtgcgtagtttcaatgagatctgtcgtttcaccaaaaaaaataatggctacaactcaactgggacaacaatggatggaacaagtagttctatggctacaagcaacctatcatcataatgaaattcccaaagaaaagaaggggtcagaagcatgagctgtcgtacagcaatattcagtagggaaacatgagagacatctatggctaactacaaaggaagaaagatggccatggaaagttggaaacataagctttgaccatatatctaatgacgaaataccgaggagaaggtaagaagtatgtatatataagaaggcgacatactatcatcgcaagataaagttgagaagaaagctatgcacacccatcgacttaacagatagtaaaaggaacaaattggtcgttataacaattgtgacaattgtaacttgtagcgtctctcttttgctactaatacccaaaactatagggggaagaagggatcactttcaatatatgcacacagcacagaaccatctaattatataaaaaaatgacaaagctagggaggaactgcagttgcacacacataaacttactggggcacacatataccatataatatcatgcaaagaattaaacaaccagagaaatatagtaatgtataacaataaagaagaagaaaataccttcagcacaaaggcagaccgaactgacaggaaggggaaaaggcagggaaacaagagcaatatcaacccctaattaaacaatagactgaaacagcaagcttcgcagcaaggaaagttaaccaacactatcttgagcgaataaacaaccagagctgcatggtacaaacatcatggttagacactagcaagtttaaatctaacgcgtaacagtagaagaactcctcagagaaatgccagactgaacagaaggatgaactgaaattacctgccaagtattttgtcacatcctgattttcgtcttaggatttataaattatttaataaatcattattagaatttatattaaatgttcattaatttacaagtgaagttaaatgtgagaaataaaatttcctaaatataaagcatggctggatttaatttttattaaattctccatggttaattatactctctggaattttctcggatttttcggagctcaattcctaattttaatcatacaaagaacatttcagtaattatccacatattaaattaatcattaaatggtctgattataatttttttaaatactttgagggtccaagtattttcaagatttttcttgaaattatttgaggaatagaagtatttttaacaattcaaagatcatttcagtgattaatttaattagaaaagtaattaaaattcaccttttccttttcgggccgaattaggaaaagtcctctcactctcggcccagtctcctctcatcctgcagtcctttccctctctttccccaagtctgctttttgtccctcctttaatcagtccttggaagtggaagcccaggagaagtctgttttagatcccctcgctacagtaccttcttcttcctccagccggccggctgccaagcccgagccgccgcctctctccgccaaatccgcctcaatcggtcgccctcgagtccgattgcttgagggtaaatcatctcctccttatcctcttcctttcccctaaggtttcggagatcaaatttgcccggataaaccaaatcgaattcgttttgagtttatctctccaaactaaccctagtttttcccggcttgatttctcgcggttggagtccgatctcttcaatacaagcctataaatagcatctccttggcgtcccctttcgtttgccccaactccagagttccctcgtcgctcgtagcgccgccgccgcgtcgtcttagtcgccgccgctgccggccgtcgtgcagccgcgtcgcgccgccgccagcgccgtggccgacgcctcttttcgccgccgttgggtgcgcacggaggaggagcatcctggccgccccttcgcagccgccgaagaccgccggagcgctgccgtcgacgtcgacccgagccgtgccgccgctagagctcgccgccggccaccattcgtcgtcgtccatcgcgtttgctagtaccggtgagttcgcgtcgtcgtcctctacgtgtagatgcctttagatagccctgccgacctctctatcgccggcgaggtcgtcgccggtgtcgtgccggcgatgatgacgtcagcatgacgtcatatttcctttttccagttttttttccagatgcaaatagattaaaacttcagaaattcataactaattcatcgtaactccaattcaagtggttcaagttgctaaatttttctaaaatcgagatctacatgttaaaaatatccacatatactatttatgcttgttttttactgtttatttggtttttattagtctttttcttcgttttgcgtgttagcttgttgtttccgtcgttgcgaaggttcgtgagtgcgtcggaagtgttcaagaagattaattgaagaccgattattgcaaggcaagtcacaaagatcctaaacacaatcctttgagcatgttgatcctatatttaaattctctatttatttcaactgtgtatttattttcgaatgtcaccggatggtgtgaacctattcctttgttatggccaatttgcattgaatgccctattccttgataccttgggtaataaattgattagcttgaaccttatgtattggtttggttcagctaaatgttatatatataattacttagccatgcttagaaacattagctcactaatgggatgaatcatatatactacattattatttatggttatatttaatgtagctcacgatggttaatcgtgttatgataattaactgataattaaaacttgtcaatggtgggttgtgagcacatggttgtgaaggtcgtgctcatggcaattaaggaccggttcgcgagctactattgtgaaacattaaccgtaccaaccaaaagccagcgtgggcaacggccttatcttttatatagcatgattcattacggggtgctagactgagaagcggcgagaagttcgtgggggtcgctggggagtccattgcctctggttttgagggggagattatgatccaggaatggtgcactgtggtgagttgtgttgtgcgaagggtattgtcacgatttccccctttgaagtgccgtggtggtacttcggggcatggcaacatgtgtggaatcgtgccttgtgggtacagtggtacacctctagccagagtaaaactattcgaatagccgtgcccgcggttatgggcgggttgagcaatgtttttcgtgattagtctcacacctctcaaataattattgatgcaataactggtaataatttgtttagctcctagtttggagttagatctgtacagccgggtatggttgttcaggatggttgggcctgtgcagcattggggtgctgttcagtgttgattaaaattgatgattaattactctactattttacttctcttaaatgtttgctaaatgctgcttttgcaaatgagcctatattatgccatcctttggtatccttgtgcacttgcatatttgctgtgtggcttgttgagtatgtcatatgctcattcttgcaataatcaatcaacctcagttgaagaaaaaggatccagaaggagaagacgtttggcttataccccagttgagctgcctgtgggagtggagctgaagccatcgctagaccgttattccgctgctgttttcttttcttttgtaagtatgtaacgttattattatgatggatttgtatattgaatt

SEQ ID NO: 12518 - DNA, 1462 bp, Oryza sativa
aaagcttacaaatgtcaagaaaaaaatacatccaggaacatggagggctgctattatttgagaagatgaaatcagaccagggacttgcatttaaggtgttcactcaagcagaactagagcaagcaacaaacaagtttgagaaaagccagattcttggacatggaggacatggcacagtgtacaagggaataactaaggataacattacagtggcaattaaaaaatgtgcactaattgatgatagacataagaaggaattcggtaaagaaatgttaatactttcacagattaaccacaagaacattgttaagctactgggttgctgtcttgaggtggatgtcccgatgctagtgtatgagttcattccaaatggaacattatttgatcttattcatggcaagaaccgtactcttcatatccctttcagttctctcctaagaattgttaatgaggcagctgaagggcttgcatttttacattcctacgcaaatccaccaattttgcatggtgacgtgaaaacatccaatatccttcttgatgagaattacatggcaaaggtatcagattttggcgcctccatattagcaccaaatgatgaagcgcagttcgtgacaatggttcaaggaacatgtggatatctggatcctgaatatctacaaacatgccagttgacagagaagagtgatgtgtatagctttggtgtggtcatcttggagatccttactgggcagatgccattgaaacttgaaggttctgagctacagaaaagcttgtcatcaagcttcctattggcaatgaaggagaataatcttgaggccatgctagatagccaaattaaaggtcatgagagcatggaactgctcagtggacttgctgagctagcgaagcaatgcttggacatgtgcagtgagaataggccatcaatgaaagacgtagctgaggagattagcagactaagaaaactttcgaaacatccttggatacagcgtgatagtgagacagagggctatctcagtggaccatcaaccagtaactttgaaattgagcaaagcactgagtacacaaggaaggacgaacaaatgcccataaacccaagcacttcgtattttatccggtgataacaatctgttacaagagctttcctgttttccttattgattcttaacattattctttccaattcactggtggttctatattgcaactgcacaatactttctgttggtataataatttgtcgttgtatatgcccacaacatttttatcatttaccattattaaacgtattctattatagtggccaaaccatatctcctcaggtaatgttgtttaaatattcaacggaagtcttataaagctctcaaaacattgcagaacttggtgtctgctgaagtttatgtttccctttatttcacaaatgcgacatgaatttaatcacaaaaatgacaaggaacttacttgg

SEQ ID NO: 12519 - DNA, 1439 bp, Oryza sativa
actgtttcactatgttctctgtacccgcagggagcgtgagcgtctcgagcattgtgggtccccagcatctctttctctgattccgggacaaagctgtcatcacccccgcgtgcccttgttctgcgccagtacaccttgctgacaggcacgttatccctcacaacccaaccactgtggcgtacaaaattcttggctgcttatgccggggcactaggtcggccgtctgcgtccacctcagttatgatgtgccgaccctctatcttcttcgcggcacctcgttgtccgcgtgccctcttctgtccagcggagggatgacttccactaacctcctcctcgttcccctctgcatccctctccgcgttcccctcctcgttcaagtgctggtttggttcctcgttcccctcttcttcgttccagaactggctgcttcccgatgcgattgtatcgtacagtatttgttcctcatcgcgatcagccatctgttcatagaagaaatatttgctaagcgtaatattaacactatactaatcttgtattaaaactcaaataatcatatatgctaagtctaagtgtcgtgtatttgtacggtagataatcatatatgctaagtttaattaagtttcgaatattacatctctaataatcttatattaaatctctaacactcacatatgctaagtctaattaagtttcgtatattaaacctctaataatcttatatcaaatctctaactatctctaacactcaaatatgctaagtctaataatctaataatctctaacactcacatatgctaactctagtaatctaataatcttatattagaaatctaacaatcttatattatatctctaacaatcacatctttacatcacttgcctgcgcgaattccttcgagggctagctaccacttcggcttgagggacgacgacgacgacgtcttctctgcaacatgcaaaaaaaatgtattagtctaaatgcaaaggaacatataatgtatttcacgttttcaagtatatataatcatatatatatgctaagttcaacaatagtttaattatctcgttcgtacacatttcgctcgcgttcgttctcacacttttagttcaagtgcattcacgttcgttaacgtttcaatcacgttcgttcgtgtttcattcacgttcgttcgcgttcgttcactaacactcacgttcgttcacgtttcagtcacgttcgttcgtgttcgttcacgtttcattcgtgttcgttcacgtttctttaacgtttcgttcgcgttcgttcacgttcgttcgcgtccgttaagcgttcgttcgcgttcgttcaccttcgttcgcgttcgttcacgtttcagtcacgttcgttcgcgttcgttcacgttcgttcacgtttctttaacgtttcgttcgtgttcgttaagcgttcgttcgcgttcgtt

SEQ ID NO: 12520 - DNA, 8550 bp, Oryza sativa
aaactgtaaaccaaacccgatacacaaaaaagggccgctctcacggattcgttcaatcgatgttgacgaaatttgaaggacggatacctggaatggtcggaatcgatttgcaccggctggatgggatcgggactgaaatcggttcagaggcatcagagccaagaggattaggtgccaagaggatgcatgcatcctctgaatgcaggaaggaaacgtgaccgtgccgccgccgttcgtccgttcctcgcctcgcagcctccgcctctccccgtcggccatcggacgccgagccgtcgtcgttgtctgcccgggtcaatccgcggaggatggaggcgtagaccaccgcgaggcaggcgccgaggccccgaccggcgaccgtgtcctcccgcggcgccgtgcctggttgatttccgccctgcccctacccggctactcggcttgcccaaacctggttgattcaagtgtacccttgttactttgtcaccccattatttggttctatcatcctccttaaaacttttaaaacttgaaccgtactataagagttcattgtctctttgattttcatttttataatctttaaaagtttaacgagatcattgtctctttaattttcatttttataatttttaaaagttccgttaaccgctgccactatactcctctgcagcccgcttgctgcctcctctttttattgtaattagggttttaaaaatcaaatataattattatttaggttcattttttattttctagaagttccgtcaactattagtggctacgccactatactcctctacggctcggcttattgaaattttaaaaattgaacatgattattgtcgacgtttgatatcgcgactatggtatttggatggtatggggaccgtcggtatcagggtatatgcgagattgaggtaaaagaaatggagacaagaatttttatacaggttcggaccccttatttgataggtaatagccctacatcctgttggccaaaaccggtgttgctctttattcatctggatcacacaaatacaatatttgggataacctatctagttgtcatcgacttagcggctagataaccgactcgtagtcgatgacagggtagtcttcctcctcaagtacgaattcgtcgagatcatagatggcgtatccctcttgctgacccctgcaggtaccggatggggtacgtctaggctaatctttgatgtcgagatctagcggcgtgtgcatatgttatgtcttgttggtcttgtggctttgtagattgtggtaggtgtgtcctctctcctcctaggggggcttgtatttatacccataagtgtgtccccttgtctaagtagaactagggagataaatatggatacgatcggactaatccttgtcgtttccatgcagaactcttctggtcattccttatccggaactccttctatatacaaggtttgtttccatacaaggcatggtgtgtggtgggccccgccgagcttagtcgattaatattgggtatgtggtatctatgaccctgacaattattattggggtttaatttttactttctataagtcctgccaaccgtcatgactgtgctgcttaatggcctgcccatcgtccctcctcattgagattctatttgaggttttgcttatagtttttagatgtcacatcaaccgccaccactctactcctttatagccctattgcttctcccctcatttgtcatggttgtgttctagatgcacttttttttttgaaattccatatttttcgctctgatatttttttttataaattgtattcctacttggacttttatttttatttttctattttcagaatttattttatttgttatttcgaattttaattaatctcgtcatgtgttctaaatgaacccttctatcaagagtctttatttttattacaaattttagttatttataaagtgtattagtagttgaactcttaatttttttctaattcctgaatttattttattttttatgttaaattttaattaatctcgtattatgtttcatatgggctattatttcaatattccttttctattttcaattttagttgtttcaaaattgtattcctctttgaactgtcttttttatttttcttacaatttcggaatttattatactttttattttgaattttaattaatctcgtatttggttcttatgtgtactatttttctaatattgctatttttaattctgaattttagttattttaaaattgtatttctacttggactctctttttttctctccgattataatgtgggaatttttagcatccacagcaaacgtggtgcttcctttcgaagctgtctcaataatataatagatttgtattagcatatgggatttgtggggtttgaaattttttatatgatttgaacttctaaaataagacttcccaacgacaatttcctgactatactacaccactgcctctcatgtgtgctagtttataagaggtgaagccactactctcattctggactcgatggtggaaacagtgctctcaaattctctgtttttttctatttctttctttgttgctggaagccgacaaaatggatatcatgccacttcatccgtgtggtttcgatgaaatcactacttaaaaatgattttttttggatattatgccactccattcttgtcgtttcaatgaaatcactactgcataaatgattttttctgtatgatgacccatatagtttataggcggaccataattggtcacctctgcaaaaattgatatgcttttttcatacaactcgttaagagactcgtatgtaaaaatcaattatcataggctggcatcttaacttgcccacatgcgatgcatgcaagcctcttaagtggtccgtatgcaaaataccccctgccaccaacccctaccaccaccttccgctcattctctccccactcctcccttatcctgtcttctcctctccccactgtggcaggagcaacgcggactacggcggggcaaagatggccctcacctgcatggagactagcggaggaggtgcgtgtcaacggcggcggcagccttcccccacacggagactagcggaggaggtgcgcgtcaatggcggcgaaagcggccttccccctcgcggagaccagaggaggagacacgcgacgacaacagtggccctcccccttgccgaggctggtggaggaggcgcgtgacggttgtgttaacccatgcatattcacacagccatgcttaaataaaatttattagaaaaaaatatatatatactattataattaattttttatgttttattaggaatgtaaaatttggtataaaaaaattctatatgccttgtttttaaaaatcactaagcaatgatctattacagcagaccgacagacaatgattagctgcaaagaaatgacaaattcgggtcaaacacaccccaatagatagtctggggtgtatatatatatatatatatatatatatatatatatatatatatatatatatatttcatacaaactgatctcacgagatggaaaccaaatcatgcagatgtaaagtgatttaagaatgtgaatttgatttggtaagtaatcaaggcaattagcttaggttcatcccgaatccattccatgtttcttaaacaccctccccccacacggatccggcggtggccgccctcccccacgatgacaatgacctccgcgatgacgatgactggcggtgatggtggtggaagcgagtggctggtgggcggatccaccgcccctgccctcggaccggcggtaggggctggtccgacggctagggtttcaggatatttttcttttttttatttttattcttttcgccgaaatcattttcgcatgcgattggcttcggtgaccgcatgcgaaaattcggttttcgcatgcagttgcgttacccgcatagaaaaaatgacgattttcgcagacaccttggtgcggacgggcctaaggcctgcgtgcgaaaatctcttttggctatccagaaaaaaaaatccatttttagtggtgaatgccactcactaggatgcaccagataaataatactaagtacgatgccttctagatgtagattatagtgccatttcggagagttttagccattttatcagcaaaataccccttgttgttagggttgaaattgattcggatagtttccgtccgttcggactatttttcggattcagatagtttcgaactatccggaaattctcagattcggaaataaattcggataatttttctcggaaaagaaaacgaatatagtaagggtactatccgttggaatcggaaaacggtcgaaaactatccggatttttttttcggatatccatagacattgagcaaattttagaaaaaacacgtatatatacataacttttttatacagaatcagatgaagacaaactttatatcaatattgtagagctcgatgagatctataactttcttactgactatttttattatttgagatcatttaaagatctaaatattcattataatataccgtattattttttacaaaatctcagatctacaattcaaacgacatctgatagagatgtgttccatatcaaagttgtagagctcaacgggatctaccactttatagtttataacatttgtatttaaaaaaaatttaaagtataaaacaaacattgcaagtttcgaagatgtgaaataaaataaataacatctccaatttatacaatggtaagtaagtagtaaaaggttttgggaatagaaaatgataatcatatttgtatatggatctcttagaggaacaaccataaaaatcaattttcacatacggttgtgggaccgtctacaaaattgacgatataaatgttggagatgttgaactaaaataataagcaatatctcttccttgatcaagaaacttaatttgagggttttttttatataccggtaaatattcgctaccgtattcgttctgtcttgtattcgctccgtatctttatttgataatattcgttttcatttccatatccaagttttcgattccaatttaaaaaaaaatatgaaaacgaatatgataaagctggtttccgtctatttccgatccgttttcatcctacttgtggtggagagagcgagggagagcggagtgtggggagggccgagctggaccgtggccatgctcctgggctagctcccttgcgtcgggatacgctagaggcagcgagtagcaagcagacgggtgatggcaaacaacgagtgggcagccgatgctagaggtggtgtgctgtgagtgggcgacactggaggcagcgagcagcgggcgggcatgtggtgctggagatagtgagcgtgcagacaccttctccggcactgcacgaccgctcgcccacattctcgcgtctctaacatcgcctgcccttgcctgctgtcacaccatgaagttattctcccaagccaaaattaaatttataattggtctcgagaaaataccggtgtaaaagcaagagtgaaaccctaaataaattaatgcaaataataatcggaattggcatgtagaactcaattgtaacgccctgattttcgttcgggattaaaaatcatttaataatgtattatctagaaattaaataaaagttaaagctatttaatcaagtgaaatatttgagggaattaaaaatttcctttaaaaaaatcatggccgggaatattttgtaatattctttgtgccctaatgtactctccggaattttccgtgaattttcggagctcaaaaaataattataataatacaaggttcatttaaccaatttaaataaaaagaaaagaaaataatcttccccttcctccctttcgggctcggcccaaattccttcccccttcccctccgggcccgcctccctcccctctcctctttgggccgctcggcccagctcggctcccctctccccccaaagtccagaaaacccccacccggcttcccctctctcttccattggctgacaggtgggacccgtggccccacctgtcatccccttccctaccttcaagcaccccattaccagggacccgcaactgatgacattgacggcccaccccggcggtaaaactgccggctcctggcttctacgcgcacgttcgaccgtgcggacgtggtcgccacccactcctgctgcaccttttcccccactctccccgcgaaaatcggcgctggtttacccccgccacgtgcccacgtcgccactccatctcgccggccgttgccgcccgttgccgcccatcctggccacgatctccctcccccgcgcccatataaacgacccccgtgctcccctcgtccatttccccatttttcccgagcccggcactctccccacgccgctcccgtgcaccgccgctttccggcgagctccggccgcccgccagtgctgctccacccaccgccgcaccaatccgccaccaccgttggcttcgcggcgccgtgctacagcccgacccctactccatttcccctctccgcctccggaacatcgccgcctcgcgcaccacctctctccgtcgccgccgtcgcctccagccacgcgccaccgccgctcccgccgccgctgtgctgcgccgcctccactgccggcttcgccgccgcgcgggcaagctcggtctccgctccgtttccccgttccatcgccggaactccatctcctctgtcaacccgagccgccaccacctcgccgccgccgcgagcgacctccgacctcacgctctccttcgtctgcttcgcaacaacgatagggaacccgacatcccctcatccaagctcttcgtcgccggaaatccattccccgctgtgagtggtgagctccttcccttgtcgccagcttccggccgagttttcccgccgtcttgcgcctcctccctattcatgcgcctcctccctattccctaactttccctccttgttccctagatccttccggccgccgtccgccggttcccgctcacggaacaccgccggaccgccgttgccgtgccaccccgaggagcgtcgccgccatctcgcctccctttggtgccgtgccgcttggtgagcatcccctctcctccgctctttccgccgctctccgcgtgccgacccgcgccaccggtgtcgtcgccggtggtcgccgtctggccgcgcgccgccgctgtcgttcgccgccgctcggccgcgcctgtactttggccgcccgtggaccactcccatggtctgggtccacggtgccgccaggccgcggtggaccgagtccaccttgcgcccttccccttgtgccgctgacgggtggggcccgcctgttggcgccggccctcttttgatgacgtcagcggctatgccttttcctttggaaaataattaatagttgcgcaataattcgttaataattctagaaattcatttaaatggctcaaaacttctaaaattcatatctaattcattcaaactccaaattgggccattcaacttgcaaaattcatctaaaattgagatctacatgtttgtttagtttttatgtattgtttcattggtttttattagagtttttcctccatttgcgtgccagcgtgtagaatccgttgtttcagaagtccgcggtcgcgaggaaaagagttcggaagatcaaagtgaagaagcaaggcaagtcacacattccccttgagcatgttgatcccaagttataaatgttttaccgtttgcaaataaacatgcatgtcttgctaattacatgggatccgggtattacctatctgcttgcttgtgccatgtttacttgatatctatcctttgtcaacattgggtaataaatcgactagctcatgttacttatgtgacctagctagaactatatgcttagccatgcttaattaccactagctcagttgatgggataatggcagtattagacctttttagcatcagaacgagctgcgtgctcgagacacccggccatgtttcagtggccgtaattatccaactaaaatgcgactgaagggtgggctgtgggtgcatggttttgctagtcacacccatggcaattaaggaccggttcgcgggatgccctagaagaacttatcgtacttatcacaagccagcgtgggcaatggctggtcttgtagtgtagctttcctctagctgacgcatccaggcaagggtgggcgtgatggagtttggatgggccctgcgacggcctatgcggcttccggatttacctaggcacgagaggggactgcccgctgccttgcgaggagtgggggtgaaacctgaggtgtggtgtgcttggttagagggggttatgcaaagggttctgtcacggcctctttccggtatgtcgtggtggcatgtcggcgcacggaaacgtgtcgtggggctgtgtcttgtgggtacagttgtacacctctggccagagtaaaactattcgaatagccgtgcccgcggttatgggcggtcgaccagattcaccgtgattagtcccaccttaataaatcg

SEQ ID NO: 12521 - DNA, 8970 bp, Oryza sativa
gtacgcgtcgaatggtcccaaaaattggctcctcacccttgcgcaaatgaagcctctttttgcagttttgttttgctgcaaattcggattcgtttttgttttggaaacgttccgaaaaatccgatgcgtgcaaacggcgtggagtccggataagttacgcgcgacttatccggttcggttacgcgcagtagagatcgtgcgggcgccctgatcaagcgacctttctctatataaaccgacccgccgtcttcacgcgataaatgcgaaaatcaatctagggtttgcctcctactctgtactgcgccgtcgctcgtagactactccatcccgctcgccggcgtgcaccagcgatcgggagagcaggtctccggaacctctgcctttgacgtcctgcaccgggagaaggcggcaataaggtttttgggaagcgcttcgcgcgactgctccctgttcgttcgcgacggctcgccttcctcttcgctcgcgtgtttcgtgccttcgtagacacctgcgaaaagtttcgaccaagcagccggtcttttcgtcacctcggtacgtgttcaatatgttgcgcatatttgatctgttcatgttattctgcgtagtttacatgtgtagatctaatgatgcgttcatgctagttttcatctgtaatgtcatgacttatttatggaataaattaaatcattatatgcccataatctcaacaatccaaaaaccttattataggcactgtgattttactatggctggttttgccgatgcactgaggccggataaattcaccggtgtgcattttaagagatggcagatcagggtcactctgtggctgacagctatgaaatgcttctgggtgagtactggcaaacctgaaggagttcttactgctgaacagcagaagcaattcgaggaagccactactctctttgtgggatgcattcttagcgttcttggcgatcgtctggtcgaggtgtatatgcatatgaccgacgctaaggagttgtgggatgcactgaatactaaattcggtgctactgatgctagcaatgatctgtatatcatggagcagtttcatgactacaaaatggctgacaaccgttctgtagtcgaacaggctcatgagatacaaaccatggctaaggaactcgaactccttaagtgtgtcttacccgacaaatttgtggccgggtgcattattgcaaaactacctccatcttggaggagtttcggtactgcactcaaacacaagagacaggaatactccgttgaggggttgattgcgtctcttgatgttgaggagaaagctcgggaaaaagatgccgcgtctaagggcgatggtgggcagtccagtgccaatgttgtgcacaaggcccagaacaagagcaaggggaaatacaaagctcagcagaccaccaacttcaagaagcagaagaagaacaacaacaatcctaatcaggatgagaggacttgctttgtgtgtggccaagttggtcatctggctaggaagtgtccacaacgcaaggggatgaaggcacctgcagggcagacttctaagtctgctaatgtgaccattggcaacactggagatggaagcgggtatggtaatttacctactgttttttcagttaatcaatctactaattggtgggttgatactggggccaatgtacatgtttgtgctgacatcttattgttttcttcttatcaggtcgcacggggttccaccgtcctaatggggaatgggtcacatgcttctgttcatggtgttggcacggtagatctgaagtttacttcgggaaagatcgtgcagctgaagaacgtgcagcatgtcccttctatcgacaggaatcttgttagtggctcccgtctgactagagacggatttaagttggtttttgagtctaataaagtagtcgtgtctaaacatggatattttattggtaaaggttatgagtgcggaggcctgttccgcttttccctttctgatttctgcaataagtctgtgaaccatatttgtggcagtgtggatgatgaggctaatgtttggcattcacgtttatgtcatattaattttggcttgatgtctcggctttccagcatgtgtttaattcctaagttttccattgtcaaaggttctaagtgccatagttgtgtgcaatcgaagcaacctcgcaagcctcacaaggctgccgaggagagaaacttggcaccactagaactcctacattcagatctttgtgaaatgaatggggtgttgacgaagggtggaaaacgatatttcatgacattgattgatgatgctactagattttgctatgtgtacttgttgaaaacgaaagacgaggctctagactattttaaaatttataaggcagaggttgaaaatcaacttgacagaaagataaaaaggcttaggtctgatcgtgggggagagtttttctcgaacgagtttgacttattctgtgaggaacatggcatcatacatgagaggacgcctccctattctcccgagtctaatgggattgctgaaaggaagaaccgcacactgactgacttggtgaatgccatgttggacaccgcgggactgcctaaggcatggtggggggaggcattgttgacctcaaatcatgtgttaaacagagttcctaacagaaataaggacaaaacaccatatgagatatggattggtagaaaaccatcactttcttatttgcgcacatgggggtgcttggcgaaagtcaatgtaccaataacgaagaagcgcaaacttggacctaagactgtggactgtgtttttctgggatatgctcatcatagcattgcctatagatttttaatagttaaatccgaggtaccggacatgcatgttggtacaattatggagtctcgtgatgctaccttctttgagagctttttcccaatgaaggatacacatagtggttcgaaccaaccctctgaaataattcccagttcaatcacaccaccagaacaaactgaacatacacatgaacttgtctctgaggaggatgtcagtgaagctcctcgaaggagtaagagacaaaggacggctaagtcttttggtgatgatttcactgtgtacctcgtggatgacactcctaagtcaatttcagaagcatatgcatctcctgatgcagactactggaaggaggctgtccgtagtgaaatggattccattatcgctaacgggacttgggaggtgacagagcgaccctatgggtgtaaacctgtggggtgcaagtgggtgttcaagaagaagcttaggcctgacggtactattgaaaagtacaaggctcggcttgttgctaagggctatactcagaaagaaggcgaagatttctttgacacttactcacctgttgctagattgaccacaattcgtgtgctactttccctagcagcctcacatggtcttctcgttcatcaaatggacgttaagacagcttttcttaatggagagctggatgaggagatctatatggatcaacctgatgggtttgtacttgaaggtcaagaaggcaaagtgtgcaaattgttgaagtctttgtatggtctgaaacaagctcctaagcaatggcatgagaaatttgacaaaacattgacatctgcaggctttgcagtcaatgaggcagataaatgtgtgtactatcgcaatggtgggggtgagggagttattttgtgcttgtatgttgacgacatactgatatttgggacaaacattgaggtgataaatgaggttaaatcattcttgtctcaaaattttgatatgaaagatttgggagtagctgatgttattttaaacattaagctaattagaggtgagaatgggattacactcttgcagtctcattatgtggagaagatcttgaatcgctttggctacattgatagtaagccttctccaacaccttatgattctagcttgtcgcttcgcaagaacaagagaattgctaggaatcaactggaatactcccaaatcattggctcgttgatgtacctggctagtgcaactaggcctgatatctcctttgctgtgagcaagttgagccgatttacctctaatccgggagatgatcactggcgtgcgcttgagcgagtaatgcgctatctgaaaggtactgtggaattggggcttcactatactgggtatcctgcggtactggagggttatagtgattctaactggatctctgatgtggatgagatcaaagccactagtggatatgttttcacactgggtggtggtgctgtttcatggaggtcttgcaaacagacaattttgacgaggtcaaccatggaagcagagctaacggcactggatactgctactgttgaggcagaatggttgcgtgatctattaatggatctgcctgttgttgaaaaaccggtgccggctatccttatgaactgtgacaatcaaacggtaattgtcaaagtgaatagttctaaggataatatgaaatcgtctagacatgtgaaaagacgattgaagtctgtcaggaaattaagaaactccggagttataacgttggattacatccaaacagcgagaaacctggcagatcccttcacgaagggactatcacgaaatgtgatagacaatgcatcgaaggagatgggtttgagacccatgtgagttatactatggtggtaacccagtctatgtgatcggagatcccgtgaattagatcctgggaagaacaaaccattaataaactagaggagagtaccaatatatataccctctctaagtgaagatgcatatactctcgtgagctgcaaggcaggttggctatgccttaatgagttctgttggctttaattagcaaagatgttgtcctgcagagcattcttgaaggaactcacctttgtgagcttgactgttggtcgcagtccatgaagattttgggtgaatcttctaggaagcttactaaagacctaggagtatgacttatacgctccacccgaggggtagtctacagacggtctagtaccagataagactttgagtgaaacttgcttgcacaagacttgcaattcaaggcgtagtccattgttcaagttgtgagtaagtgtagcttggagttctaggtggatgttcaaccttaattggtctccatcgaaccgctggtatataaacagtacattggaaaaggcaaatctcagtgggattttgagatttggtgggggattgttggaattaatgaatgggtcttagcccactcgaagattaattctttggaaaatcacaaaagcccacctcatgggatggcatgcatgtggagtttagtaccaccttgcttattctaggagagggggacctccttaaaagggaggatgccctcctagccacttgaagcatgtgtggtggagagaagaggggaaacacacgcgcgcgctcgctcgcctcgcctcgcctggcctggcctgggcagggcagggcagggcagggcagggcaggcggcgcgcgtgcacgacgtacgcgtcgaatggtccgaaaaattggctcctcacccttgcgcagatgcagcctctttttgcagttttgttttgctgcaaattcggattcgtttttgttttggaaacgttccgaaaaatccgatgcgtgcaaacggcgtggagtccggataagttacgcgcgacttatccggttcggttacgcgcagtagagatcgtgcgggcgccctgatcaagcgacctttctctatataaaccgacccgccgtcttcacgcgataaatgcgaaaatcaatctagggtttgcctcctactctgtactgcgccgtcgctcgtagactactccatcccgctcgccggcgtgcaccagcgatcgggagagcaggtctccggaacctctgcctttgacgtcctgcaccgggagaaggcggcaataaggtttttgggaagcgcttcgcgcgactgctccctgttcgttcgcgacggctcgccttcctcttcgctcgcgtgtttcgtgccttcgtagacacctgcgaaaagtttcgaccaagcagccggtcttttcgtcacctcggtacgtgttcaatatgttgcgcatatttgatctgttcatgttattctgcgtagtttacatgtgtagatctaatgatgcgttcatgctagttttcatctgtaatgtcatgacttatttatggaataaattaaatcattatatgcccataatctcaacagtgggcatactcgcatacgtagtagccgcataagttagttcccttgacctgctttgcacactacatgagaaacgatgagagatttaatatactctttatattaactgtaactagagattcaattcaatataattttggatcatgcatgtactccctggaaaatgaaacctccgtccaagttttgctttccaagtcccgcggaccaactgacggaaccgatcccaagccctacatgtgcagttgcaagctatgattaattaaatattacccgagatcaacataatagcaacagagtcccgcgactttgaaatagatggcattatattacctgtctatcagttggaagaccttgtcaaaaaccttctcctctttattcattgagtcgtacacagtgactctgcatgcgtccaagtcgaaaaagaacaggacccagtggaatctggaatatgcgtgagatgagataaatatcagaatgtacatgttatatgtatgggaatgaaatttgttcgaacgacaataaaaactcactctgtgttgtacggcaatagtatgaacgtcttgaaatgctgctgcgttaggagatggacaagattgtcctctgtgtctttctcgtacttgtcgagcatttcggtgttgattttccgagggtcgatgaacccagtattgtaaaccccccgccgtcgggccctttgaatctccattctacaacaatgaaaggaaattattattgcttacatatatgccaggagctaattattgaacgaaacaaatcgaactcaaagatacttacaaaatccatacgcttaaaagagagacgtcgagggcgtcccgatggtacagattgaagacatccttgaaatggatccatagaacatcttctccttgcaagaagttggggtttctgatcctcgctccgaacatctctctaccattggcgctcatttccatgtaccgttcatggaatttgtacatttgtgtcggtagggactgcagctgctcaggcctgacaagcggtttaccgagttcaaacttgtatgccacttccgccttcgggattggtgcgcctccaaccaactgagccatggttagaccggtgtccgaaatgaaatccgttatgccaaagtcttcgccggtcaccaacggctcgaccacttggtgtggttgttctccaagctgaggaactggtttggacttcttgtaataggctttcctaagtgttcggtcatagtccgatagctttaaggcctccttgtttgcggtggacatttccttgaagaaattcttcacgctcgggtcaataggtatcttcttttcaggactccgaggcttgagttgcctcttcacttctcctgccacataagcgtcaagctcctcttgactgcaaccgtacggcggctccttgtttttggtggtgtcaactttggccttcttcgttgcccttgtgctggtaggaggtggagcttggcgagaccttgtcttgggaggtgcaggcggacacggtggaggaggaggcggaggagccggaggagccggaggagatggtgcaggaggaggtggcggaggagccggaggagatggtgcaggaggagacggcggagccggaggagatggtgcacgagatgccgcttgtcgcccaaggaggatgatgtaccgcttgcgccatagtataatggtgtggcttgtgtctcgtagatgcgtctcaccatctcctcctgggtagtccaactcgaggtcctcgtacacggcttccaccagctcaacttcgaccctcgagtatcctgctggaatcggcctgcagtggtaagtccctgaaatgtccgttgggatggccattcctgacgccaccttcacgtgatgagaggttatctattagtaatcaacctaagcagcaacttgcggaacgtacgagtcaaaaatcatatattacatcgagcataccttgattgataagttcttgaagggaatatgcagctcacatggtgtccgatgcgtgatctcatcaacggggcaggtggtttcgtcctagatttgcatggcgtccatgctatgtgatactacctgccccgttgaggcgcagctgctacgattgcctgatgggctgaccattgaaggaggtatgtacggctagggatcgtgtgaccgatgtgctgccatgcgttcatccaccttccgggccacctcctcttgcatgctgagctcgtagctcgataccctgtactcaagatctgcaatcttcgcctcggtatctctcttgctcctcatccgactcctgtacgtgtggatgtcctccttgaatcccatcttccagggaatcacgcctttccctcgtgttcgtcctggatgctcgggagtctgtagggtgagtgacagttcgtccttctctctgtcgggtcggaacgtgccctgagaagaggcttccactgcgcccgttagtcgattcgcagcctcgcgtatctgatcgctgaagaccaaggagccatcaactgggttgagcgttccaccgtgagcatagtaccagaactttgatcgattaggccatttagcggtggccggttcgatacccatctcaagcaagcttgcctctatctcctcccacttcggcatcgcgacgctatagccgcctgaccccaagtggtgatggtacttcttcttggcggcattttctttgtttctttccatcattgcctgcccttgttgacctgtcttgtaagcaacgaacttgtcccagtgatcccttagcttcgggaatacgtcaaagttcggtg

SEQ ID NO: 12522 - DNA, 9619 bp, Oryza sativa
gggaaagaattaagcccggctaggattgcctctttccgctgctgctgctttcgtttcggtgtgaggactaagtgcctcttctgtaagtatttacgcttttatttacgtttggaacaacacaagtcttttctgcacactttgtcctcactcgtgcgcaccgggaaagaattaagcccctatttacatttggaactgtatttacttgttattttgtgtaccctggctggtcctggacagggatggccgggcccgcttacatctggcagctttcataggtcatagattgcccggggaagaattaagcccctatttacgtttggaactgtatttacttgttattttatgtaccgtggctggtcctggacagggatggccaggcccgcttacatctggcagctttcataggtcatagattgcccttacagaccaacacaagtcttttctggtcattgcctctttccgctgctgctgctttcgtttcggtgtgaggactaagtgcctattctgtaggtatttacgcttttatttacgtttaggtatttatgcttttatttacgtttggaactgtatattacttgtcatttacttgtcattttgtgtaccctggctgtatattacttgtcattttgtatacccagggatggccgggcccgcttacataggtcatagattgtccttacagaccaacacaagtcttttctgcacactttgtcctcactcgtgcgcaccggggaagaatttcccggtcggtcacccatcccaaattgcttcaggccaagcacgcttaaccctggagttctttggagatcagcttccgaaaaataagttgcaacttgttaacatgagtattctattaatcttattaagccctagggcgggatgtcacatcctcaccccttaagagagatcgacgcccccgtcgatcaaccgtaggctaggaacgtcccctcttggccacgtccgtgtgtccagtgccagcgcatgtgccatgctgtgtgaccactccaggtccacaccagccatgcgcactatgactgtgcaactgcaacacacgcgcccccgaaaccgcgagagtcggctctgataccattttgtaacgtccgcctctcctaggcctgtctgcttacatctggcagctttcataggtcatagactgccctcacagataccattttttaacgtcccatctctcccaggccgggcccgcttacatctggcaactttcataggtcatagacagccctcacagaccaacacaagtcttttctgcacactttgtcctcacctgtgcgcaccggggaagaatttcctagtcggtcagccatcccaaattgctccaggccaagcacgcctaaccctggagttctggagatcggcttctgaaaaagaagttgcaacttattgatatgagtattctattaatcctattaagccctaggccggaatgtgccgccacgtgtgcgccacgtcggcgccacgtcagcgccacgtggtgcgccgcctccttccccggtccgtgcacccggtccaccgcggaccgccacccgagtcactgccatgtggggcccgcatgtcggcgccccctgatgacgtcagccctgggatatattgcgcaataaatcaattaatgattttttgtttatagtaaaaacacagtgaatcttctaaaattcatatctaattcatccgagctccgtttaagcccattcaagtctcagtaaatcatgaaaaatgcatagaatccattaaaaatgcttttgttctctgtttcagtagtctttagcctgtttgtattgtttgctttgtatgtcgcttagattccggctctcctgacgctccggtgtactttgaaatagtcaccgaggttcctccagcagtagagcaaggcaagtcatgcttgtcacttgaacatgttgatcctatattgtaaatgctttatcgttttcctttaaatactgcatcattttataatgttactatgggatgtttacctactgttacagccatgctattgttgtaccatgctcctttgctagcttggggatataacatgactagatattggactagggattgcttaactatgcttagttcaactagcacacaatgggggaaatacattaatgcatagatatcagattctagtaatgatgttggttaatgccactgctccggtgttggttaattaaaatatattaaatggtgggctgtgggtgcatggttttgatggtcgcacccatggcatttaaggaccggttcgcgggatgccctggaagaacttatcgtacttaccacaagccagcgtgggcaacggctgggcttgtagtgtagctttcctctagttgacgcatccaggcaagggtgggcgtgatggagcggggcttgccctgcgacggcctctgtcgcttccggattcacctaggcacgagaggggactgcccgttgcccgctggggacgggggtgaaacctgaggtgtggtgtgcttggctagagggggttatgcgaagggtcctgtcacggcctctttccggtatgttgtggtggcatgtcgccacacggtaacgtgtcgtggggctgtgtcttgtgggtacagttgtacacctctggtcagagtaaaactattcgaatagccgtgcccgtggttacgggaggtcaaccagattcaccctgattagtctcaccctagcttagtctaatggaattgattagtccaggtggatgggtgggcctgttgcaacgtggtgtagcgttggacagtggatggttaatattaactaattattacaactgttttactgctttcaactaccgtctttaaatgctcgctttatgcaaatgaaccgttctagccatactttgattataccctgcatcataccccctattccggtatgacttgctgagtacggtggttgtactcagtcttgctctatttttacccaaaacccagagtttgagtacgtgtcagatggtggcttctccgaggagtaggcttcgtccgtgccgtcgaggatgcctgtggagtggcgttcccgctgcagttcaagtcaaggcttagctccatttatcttttaattttccgctgcatttatataagacttttctaatgtttgtaagacgtggatctgtatgtcaactttatcgtttgtgtaccccggccggtcctggacgggggttttaatgcacattctgcttggaattctattcgggaaccaatgcgggttcatacctgtcacaccctgaagttctcctcccaagcctaaaattgaatttataaatcaccctaagaaaatgctggtgcaaatcaagagaaaaccttaataaattaatgcaaataataatcggaattggcatgtggaatttttcttgagttctacatgtcgaaatacgctaacaagatttttagtggaattttcagagctctcgaaataattttaaccaattaaaattgagcacatgcaattttaatccgaggaaaaatcctttttccttctttttcctttttctttcttttcttttctttttttctttgaatgggccgccggcccattcctcctttttctccccctcctcccgctgggccggccataggccgaggcccagccaggccgccccgcctccctcctctcccggggtcgccgacaggtggggcccacctgtcgggtcctcccccaacctcccgccgcccgcgccggtcataccctgccgaaaccgccgccaccgcacccactcctccgctttccccgcgcccacgccgcgtcgcccttgcccacaccacgtcgccgccccccctccccgcgtcttccggccgcgcccgcgcacgagaggggcgagattagattttgaatcgcccccaccttctctctctcctctcccacgtcgccggcgaaatcgcggcgcctcccggccacgttcgcctccccctccgcctataaaatgctccccatgccctcctctctcgttttccactctcacagctccatcccgtgccccctaccgagctcgcgccgccgccgcttgcgccgccgcccgccgccgcactccggccgtgtgccaccgccgctagagccgtcgccgcgctaagccaccgccacccctagcttcgcagccacaagacctttctcggccgccgctttgcgtcgccggaatcccaccgaaaccccatctccctcgtgtcgccggtgagttttctctcccctccgactcaggccggcgtggatggtcgccgtgagggtttccctccatcctaattcctcctctctttttccctaggtgtcgccgtcgctcgtccgcacctcggcatcgccggtcttcgccgtctccctcgttttccaccgccggccattgccgcccctccggtgaggtctccctccccttcctttccttcttttttttccccgtgcgccgccgccctcttcgcgcgctcgccgtcacgttcggccgtcgccgctcgcgccgccgcccaccatctgcgccgccgtttgccgtcgccggcggtcgcatgcgcgcgccgccgctttgccatggtcagccggctggcttgatgccgggccaggccggtacaccggcccgtggagccggggccgtggggcccgcttgccagccgtgccctccccttgagccgctgccgagtggggcccacgtgccgccgccccttcccctctctcccgagccactgaccagtgggacctgcatgttggcgccgcccccttgatgacgtcagccctgggaattattgtgcaataaactatttaaggactttttgttatagtaataaacacagtgaatcttctaaaattcataactaattcatccgagctccgtttaagcccattcaagtctcagtaaatcaagaaaaatgtgtagaatccattaaaaatggttttgttctctgtttcagtagtcttatagcctgtttgcaatgtttgccttgtatgtcgctagattccggttcttccgacgctccggtgtacttcgaaatagtcaccgaggttcctccagcagcagagcaagacaagtcatgcttgtcacttgatcatgttgatcctatattgcaaatgttctaatgttttctttcaaatactgcatttgttttgcaatatcactatgggatgtttacctattgttacagccatgctattttggtaccctgctcctttgttagctcgagttataacatgaatagacgttggactagcagttgcttagccatgcttagttcaactagcacataatggggaaatctcatttaaaatatagactgtaggttcatatgataatgttggtttagtaccaccgctttggtgttggttaattaaaatgaatcacatggcgggctgtgggtgcatggttttgcttgtcgcacccatagcaattaaggaccggttcgcgggaaaccctggaagaatttatcgtgcttaccacaagccagcgtgggcaacggctgggcttgtagtgtagctttgctctagctgacgcatccaggcaagggtgggcgtgatggagtttggatgggccctgcgacggcctatgcagcttccggattcacctaggcacgagtggggactgcccgtcacccgctggggacgggggtgaaacctgaggtgtggtgtgcttggctagagggggttatgcaaagggtcctgtcacagcctctttccagtatgtcgtggtggcatgtcggcgcacgaaaacgtgtcgtggggctgtgtcttgtgggtacagttgtacacctctgatcagagtaaaactattcgaatagccgtgcccgcgattatgggcgatcaaccagattcaccgtgattagactcaccctggtttagtctaatgaaattggatagtataggtggatggttgggccagtcgcaacgtggtatagcgttggacagtggatgaataatatgattaattataacaactgtttacttctttcaacttctgtttataaatgctcgctttatgcaaatgaaccactctagctctcctttgataattccctgcatcatacccccattccggtatgacttgctgagtacaatgggtagtactcagtcttgctctattttccccaaccccagagtttgagtatgtgtccgatggtggtttcttcgaggagtaggcttcgtccgtgtcgtcgaggatgcctgtggagtggtgttcccgctgcagttcaagtcaaggcttagctcctgttatcttttgttttccgctgcatttttgtaagacttttatgatgtttgtaagacgtggatctgaatgtcaacattgtcgtttgtgtaccccggccggtcctggacggggattttaatgcacattctgcttggaattctattcgggaatttctgggcgtgacaatacccccgggaatagttccacctcggtacaattcagcccttctgtaacaatagaaatccagagatcaccatttctagccaacctcatccttctcgaatccaaagacccagatgtcattcttgggatggattggctgactaagttcaagggtgtcattgattgtgcgaatcgcacggtcaccttgaccaatgagaaagaggaaacagtggtgtacaagtcaccagtcgcactgaagcagggaatctccttaaatcagattgaggtggagaattcggtggtcaccgaggagaagagttggaggaaattggaagatatccccatagtctgcgagtatccagaggtgttccctgaggacctcactactatgccacccaagagagagattgaattccggattgatttggcaccaggaaccgccccaatttacaagaggccgtacagaatggcagccaacgagctagcagaggtcaagaaataggttgatgagtacctgcagaaaaggtacattcgacagagtacttcaccttggggtgctccggtcatttttgtggagaagaagggcacagccgaagagaatgtgcgtcgattatcgcgcactcaatgaggtcaccatcaagaacaaataccctttgccgcggattgatgatctgtttgatcagctgaaaggaaccaaggtgtttttcaaaatagacctgcgatcaggctaccaccagttaaggattcgggaagaggatattcccaagacagccttcaccactcggtatgggttgtatgagtgcacggttatgtcttttggactcaccaatgcacctgcattcttcatgaacctgatgaacaaagtgttcatggaatttctggataagtttgttgtggtatttattgatgaaattctaatctattccaagtcggaagaagagcatcagcaacatcttcgtctggtactcgagaagttgcaggagcaccagctttatgccaagttcagcaaatgcgacttttggttatcagaggtcaaattcttgggtcacgtcattacagctcagggcgtggcagtcgatccatcgaatgtggagtcagttaccaagtggagcccacctaagacagtgtcacagattcggagtttccttggacttgcgggttattatcgtcggttcattgaaaatttctctaggattgccagacttatgactcagttgcttaagaaagatgagaaattcaagtggacagccgaatgtgacaagagttttggggagctcaagaagaaattagtgtctgctccaattctgattctgcctgacccgacgaaagacttccaagtctactgcgacgcgtcccgtcacgggcttggatgtgttctaatacaagagggcagagtggtcacctacgcctcgcggcagttgcgtccacatgaaggaaactatccaacacatgacctggaattggcagcggtggttcacgccttgaaaatctggaggcattacctgattggcaaccgctgtgaagtatatacggatcacaagagtttgaaatatatcttcacccaacctgacatgaatctccgacagcgaagatggttggagttaatcaaagattatgacatgagtattcactaccatccaagcaaagccaatgtggtggcagatgcattgagcaggaagagctactgcaatgctttgtgcaccgaaggcatgtgtaaggaattgcagcaggagcttgaacatctcaacttgggaatcgtagaacacgggtttgtggctgctctagaggcacggcctacgctcgtggatcaagtcagagcaactcaagtaaatgatcctgagatagctgaactgaaaaaagaatatgagggtcggaaaagcccgggatttccttgaggatgaacatggcacaatctggatgggagaaagattgtgcatacctgatgacaaagagctaaaagatctgatactcaccgaggctcaccagactcagtactccattcatccaggcagtaccaagatgtaccaagatatgaaagaaaaattttggtgggccagcatgagaagggaaatagctgaattcgtcgcgctctgcgatgtttgttagcaagttaaagcagaacaccagaggcccgcaggattgttacaacctctttagatcccgaaatggaaatgggaagaaattggaatggatttcataacaggtctgcccaggacatcatcgggccacgattcaatctgggtagtcgtggatcgacttaccaaagttgctcatttcattccagtgcatactacttatataggcaaaaggttggcagagctctatctctcaagaatcatgtgtttgcatggagtacccaaaaagatagtatctgatcgagggagccaattcacttcaaagttctggcagaaattgcaagaggaattgggaacccgtctgaacttcagcacagcctaccatccgcagaccgatggtcagaccgagcgggtcaatcaaatattggaggatatgttaagggcttgtgcgcttgattttggtggagcatgggacaaaagattgccgtatgtggagttctcctacaacaacagttaccaggctagtctgcaaatggcaccgttcgaagcgttgtatggccagaagtgccgcacacctctcttttgggatcaaaccagcgaacgtcaactgttcggaacagaagtgctaactgaagcagaggagaaagtcagaaccgtcagagagatgctgagaattgcacagtctcgatagaaaagctacgtagacaaccgccgaagagagctcacttttgaagcaggggattatgtgtacctctgcgtcactccgctccggggagtacaccgcttccagacgaaaggcaagttggcaccacgcttcgtgggaccatacaaaatcttggaacgaagaggagaagttgcatatcagctagaacttccatccaacatgatcggtatccatgacgtgttccacatgtcccagttaaagaagtgtttgagggtacccgaagaacaagccgattcagaacacattgacattcaagaagatctgacttatgtggaaaaaccagttcgcattcttgagaccagtgaaaggaggactagaaacaaggtcaccaggttctgcagggaccagtggagccaccactcagaagaagaagcaacctgggaaaggaaagatgagttgaaggccgcccatccatacctcttcgccagctcttccgaatctcggggtcgagattccgtttaaggggggtaggtttgtcacaccctaaag

SEQ ID NO: 12523 - DNA, 3831 bp, Oryza sativa
attaaattgttaaaaattgtaactaacatatgtaaatcccacatgcatgatttaaaacttttaaaaattctaataatcgtatataattagcatattcatgatattaaattgttaaaaattgtaactaacatatgtaatcccacatgcatgatttaaaacttttaaaaattctaataatcgtatgtaattagtatatgcatgatattaaattgttaaaaattgtaattaatcatatctaactagcatattcaatacattcaaaatagtttacaacaattacggcaatagatcggcggtgacggttgtccgcacgtactttctcctcactattgttccttccttgtaatcgctacgtgagtaaagggtgtcttcgtttgataggaggatgctagggtcaaccatcaccgtgaaagggggttgcctatcaaactgatcgtaatcctcgtcagtcttgtcctctactccgacagtttttcttttgcctgggagaaccacgtggcacttcggctcgtcaggccctttgcccttctttcctttgctagacatgtccttcacgtaaaaaacttgtgttacatcattggcaaggacaaaaggttcgtccgagtatccaaccttgttaaggtcaaccgttgtcatcccactgtcatcaatcgttacgcctccaccagtcaacctaatccattggcaccggaacagagggaccttgagaggtccatagtcaagttcccatatctcctcgatggcaccgtaatacgtgccagttgtaccatcgtgtcccatggcatcgatacgaacaacattgttctggttcgtgctcttcatgttttgggctcttgtgtagaatgtgtacccattgatctcatatccctggaatgtcgcggtcgagccagatggacccctcgccaggaaggccagttgctagttaatcgtctcgttacccatgagatgttgtcgcacccatgtggggaaaatataaatgtgatgccgtgtaatccatgcatcggacttaccgatgtttctggcgcgaactagagccaagtgctcctcgatgtaaggagccaccaatgaagattgttgtaaaaccgtgaaatgggctttacggaataaattgttatctaccatcattattgctttccttccgagagtcccctttccccgtagtctcccttcatggcgtgattcaagtaccccgattgggcgaaggtcttcaataaattctacgcagaattcaatgacctcctctgttccataccccttggcgatgcttgcctctggacgagcacggtttcgaacatacttcttcagaatgcccatgtacctctcgaaagaaaacatgttgtataggaacacaggcccgagaataccaatctctttcactaggtgacaaagtagatgcgtcattatattgaaaaatgaaggtggaaatatcaactcaaaactgacaagacattgcaccacatcattctgaagggcttctaacctatccggatcgatgaccttctgcgaaattgcgttcatgaaagaacatagctttgttattgttgcccggacattgtctgggaggataccccttattataactggtagcagctgtgtcatcaacacgtgacagtcatgagactttaggtttgtgaacttcttctccttcgtgcttattattcgctttatattcatggagtatccagacggtaccttgatgctctccaagcattgaaacatactttccttctctgccttgctaagagtgtagctggctggactcaagtaatggctgcctttctcctgtggttccgggtgaaggtcaccgcgttgttccatatgcttcagatcattacgtgcttccagtgtatctttcgactttccatatacacctaggaagccaagaaggtttacgcaaagattcttagtgaggtgcatcacgtcgattgcatcgcggacgtccaagaattcccaatagggtaacttccaaaatatggagtttttttccacatcgccgcgtgaccatcttcgctctctataggctagctgccaggcccctttccaaacactactttaagatctttaaccatagcaaacactatttttccgctgcgatgtttaggcttcgtacggttgtccgccgtatgttcaaagtgcttgcctttcttccgtaccgagtggtttgctgcaaggaatcgacgatgacccatgtacacaaccttcctacagtgcttaagatacgtactttctgtttcatccatacagtgagtgcaagccttgtaccccttgttggactgcctggataagttgctaagtgcaggccaatcgttgatggttacgaacagtagcgctcgtaggttaaactcctcctgtttgtcctcgtcccacacggggacaccttccttcttccacaacagtttaagatcttcgaccagtggtcttaagaacacatcgatgtcgttaccaggttgcttggggccttgaataataatcggcattattatgtacttcctcttcatgcatagtcaaaggggaggttgtagatacacatcgtaacgggccaagtgctatgaccgctgctcatctctccaaaaggattcatgccatccgtacttaaaccaaaccgtatgtttcgtgcgtcatttccaaagtctttaaattttctgtcgatgtttcgccactgcgaaccatctgcggggtgtctcagcatcccgtcctgttgacgttcttcagcgtgccaacgcatcattctagcattccccttgttcctgaacaaacgtcttagccgtggtattatagggaaataccacatcaccttagcaggaattctcttcttcgttagctgcccgtcaacctcacctggatcatctcgtctaatcttgtatcatagtgctttacaaacagggcatgcttctaggttctcgtactcctcaccgtgatataggatacaatcatttggacatgcgtgaatcttctgaacttccagtcctagagggcagactatcttcttagcctcgtacgttgtctcgggcaatttgtttccctccggaagaatgttcttgacgagtttcaataaatcgccaaatgccttgtcactaacaccattttttgccttcctttgcaagaactccagagtggtatccaactttttgtgcccctgctcgcaacctgggtacaacgacgttctgtggtcctctaacatcttgtccaatttatgggcccccttttcactttcgcagtcctccttggcatcctgcaacatctgaccaagatcatccgcaacgtcgttataatcagcatctatgtcctcctcgcccgtttgatttccttcaaatccagcgtactgagcaaagtctggaatattgtcgtcttccacttcatcttcttccatttcaaccccttgctctccgtgggatgtccaacaattatagcttggcatgaaccccgactcaaacaagtggaaatgaatagtcctggatgcagaatactccttctgattcttacacttattacatggacaacaaataaaacccttctgcttgttagcttcggccactctcaaaaaataatgcacaccatcaataaactctttggaccgccggtcagcgtacatccattgccgatccatctacatgaaatgaaaaaaaaatcgtacacaaataatcattcgtataataatgacagtcatacaataatgataaaataatcacaaactctttcaacagtcatacaataatgacatatcattattcatacaaaaattataaaatattccaccgaataattcttatttattattttttaaagtttaaattcttttaattctcaatttagtttgttttcttttattta

SEQ ID NO: 12524 - DNA, 623 bp, Oryza sativa
gtgattttccaaagaattaatcttcgagtgggctaagacccattcattaattccaacacccactgcctatcaaaccaaatatacactacacgagagctcgatgtacgtatacataaaccattcaaaatttcattgcgtatcgatttgttaagttgtttattaatttcatatattgatatgtcattatttttcgaatgatagcgtattcacatgagggaaaaactcccacataaggattttatcacgactgttcaagaacaactgatggggttcatcaacgaagaagtccttaatcccgatggtgaattctactacgacggatcgacaattcgtaacgtcggtccttcctcttctgacgtaacgcaggcgtcgaagtcatagctatagctagcgagcaaatgaattgtactatacatgcatgtatatatatatatatatttatatatgtacgtacatttactttagagttaatatatattttggtaacatatatgtacataaaatgttaagtgctttaaattataaatatgtgtgtaatatatgtatttatacatatatacatacgcatatatatatatatatatatatatatatatatatatatatatatatatatatatata

SEQ ID NO: 12525 - DNA, 729 bp, Oryza sativa
tactgagcaaagtctggaatattgtcgtcttccacttcatcttcttccatttcaaccccttgctctccgtgggatgtccaacaattatagcttggcatgaaccccgactcaaacaagtggaaatgaatagtcctggatgcagaatactccttctgattcttacacttattacatggacaacaaataaaacccttctgcttgttagcttcggccactctcaaaaaataatgcacaccatcaataaactctttggaccgccggtcagcgtacatccattgccgatccatctacatgaaatgaaaaaaaaatcgtacacaaataatcattcgtataataatgacagtcatacaataatgataaaataatcacaaactctttcaacagtcatacaataatgacatatcattattcatacaaaaattataaaatattccaccaaataattcttatttattattttttaagttttaaattcttttaattttcaatttagtttgttttcttttatttaagattaactttcactatattttcctactcaactattttataaaaccttatttagcaaataaacaaaatttctatatattctttcttttcccacacaaattttctctctcatcaacttacaacaaaatttttgagacaaaaaagtctgcaaaacatagctccaaatgtaatatggccaaaaaaacattggagaatgaagttgctaaccttttaggcatc

SEQ ID NO: 12526 - DNA, 1215 bp, Oryza sativa
tttttttttgctctataccgctcatatattcagcactttatttctttttctatttttaactcaaaatgttggtaggcacatatatatttttctactagtttttgaagggttgtttcatatctttcaacaacattgcagctcaggtcatctcatagttgtaatatccatattcgtttgatagactaatttgcagtcttatttgcatgggcccaaatgatctgttcattttttgtaatgtagatgtcaatgaatgtgagcaaaatcaaagcccatgcccaaaaggtgcaacttgtcgcaatacagaaggatggtaccattgttcttgccctgtgggaagaaagttggcaaaggaaacaaacacttgcaacccagacatcagcctgatcataggtaaagacctaaaagttaggagcctgatttacccttcttaaaactagataagctgcaaccctacacccaactctattctattacaggaagctataatgcataagtttagctgtcagaatttcagcattatgtaaagggccccttatttaacatgtacatattttccatttgcacagtatcatagaattgacaaataaatcggtgaatgaatagagctggaaagcatatagcagcatgggcatgtgactggtgtaaggatcatctacatcgaaagaatgacgtcttcctctacttgatccttagtcataaaatatccctcaatttttatgatcgtcttagcttttgtttatattcgtgtcctctcctttttaggaataatttagaaaaatatgagaaactatcaaaccaatataatcgacaaaagaaattaaattaaatccaaagaagacataagtgattataggtagaatcattatgttgtagtatactaacatcacctttcagtccaccacagtgagtcagtttgacatgcttttattgtattacatgcaaatacatgatgataatgtaacaagcctttttatactctttgaagcaggtgtcagcattggctccattgttctagtgattatcattttcttcgtgcgtataatttttgagagaagaaagcttacagatgtcaagaaaaaatacatccaggaacatggagggctgctattatttgagaagatgaaatcagaccagggacttgcatttaaggtgttcactcaagcagaactagagcaagcaacaaacaagtttgagaaaagccagattcttggagga

SEQ ID NO: 12527 - DNA, 31408 bp, Oryza sativa
  unsure (1)..(31408): unsure at all n locations
aactacactaacaaaacatatgtacttaagcgtcaagtgtcaaagtgtgtggttttctgtaacttggaccacagaacgtgtaattttgtgaaatttactcatatctgtttacttttctcaacgaggagattggtagctccacggataatatgcttttttttttaattttgttgtaaaagtcacaaatgatataaatttagaagttttactcccaagttatttttgattgcttcattcctacctctcaaatcaaccgatcagcgcgtgagaccttgtgtactgagtttcaaaagttcacaagctggatgatcaaattttattcgtaaagttgactgcaatagttttgtatagatcttaactaaaattctttcagatcaatgtgattcacgcagtattattttggcccatacctaatccgtaaaattaacggcagggattgtccgtggtttacagtcggaagaactgatatgtggacgtaggctatgcacgtctcgaatttcaaccattcagtgggagctagcatatcattttggtagactttaaaatcccctccggtgaattaggcttgggaaaagtccaccacctcaatccctaaccaagatcgccagatcggccaccgccgcccgcgactcccccgcccatcgccatgtccgactccaaccccggcgcggcgaaccctgccctggggccggacgccgacgcggcggccggcgagggccttgagctggcgcagttcgcggcggggtgcttctggagcgtggagctgacgtaccagcgtctcccgggcgtggcgcgcacggaggtgggctactcgcagggccaccgccacgagccgacctaccgcgacgtctgcggcggcggcacggggcacgccgaggtggtgcgcgtgcactacgaccccaaggcctgcccctacgaggtcctcctcgacgtcttctgggccaagcacaaccccaccacgctcaacagacaggtgcgttcgcgtcgttcgctcgtagtagggggattagggagccattcctcctgcgccggcggcgccgccgcacgcgtgtgccggcgggcggtgccgatgcggcggcgacttcttcgctggcgtcgcaggaggttcagtgaacctggctcggtttttgtttagtgttgactttgctctgccgcggaagttgtggtctctcactgggagtattttggaccgttaaacagatcagaaaatatgcggttttaaacacacctacgtggccatcatccgtgattagttgcgttgagatttttcacgccattcttggtgcagtacggtactcccagaacccagcaacggttgatggaagagaaagataaactcaactcgctaagatttatttttgtgaagaaactagcgggctcctttcaaaaaaagaaagaaagaaagaaactagtgcgcaattgtgtgaaatagatgcgatcaaactactggcattgtgaaatgagaatcacatttgatatgattgtggaaagtaattttgacatgaagctagtattggccttactatccaaaaactgcaatccggtggtaattctacccaataccactataccagtaggaaagaacatttaacttcatgccagattatgtaactgagaagtgagtcagtgaagactgatatattgagccgatcgagttcatcagctagctgtgcagcctgtgctgctatcagttttccacgagactaataactaagcatatcgtcctggtttttacccctgctaattaaccccggcgaacttatgcacgcgcaatgtatggcagggcaacgacgtcgggacgcagtaccggtcgggcatctactactacacggcggagcaggagaaggcggcgcgggattcgctggcggagaagcagaaggagtggaaggagaggatcgtgacggagatcctcccggcgacgaggttctaccccgccgaggagtaccaccagcgctacctcgagaagggcggccagtccgccaagaagagctgcaacgaccccatccgttgctacggctgacgccgccgccgccgacgccgccccgagcggcactcgccggaccgtgcgctcgatttgccggcgttccattgcacatttgcaggtgtgcatgtttactgtagtaataactaccggtatcgtaaactcgtcaaaggaacctgcaaattctaagtcgcggtgtacgcgattgtgccattgaaagtttgaaactgtgggagtatatatatctgtgttacaataaacgcactgcttgtcaaggtgcagtatagttatgctgtatttgcttcattacctgatcatcgacgcacgcgttatttccttttgtgggattaactaatgatgtacattttcagctggttgttgagtcagttagcagccataaaatagggccatttgaatcacaggatttatttagaaatttcatagaattcaaattctatagaaaatttttctatttggccctttgattcaaaggattgaagctttccaaatcctatgaaattcctatggaatggcacattgcatgtggattttgaaggaaatttagtaagagctctaaactcttggaaaattttctttgaatctatctctctcatctgattcctgcgtttttccgtgttttgcgatcatctgttttacacttcaatttctgtcagaatcatgtgtttttcctattcctttattttttctaccatgcaattcaaaggggcccgtcagccgaattgaggtggcgatggaccagaggcagactgtagttggcaaacattttttcagccacgtgtgctggtgaaaaggtgaacgttcgtagaacgatttgtcgcgcgacgaccagtggccacgttcgtcgaggtatcaaactgtactgatctcgaatttaatagccaaacttgactggcaaatctccaaatctcgcgcggcgctcctctccagtccacggtccagtcgctctcgctccccggaaccaggcgagcgatggccggcggcgacctgcgcagcctcgtcgccgtgtgcgccgcggtgaccgcggccatgtggtgcgcccgcttcgccgcgcgccgcctccgccccggcctgccccgcctcgccgcgttcgtcccggtgctcgccgtcctcccgttcctcccgctcgccttccgcgcgctccacccgcgcgccatctcagggttcttcctcgcctggctcgcggagttcaagctgctgctcctcgcctcggggcagggcccgctcgacccgtccctcccgctccccgccttcgtcgccatcgccaccttccccgtcaggcagcgtgatcccaccaagaacgccccgggatcccgccttggccccgtgacctccggcgtgatggcccgcctgctagcggccatcgtgtcgctgtaccggtacaaggagcggatgaacccgtacgccctgctcgtcctctactcgctgcacgtgtacctcgcgctggagctcgtcctggcgtgcgcggcggcggcggtgcgcgcggtgatggggatggatctggagccgcagttcgacaggccctacctgtcagcgcacctgcgggacttctggggacggaggtggaacctctcggtgccggcggtgctccgcccgtgcgtcagccaccccgtgcgcgcgcgcgtcggcgagggagccgccggcttcgcggcgggggtcctcgccgcgttcttcgtctcgggcgtcatgcacgagctgatgttctactacatcacgctgcggccgccgacgggggaggcgaccgcgttcttcacgctgcacggggcgctcgccgtggcggaggggtggtgggcggcgcgcgaggggtggccccggccgccgcgccccgtcgcgaccgcgctgacgctggcgctcgtcatgtccacggggttctggctcttcttcccgccgatcacgagggccggcgccgacaaggtggtgatcgccgagagcgaggcggtcgtcgcgttcgtgcgggacaccggcatctgggcggccgcctccgtccactcggctttgagtcttctttgaccggccgctcgcgcgtactgtagtagtagtttgatatgatgggtccatctccccatcaaaatccaactctacgaatactccagcaagagagtggatcagacaactggtgtctgtcatggggtcccctattcatcctatgttgtcctgattctctgacatgtttgtattggatccattttaaggaagggatcccagtgcatgtttgtctgttcgcttgttaataagatcacgcgtgcaacccggaaaagctaacgcgggcgtgcccgttggcggcgagtgtttccaataatttagcctaattaactaagtggttagtagataataacggtaattaagatatgattttcttttttccggaagattttttctactaaccgattgaaaactttcaagttagatttgaaaacttttgaagtcaaattttaaaaactttcaaaactcaatttgaaaattttcaactcgaaatttaaatgtgtaagacaaattttgaaaactttcaactcatatttaaaaactttcaactcagatttgaaaactttcaactcgagatctgaaaactttcaagttcaaatttgaaaaattttaaaattaagatttgaaaaaaatgaaaactttcgactcagatttaaaaactttcaacttgagatttgaaaacttttgactccgattcgaaaattttcaactcaaatttgaaaattttcgactcagattcgaaaactttccactcaaattcgaaaactttcaactcgagattcgaaaactttcaaatcagatttaaaaattttcaagttaaaatttaaaaacttcccaactcaaaacatttttgaaaaaaataagtgtgctaaagattaaaaaaaagtaatcagaaaaaaacgaaaaaaacgcaaaagaaaaggaaaaaacaaatcgcgaaaaaaaaagaaaaaatggctgatgggccgggaggcccgggagcagctggcgcgcgcgccaactagcaatcccctgtgcaaccagggccatatgggagaattgtttggaggctctgtgccaaacgtaaaattttaggcccttagatttcagaattgtaattctaatttgagtcattatttaacttttacaagagtttgcctacatctaaggcttccgtatctacatccaaccattttcagaccaagacgtgggagtattgtttttctcccatatctccatacagagctaatgagttttacagttgtgctctcctcttggtctcggtgcatagaccaaatatgctgatcaaacttgaatggattgagtatatgttggtggttatggtgtataataacaaatagctacattttataggtatctctcgctaaagatcaacttttgcagtgttcaaaaaactaaaaccataaagtcccactatcctgtaataaaatttgtctaaataattttggtaccgagcatgtgaactgagaatgatggtagtgcgtttcatgagccggatagcgatttcggaccaaaccccattctgttgagggcgacttggatcgcgaataactctggttttctgttaccaacggactacagtgatatccaccggcggcacttggatttggcggtgacgccatggagaaagaatatatcactttcaagtgagagaacggagttaaacactgcagcacattttgttcgcttgataacatgggctgtagtgagcagtggattgtaccatcggcccatggtttgcatcaccgggatgctttaatttgttccacggcgactcggcgagcgcccaatttatcaaagaaaacttgacgagttgattggcaaattcagcaattccccgtctcgtgccaatctgttctttccgtcgcgccccatcgaccggaccccgatgatggccggcggcgacctgcgcagcctgttggccgtcgttgccgcggtggccgcggccatgtcgtacgttcgcttcgtggcgcgccgcctccggcctggcctgccccgcctcgccgcgttcgtgccgctgctcgccgtcctccccgtcatcccgctcgcgttccgcgcgctccatctccgcgtcacctccgggttcttcctcggatggctcgcggagttcaagctgctgctccttgcctcggggcatggcccgctcgacacgtccctcccgcttgccgccttcgtcgccatcgcctccttgcccgtcaggcgacgcgcgcagcgcgattccgagaacgccccgcgcccgggccttggcctcgtcaccttcgccgtgatggccgcgctgctcgccaccatcgtgtcggtctacccccacaaggagcggatgaacgagtacgtcctgctgatgctgtactcgctgcacgtctacctcgcgctggagctcgtcctggcgttcgccccggcggcggcgcgcgcggtgatggggatggacttagagccgcagttcgaccggccctacctgtcggcgagcctgcgggagttctggggcaggcggtggaacctgtcggtgcccgcgctgctccgccagtgcgtgagccgccccgtgcgcgcgcgcgtaggcggcggcgtcgccggcgtccccgcgggggtgctcgcggcgttcctcgtctcggggatcatgcacgaggcggtgatctactacgccacgctgcggccgccgacgggggagccgaccgcgttcttcgcgctgcacggggcgtgcgcggtggcgaaggggtggtttgctgcgcacaaggggtggccgcggccgccgcgcgccgttgcgaccgccctgacgctggcgttcatcctagcgacggggttttggctcatcgtcccgccgatcacgaggaccgggactgacagggtggtgatcgcggagagcgaggccatggtcgcgttcgttcgggacgccggaagctggcccgccgcatccgtccgatcggctttgaccggccactcctagtttgattacgacgggtcactggcgcatctctcgttcagttcacggtacaaatttgtatattgatttttcgttagatttggagctacagatttttcatgtagctttagatttatgtatatagaaagaaaaaaattatttgattagtgctgctaaatttaaaattagaaattcatgatgaattaatacaaagttatactcgttctatattctcagtcgtagttttgcatgattataaactggatcatcctagcatgaattttgcttatattgatccattcaaccgttccattgctcgaccatgtatgcaacgcaatgattcgtgtggtggactacgccatcacttcacatgggactaaggcacggcgatctgccgtgctggagcttgatcaggttgtagtacgtcccggcgcggccgacggcgaggagctcgtggtgcctccctctctccgccaccctcccgtccttcaccaccgcgatcgtgtcggacttctccaccgtcgagaggcggtgcgccaccacgacgcacgtcctcccccgcagcatccggtccacggcgtcctgcaccagcctctccgacgcggcgtccagcgcgcttgtcgcctcgtccagcagcaggatcctcgcgtccttcagcaccgcccgcgccagcgcgatccgctgcctctgcccccccgacagctgcgcgccgcgctccccgacgcgcgtgtcgtacccgcgctccatggcgctgatgaacccgtgggcgttggcgagcgccgcggcgcgggccacctcgtcctcggtggcgtgctcttcggcggcgccgtacgctatgttgtcgcgtatcgtcccggagaagagcgtcggctcctggctgacgagcgccacctgcgaccggaggcgtgcaaggctgtagctcctgatgtcctcgccgtcgaccaggaccgagcccctctgcgcgtcgtagaaccgctcgatcagcccgatcaccgtcgacttgccggacccgctcggcccgacgagcgccaccgtcttccccgcgccgatctcgaggctgaatccggcgagcacggccacctccggccgcgtcgggtagctgaagtgcacgttcttgaactcgatcgcgccttttatctccttccgtttcttcttcttcctctcgttgtcgttgtcgtcgtccttgatcgtcggttcacggtccagcgtgtcgaggacggagcgcaccgcgtcgccgccttgcgccaagtccgacgtcaagctcccggcgtcggcgatgacccttcccatggtcatgagcatgaagaacacctggaacaggtgcgtgggagtgatgagccccttggccatgagcttgcctccgtaccagagagcgaccgccatgctgccggtgttgctgaactggcacaggcacaggcagaagccggagaaccacgagtgcgccacgttgtccttcttggggccttgttgcgcggcctcgtacaggcggagcatccgccgctgcgacgagaacgcggtgatcgtccggtggttcaccacggcctcgctggcgagctggctcccctgcacctgcgccttcttggccttcttggacatggcagccatgagcaccttcttgaagtagaagctcgcgatgatcagcggctgcatggccatcatcaccgtggcgaggcgccacgacacggcgagcgcgagcgagaagcccagcgacgccgtggcgcccgcctggaccagcaggcacatgcggtcgccgacgagggagcggaccttgctcgactgtgtcgccagccgcgcgcacaccgcggcgctcgagttctcgtcctcgtcgaaccacccgacctcgaaggagaggatcttggcgagcatctggccccggacacgctccgtcaggcgctcgcccatcaccgcgaagttgtagtgctgcacgatgttcgccgtgatgcagacgacggcgatgccaaggaagaggaagtagtacaacctggtcttggaacggatctggccatcgtcggcgaggaaataaacctccggcaacgagcctaggctgtacgagtacagcggcagcaccgcgccgaagacgacggcgccaacgcacccaagcaacgcctgcttccactccggccggttcatcttcagcaggcgaagcttcgagggcttcctggagcgcgccacaccgtggtccacgagcttcctcccaatctccgtcgagtgttcgaccgagcagaacgacggcgcggggctaggacggtgctcggtggcgctgaccgccgacataatctccacgctgcggaacgacaccatctcgctctccaccacatccacggcgcggtggcgctcctccctcgccgccacgggtggcgccttctgcaggtgcaccatcctggcgtacacgccgccttcacccccgtcgtccatccccaagagctcgtcgtgcgtgccggcctccacgacgcggccagcgtcgagcaccgcaatcgtgtccgccttgcggagcgtcgagaggcggtgcgctacgatcacggtggtccggcccacggacgcccggtccagcgcgtcctgcaccgtccgctccgactcggcgtcgagcgcgctcgtcgcctcgtccagcagcaggatcctcgggtcccggacgagcgctcgagcaatggcgatgcgctgcttctgccctcccgacagctgcgtcccgaactgaccaacctgcaccggagaaaaaaaaaatacaccataagattcagcgtgctgtagcatgcactgtaaaaattgctgttgcttgtgtacatgagtttcgtatccatggggcaacttgacgatgaactcgtgggcattggccatcttcgccgcggcgacgacttgcttcaacgaggccgtctcgtcgccgaacagtatgttctccctaatggaggtcgcaaacagtacaggctcttggctcactagccctatctggctcctaagccactccacattgagcgtgtcaatgccatggtcgtccatcgatatctccccggagtccgggctgtagaacctctgcagcagcgagatcacggtggacttcccggacccgctgccgccgacgagaccgacggtggcgccctcagagatggtcaggttgaagccgttgagcaccagcgtgtccggcctcgacgggtacgagaagtgcacgtctttgaacacgatctcgcccctgatcctttccatggtggctcccttcttctccgccccttcgagcggtgggagcatttcgatcatttcttgcatccggctcgccgccgccgtcgcgtcaatgaagtaccggaggttcggcagcgccatcatgatcgacctgacattagcaacaacagcacgaacgtacattatcggtaaaaatgtcacttgttttgaaatggagggtgtgtttgtaatttgaatgcttacattcccgccaaaacgatgcagatggaggcgacgaacacgtggccgccctgggcgtgcaggtggatgacgaggaggctgccgatccacgacaagaaggaccagacggcgtagatgacgcccatgctcccgatcacggcgcccttgatgagcccctgcctgacgccgagcgccgcgctccgcgccaccgcgccgcggaaccgctccaccgtccgccgctcagcggtgtacgacgccaccgtccggatggacgacaccgcctgctgcgctatcccgcccgcctcctcgtacgccgcgcgggcctccccggccgccgcggccatgcgcccggcgaggagcacgctcggcgtgacgaagaggaggagcgtgaacgggaggcccgccagcgcgagccgccacgcgaacacgaacgacacggccagcgcgccgaagaagagcgtcgcgttggccaggaccatggggagcttctcgccgaggaagtcctggatggcgtcggcgtcgtcggagacggtggagatgacgcggaacgtggtggcctgggcctgggcctgcggcgacgacggcgaggagggcgcggcgtcgaagaacgccacctcctggctcaggacggcctccaggtacagcctcctcatctttgacgcctgccgttccgccgttctcgtccagcacagaccctctgaagatcaccaaccaacattcatgttctccatgatcgtccaaagaaaattctcaccgatcaaacactacttctgattttttatcactgatcactaatttgtttgattcaaagttgctcacctaggaaggagcaggcacccactgcaacggcgacgtacagtaaccgaagcgcaaactgcaatgcagcttacgcgcaagaataagattcaggaaaggagttgcatatggaaacgtaaatggatggcacgattgatcaccttgtcgacggcgccggagctgaaggcgctccgggcactgccggcgccgccggcgccgccgtagctgttgacgatgtcgccgagcaccagcattgacagcggctgcatcatgccatcgccgaagctgcccagaacgcccagcgccatcaggcaccggtcgtgcgcgtcggcgtagcgaaccagccgcaggaacgacggcttctccttgtcgcccatcgggcctagtttccaagcgaactaaccgattgcgttcgaagcttaaccaaaatttctctactattaatcagctaactgccacttagtcattggctgtctgtcgtccaattagacggattaatccgagcttgtcacgtagcctgctgtcagagaaggcctttcgagtgaggaatataccaatcatatcgaaatctggtgagtacttccgttttgtcccgaacgatgcagccaagccagttcaaataacagtagagaagaatatgttatactccctccgtcctaaaaaaaaaagcaaacattggatttctcttatatgaaaattttttataatttgtattttcattgttgttagatgataaaacatgattaatattttatgcgtgacttgtctttttaatttttttcataattttttcaaataagacagacggtcaaacgttggacacggaaaccagggtttgtctttttttttttggatggagggagtacgatcgtagagtagatacccatagccattagcgtgtgtttatagcccctgcttgcagttaatttggtttgtatattccgccggccttggcgctagcttttgctcgtagtctttttcttcgcaaatctgatatacgaagtgcagctgttcccttccaagttccaacaaaaggggatcgagaagaagcgctggcgtttcactctcatcatcctaacttgcagttggcacacgtaaaaagggtgcgtgccaaatgccacgctgatatataactttcactaccccgcccccatgtcaccaccattcacaatcctctcgtacgtaacattaccaaccaggacgctggtcgcccacacgtacctggccaaagctgctcccttccttgtttcatcgatagccaaagtccctttcggcagcgtggtccgccagaatctgcgttacctgacctcatactttcacaggttcacagcccccggtgcagcgtccatcacccactgcagccgagtgccatgtgcgcaggagagccatttttggggcagtaaaggtatcacgtccgaggcgcaccccggctgcaatggctgcatcttcctggctattcatcagtggcgtgtgctcgtacgagcgacctcgctctgtctgcagcctgccggtcgctcgttttccggcccgtttttcgccgcaccccgcaacgccccgcacagaaagcgccgcggcgcgggcctcgcgttacggggaaagcgagcggttggttggccttggcggcctactggctacacgcgctacgccggcgaatttgtgaccctagtgggtacggtgtgggttgggtttggccacacgaattatcgttgtttgccttgcctaccgccgtcgcgcccagcaccgcatgcccgcggtgtcgcagccgggatgcgggaaagtttcgtggagaacgcattgagacgttttgcatcgttcacgagtccctcgctctatccgatatatagccgtaggcatacgcgatgggcaaatgcatatgctactacttccatcccaaaatgtgtttacgattagatttgacactatctaaggacaccatgtaacgatttatcgggaatttgtttggaaatcgtcgggatggaacacatttgtccacatataatgatgcatcgatgaatgttgctcgttcttgcgagacccgttttcgccgaggtcaaatcctctttagaaaacaaggagacacgaaaggtaaccaccctacggcgcctttctttcatctcgagtccaatccaacgccacccacatctattcgacgcacgctatatatgtttgtatcaaactgtggacaatgcgattgactgaagtctgaaaatatgcatcatgattacattgtccgttttctacaaactttgttacgtgactccttcaattgaagaacccatcgttttcccacacaaccaatgtagtactagtgccacccaaaaagacccgccccaatcatgcacgccctggcagggtgacacaagtgaccagcggagccgtgtcacctgatcagaaaaaccaaccaatccatgccatctcgagctcacgaccacttcatctgacaaccaccagcagcaggcagcatgcacgaaacgcggcatattatcattggcagtactacgaatccatatgatgcaacaaaaaaaagcgagacgtgctcttttggatcgtcttgatcgcccaaccacggcaggccaggtgttctgctgttggcctacctaggctgcaccaaacgagcaaagcaaacaaacgcacatgtgcgcgtggttgcccactgcaattgaagcggacaccaccgaagatggcttcgtgcggtgctgcctgtggtggctgcacacaagttttcaggtccctactcgatgcggtccttgaccctgctcgcgagcgcgccacgtacacctggaggctgggacgccgtggagacacggatcattcgattccgtggtgccacaacccgacagggccacaatgccatattgccatccaaggaaatcacaacccaacacggtgataccgacggccattaggctgctgcgtgccttgagctttgcatgctttttagggtctatttaaaaaatatagcttattctacaatcttctgctcttaaaaactcttctcaagcagttcagattttcatacagattttaaaaatatgcagttgtaggattcagaaaataagctagaatatagaaatgagaaacctagcttttctatattttcaccagctaaattctcaccaagtgtttctcggaatattaagccttccaaacagtatcttagtgaccagttggcagttgcttgcgatttggcaataatttatgccccaagacgccgttaggagatacgtaaatgtcgttgcaggacaggttcctttgcttgagcgaacatgaaacgaacatttcgaatgattggttgcattttcgctcgatcctcttgcctctggtcgcttttatcacctttgcgctagtaaaagagtgaacagtgcaaagcatatcaacaacgcttggagacgaagcatgtagatggatccaggctttccagttcgatctgtgtctctgcccccagttcttgcgtatgtcacgctcacgcaagaactaactgatcctgatgatacgctcgtatagtgccctaatcctgctcaagaagacaaccggtctttgaatttagtggccgtgttatctgttatgttatctgctgttgctgcttatctcgtcgctgagcatgtgcctgtcgccgtcgtcactgctcacctcgtggcactccttgctgattgcactgtggattttgtctgcagattttcttagcgtgacgctgatgttactgtgcagattaaaaaaaaaacactgtgtagttgctcgacgttgcgatcagcttgatatcatccatttccaatttgctgcttcttgagtaaacaagcgcaataggctgctcaatatcttccaatggcatcgacttgacactgatccattgatcgcctgttcatttcattgagttaactcattggcaactcttcttttttttcttttcggtgttaatttcaaacctactagaaatctccaatttgtctgcgtgtatgtaatgattctgttcaaaaattgttcatgtcacgctctgaattttgaaacccacccctgcgaggtaaaggaaaggctgaggagcatgccaaaagtgaaaaatgacaacagattagtttatgttgcattctccagaagggaacatatattctttgctgcttctccactcaaatcacatccctgacgaccgtgaaatctttttggcaaatctccactaaacacacccattgtttgacaaatctgctctgcaaatacagaacattttgagatccgagctgaataagctatcaagatggtagtcgtagaatcatattctagggtggctatggagctggcaatgggaccagaaagcacactgcacacatacccgtaacacaggcctgcttaaatcctgcttaattttggcgtaaagtgaagcaatgagagagagagagagagagagagagagagagagagagagagagagagtagttagggagcagcgattaggatatgatcctcatttgacattctatatattgcattgctttacatgtagcccccatgctcttttttgcaccatatatattcggttgagatttgtccaacctcttataagtcataattagcttttcctttactgcattaagtgttgtaagataatgttgtctaagtagtccactcttggcatcacatgcatgttggatcaaatggaggtagcttttgcagtatctcgttactagcaacatatactagttactcaaaaactttatataacatgatctactctctactttgctaatagtacaatcttgtctctcttacatgatcagccagtaagagcatttgtcctcagattgtttttctcaaggacgcttgtccttacctcctgccgtttcctccacagcagatttgcaagattttgttctccaatttgcagcagccttcgttctctgatgagcttgcatgttggataaaaaaataatactttctgcaaaatgagtatagctcaactgattaagttttttttaatagaacaagttcacttcaagttttagattgacatggatactcatatttgcggctatttattctttcagtgacagacaacatacccatcaacagcgagacatttatttcgttaatctctagatgtatcggtccaatctttccgagatgttcataatgataggacgcacgtctatatgtttatagtgtatgcgtatttgtgagcgtctatatttatattatgttttttgaaaaatatatcactatctgaccactaagctcaaccagtaccacacgctggttcagttatcactgaaaatttcgaaacgcttctttcagagccaaattgacaatgcgtggcagtggaccaacccacattgaattgtactatactccttcaaagttcacactaacacacaacacaggagaagatggacgtgtcaatttacggatccataggtgaagccataaaacgcatgcggctcacgtttcaagtcccgatacagtttgccacgttgaaacaaaaaccggtggttccatccgacgtaaacataacatcttacccatgccgttactggagccgagatgtcagtcacgttacggtcgtactcgatcgtacatgttttgcacgcatatttcttcagcgtatggtcctgacgcgaaccacttgccgaaccgtcacttcggagtccctactgttcatcgagagagagcctctcgtgtgcacgcacaaatggaattgcacagggctaattggcacttgacactttggtacaggccgcgatgtccaaagcaaaaggtaccatacattttagtgttaaattcatagcctcgtttgatggaaaaaatcacatcggtcccgattaattcatcaggttagaatgtagtatgaaaattccggggaggcagtcgaggcactaatcctggaccaaacgtgatctgtacactttgtaagtgtacagcaagcatcacgatctgagattgagaagctggtgtagaagttgatcacatcacacttatttcttcatttttcttttttttttttttgcaaagatcacacgttgacgcagcggcgattccaaccgggtggatcggacgacgtcgaccgaccgtaaggcggggcgggctcgcgccatcgaccgcacaccggtgcccccgacacctccgccccgggctgtccactcgaaccgagcgcgtaccgacaggtcacatcggggccatcctgaccgtccagtctcccacccgtacatgtgccggacaatccccagtcgtcagatggaggaagccgacccaagcctgcgcgtacaaataccccctcctcgcactcgaaccaactcctccattccacggagtcgcggccgctgtcacagtgggtggtggtgtctcctgatgcggcttctcccgcggctttgcatggccaccggcgacagcgcggcagccgccggcgagggagacagcagcaatagcggcagtaagcagcaggcagcggcggtgtcgtcctcctcgtcgactgtctcgacgtcgtcttccgccgcggcggccgcggtgtcggaggcgtcgtcgtcgatgtccctcccttcgctgccgtcgctgtcggatgtgacgggtagcatgagcgcaagcctcgccgcatcgttcgcccatgttactactctgtgccctctgtccacggcggcggcggcggcatcggctgccgccgtcgcggcggcggactactcggttcacggcggtggtggtctcgtcgtcgtcgtcgccaggccggcggctgtggtcctccacgacgtgttcaccatggaggcgacctccacctccgacatggcggatgatacttcggcggccgggtcggtcaagtgcgtggcgcaccttcatggcggcaaggccgccgtgacggggcaccaggacgggaggctgcggctgtggcggatgtcctcccgcgcgcccgaccggctccgcctcgccgccgcgctccccaccgtctccgaccggctccgccggttccccgtcccgtccaaccacgtcaccgtccgccgccaccaccgtcggctctggatagagcacgccgacgccgtgtccggcgtcgcggcctccgccgacggccgcctcctcttctccgtctcctgggacaagacgctcaaggtgtgggccgtcccgtccctccgctgcctccagtcgctgccggcgcacgacgacgccgtcaacgccgtcgccgtcgcgcacgacggcacggtctacaccgcctccgccgacaggcgcgtccgcgtctgggcgccccgggcgccggcggccgggccagacagggcctcgcgccgcccgggcaagaagcccgcctaccacctggtggccaccctgtcccgccacgcggcggcggtcaacgccgtcgccgtcgggtgcggcggccaggtgctctactccggcggcaacgaccgctgcgtcgtagtgtgggagcgggaggacagcgcgagccacatggtcgcggtcggcgcgctgcgcgggcaccgcagggcggtgctctccgtcgcgtgcgcggccggggacgccgccgacggcgcgctggtggtcagcggggcggcggaccagacggtccgcgcctggcggcgcggcgcggacgggcgcgggtactattgcgtcgcggtgatcgacgggcacgggagcgcggtcaggtcggtcgcggcggcgctcgtgacggcgcagaagaagcgtcgcgccgacgacgacggcggcgacgaggagtggagggtttgcagcgccagttttgacggcgaggtgcggctctggtcgctgcgggttgcggcggcatcgtagcaaggtcccggtttggcacgatttttgacgtagaaaagtgtgcgtttttttcttctttttctgttcgtttttggactcacggaagtttgacttgtttgagaatggagatactcctgcctttgtgtatatacgggagaggggagtctctacggtccactatatttttggactttccaaaagctgcttattagtagtgatttcaaatttgcttacatttttcttcagggagtgtacatttcaggtgtctggatttttcaaaagatacagttacatttctcatccttggatggtactaataatcttatggttctcataaatccccaaatgattgaaaaataaattattctaacatataaaaatttacaaatgacacgaaacaaacttataattaataaaactttacaaaactacgtgcaaaagctcttaagtagtgatttcaaatttgcttacattttcctacagggagtggacatttcaggcgtctggatttttcaaaaatacagttacatttctcatccttggatgatactaataatcttatggttctcataaattcccaaatgattgaacaataaattattctaacatgtaaaaatttacaaatgacatgaaacaaacttataattaataaaattttacagaagtacatgaaaaaaaccaaatacataaaaataaagtaaaaccatatataacaagaaaatcacagtaaagtgaaataaaattgcagcaattttagggtttagcaatgtcgtgcaattttaattgaaagaaatttttataactttcataagtctaaaatcttgtaaatcaattgtctttatgtgtgtggagattatgggtaccccatacccacacgacatggttatcagactagttataggggatagtttagatctatggaatatgtaacggatcataacttgggtattacgttttcttgtatattacggaatggcgtaaagttttggtttgataatagatttaggaagccgatatcgtattagttaaggtttctgtcttgtaatcctgtcccccatcctatataaggcaggcaagaggccctctagggcatgagattcacaactagatcgtcaaatcaatactacacttggtggattcaaatccccaaacaggagtagagtattatgagagggttgatgagagggtctgaacctgtctagatcttgtctccacatctatccacttttagatctcgtgcgctatcccgtttatattgccgaaatcctgttttgacaatgtgttttttttttttgcctttctttgtgtgctacaacaatagctgtgttatctactttgacaaatataagaccagaagaatagcgagaaagacccacctaattggttcatcagcgttaggctggtgtcctgttctgatctgtaactttccaaaaggaaaagaagctcttcaattgtcgtctctcactctagcttggctatcaagtgtcaaaatcgacatgaatggctcagtaaaaagaagtcaagaaacaatctatccattcaatttctcttcaggctgggctactgtcaaagcagataggagaatgtctgacataactatcatccacagaatacaaccaaattaccaaaatgaagtaactgaccgttcattttgcaccacgataaactccaaatctgacgccaatcgccgatctgccaatggataataattgcacatatagtttgtagtttgtgggcaacgcagcattgcagctgcatgcctgtaaagcgggcgtgtatcgctggggatttggagttggagatgagatcgatcgatctggagcaagcaaagcagcagagaggaagtgcaggctcgatcgctttcatgctggcgtgatcggattgggatcgacgtgagcgtgacgaaccaaaccctaccgatctcgctggatacaatgataagattctgtgcgcctctgtcctgcagacgagttggccacgcactgcaatgatccatgcacttagcagatgattatgactaggttttagctaatctgatgcttaatcccttttttgggtctgcactgttgctgattcgcacgatccgatgctagaccgatttatcatggtacctgctacacccttttgatttttgactcatgctctgtcagtgttaaggcctaacatatgtaaacattgcctgccagctcttgcctgctgctgcttgtcgtgtgtaacctgaatagcactgctgtctggcttttagccatgtcaatagctttaagcaaccgacctcactagcaagggcccgctggttacctttggagagatgcgatgcgagtgaaggactgttgtaaactgtccttgaactgaacattttgctgttccttcggttctgtttctgtgcatgatgaagccgagcagcaagggggtatctgctgcagccttttccccggagatattttagcaaaaaggcaggccaggggttggtggtgcctccatgagctgaacggcaaaccgacacacgccgataaacacaatatctatccattcgattgtatacggcagcttatatccgataagcacttgtattatagtattctagagctaagcttaatcaacccatgttgtagcagtagtatatctgtacacatcacccttgaggatttaaaaatcagtgtaaagtaatcccacttggcgcgcggtcgcagataacacgagcctcgcagttgattcgcccggtggcgcgaggcgtgcgtggagcgagctacatccagggtttacaaaatcatacagtcactatggttatcatatgtgatgttttttttttcagtttttaaaccatcacacggtttgataaatcctagctacactgctagtacatgatgacaggcgtgagagtaaggtagaatgaattattccctgtattttataataagtaactttgacccgacgtgaatatgtgatatatctagtattataaacttaaacaataaatctgttacattgaatcaatattttttttatttgatgatgagtgtgaatatcgagtactatgttacatccaattaaaactttttatattttaagatgaaaggagcaacgagtcagcgcgagtcgcgctaatgatccggcagcgttggcgcgcggtggtggcggaggagcagcagctcgatctcgaccgattagttaatcgcgacactgactcacgtctgcctcagcgcgccgccatcttcttttaatcacgtagccacgtaggtaggcttcgctagctcgaggagtcaaatgcaatttatgtagctggtgggatactagcagcaggttaggaggagattcattcttttttttttttactttttttgtaagggaatggattgttaatgtgggattcaactggtggtgcgtgcattggcacgtcccctgattatgcaggtcgtgtatagaaatatttcaggagaggtcctcatcgtggagtatttgaccagcaaatgtgacaatgtgaaaagatgatgcagctgactgtatcgtccaagtgtaagtcagcgtggcaggctggaataacctggttagtacaaagaaatgccatggatcaggtagggtaggagtatgtcataaacaagtggcaaaaccattgttctgccacccatagtttcaaattttcaatcaacgggaggaagttttaggtgcatgaacgaggcaccacgtattacactagtatttactactcgtacactgagattgtgcattttgtttccatctactagtacatatatactagtgtatgaattgacgtgtagtgtacttgtatacagtgtggcacatggagcctattaagtcttggaatattctggcattgttagcttcgtcaacacagcaaatggatcaactagcaagtcggcacagtacctagctgctcacaagtcagcacagtgagctactccaacaatggacatcctattgagtattgtcacagctcacaacgaacacagagattaagcatgcgacgtgatgtgatggcaaataatactcagtccgtagtcctaaaatctaaaaaactacgggcggagctagaacaaaatgaatgattccattcatttgttactttgatttgaatcttgatacgagtatctaaatttaaactgacaggatatataaacatatggtgaaaatagataaattataactaatttttcttttcaaccgggttcccggacaccccctaactatacatagctccgcgcctataaaaaaactaatccttcgttagttttaaaatattgctatatatagtatatgtatgtgatgtgatattttctagtaaaatgaaagaaatattacatcatatattaggtacatagtagtaataatattttaggacaaaacaaggtataactaaatttgtatcaaattcgattcgagattgttatattttaaaattgaaggagttcatatttagttcctgaatataatttgcattttcataaggaactcgtgatacagtacatagtagcggtttcccttaggccccgtttagttcccacacaaaaattttacaccctgtcatatcaaacatttgaacacctgcatgaagtattaaatataggctaaaaaataactaattacatagattgcgactaatttgcgagacaaatctttaagcctaattactccatgatttgataatgtagtgctaaagtaaacatttgctaatgacggattaattatgcttaataaattcgtctcgttgtttactgacggattctgtaattagtttttttattagtgcccgaacactccatgcgacacctatataataatcgatgtgacacgctaaaactttacacccctagatctgaacacccccttactcgttttttgtttgtcccctacacacggttggtgcctcttggcctgatcgattgtcttgcactctttgctgcggctgcggcgctggaattgatcagctcatgctcatctggtatttttgcggagcaagactctgaattgattttatgataatatttcaagggtacaaaaagaaaataattaagcagcacaaagttgatattttaaatactatttctaagaaacttacatataaaaaaaaatgcggacaccattctgtgacaaataatctataccggcggggccaaagctgctgaattggcagtagagctcctgtccaatttctgattgtaccttgatggacggatctatattgtggcgatgaaccaaacaaatccgacccgtacgcgtggcggtggcggtcggtgcacgcctctcctcaccccctgcacgctgcatttttcagcaggtccacggcgtgacagtctaacagacattggcacagaagcttccacccgccaagccccatgattggatggagcgagccggccagatattccgcttccagaaccttcacccacagaaacagatcatgctcctgcagtagctaggcgacgggagaagaagaagaaaaagtcattaaagaattgaagcgatcgatcgcgtttggtcaactgtcaccagtgctagccctgccccaggaagcagacaaggggagaaggagaggaggccccatgacggcgacgaagaagacgatgatgatattgataggataagagaggggccctatgcttaagtcgaacgcatatggacgcatggcacgctgttgttcggatctcgcaaaacgatcaaggagcagatctgacctgcgaaatggatgcgtcttagctacctgttctgcttgtcaagttgtcatgttgtatctccaaagtccaaaccaaaatgcactcgaaatagtgatcgcaatttgcaagcatggagacgaatggcttttagaaatcacaagagagagagagaggtcgcacggtttgggggaagtggtttctgaacagtgaacaatgtatagtacataatttgtttggacttttgactccaggaaagtttcattctttaatgaaaccctccacaccaaagaaaaaaaaggaaaagaaaacgaggaaggacgcaaggtttcttaaacaatcttcagaagttggcgagagaaactgaaaagcggtgggaaacagggaaaggggaagcagatgatttagaacagttttgctccttcaaaggggaggagttcgttcacggcgatgatagtcccctgaaaaggtcgttctctgccttttctccgaccatcctgactcacctgccattaaggaagcaagcaggcagcttaatcacgaaattagtagtataccaaggatgttcaatcacgcaagattaaacaatcctgaagttaatcagggcaatgctggccatcttcaaacagattaaatacgagcccctttacgacatgcgagcatgatatgggatgaccagaggaaacttgcagccatcgtctaggcgagttggtgattgacttgccagttcaatcaacaatttgcttttccattcaaaaaagaaagaaatgaaccaaaaaagctttacctttcctgcaaggtaaaccatctcgcgtcagcttggcggctagcaagggagaaaatggagggaaaaggctcgaagaggcctattagtagaatttatagcccaaaataaaacccaattcagtaaagggatcacctgaaacgggcccaccaaggccccccttgaaaccccttcccgccatttacttgccctaatcccctccccctcccggcgttttcccgctcgcggcccgggcgaaacggaagccacccgcgatggagaacgaggcggcgcgcggcggcgagaccttcgatccggtgagctcccccctccttttgatcggaataaatccagttttggggttgatgcggtacgttgacggggcttgttttggggatctgggggcaggatctgatccgtgccatcttcaagctggtgtgaagccgccggggcaaaagggccgccgccggcggcaatgccggcgacgaggtcatcgaggtcgaggtgattccttgatctggtcccagatccttgcctccaaatgattgttttctgtggccgttcttctttcagctactcctaatctgtttcagattactcttctttctgttgtgtatgtactctggtctgaatgtttccttctctaattgacagcctgccccggagacatcaaggaggaatcgtagtgccactggtaaatcaccttctgctacagtaaaacatgcgatttatgcgttttgctttgttacatctgattagtctccttagccactggtaggaactaggaataagcttgaccatgcacatctgttggtagtattcggtgctgttaaatggcagcaggttatcaacactagtggcagcatcagaagtttttacatttcttgcaattgccttttggagctgaatctcatcagtatcaactttgctaaattctcttattactagtaactattactttggagtttgggtaactttacagtgatgtttacctccgtttcacgggccctgtgggtggcaccttattttactttacaagcgaatcctgacaacaatttaagttgtgcaatacagagggcaacaagaagtctatctgatttcagcatgacaatcaatcggtccaggcgtccagccacttatgatgtaacaggatcttgttggcatactagtttagacattcatcagttagtctgtcctcttttatagttgcatatgctgcagcagtggacatttgttgatcatcttggttgtacaattcagtttttgttattgttttatattgtagcagatgggctctagacctctagtcctttcagggtttggtatatccttacaacagcaactaatgccagcaccaagtgtgccaaccaggctataacaatttgaccctgttggcctgttggataagaaattgaaaatagacctaacaagtaacaataacttgtctcaaatgtttaaggcatcctagcgaaaaaaacaatattatcagattttgtctctagtatttgttaaaagaatagctgtgagttgtgaaaaaccaagtcttgttaaattcaattctgtgcgcccaatcacctaatactgaaaaaagaatctccacccttagatttctgttggggtagtttaaatcttgaacttgaaattaactccctatcatcctatgagagccttcttgtgtggtgttgacaatctgttcaccttcacagccaacgccagtgcgcttaaagtgagctgtgaacttctacggatatttgtcacaggtatgtacctcttaaattgttctattgcctcatggtgttaagtgacatgaagtcaatactccatagctacagtgtaactagagaaattttcttgcagaggctgttcaacgttctgcttttattgccgaagcagagggcacaacaactattgaacccacccatctggagcgtgtattgccacaacttcttttggacttttgaggtacttcagggatctcttatctctagcttccaaatctataaggttgcctctggcagaaagatataaaaacacctaagcatatagttttaaactatggcatcagcaaaacggtttattatctgaacaaagcaaaatcgtctggataaatcagtttactgacttgatgtatacacatacaggatacaacttgtaccagctagtgcttttattttgggggagaaaagcttgtggtcagatggatagctaagggacccgagcaaaattcatactcgagaagcctgttaatgctagtaccacttgctgtgaatgcgtaaaaatgacctggggcaacaacttctactaggatccgtggatttctggataatcactgtactgcatctttacactgatacctgtgctggcatgtcctaaataccaccttctttgacaggcacgatcttggtcatgtccacactgcagattgcttgataatgttctactagtatctaaatataaacaacagaggcgtttgaacgagatgctttctgtcactactactacgagttcgctgctgacagatgatgggcgaaccctgctgatgcaggcgcatctacggtgatttggtgaatcttcaaccttcacgatctctcggtctcttccgaattcaggagacggaacacccgtatcgtatcgcaccggggcagagcaaccagccaacccgcgaagtagtactgagtactgaatggaaggtctggataggcaggccacgcgcgcacacccgtcccttcctgggcggcagccggcaggcacccgtcccccacccacgctaccagagttcgccggagaggcggccacctgtcgagagggagcttctccacacggccaccgcagcggcaaccacccccaccacctgtcctgctcccctcctcgtgccgcctcgtcctctttttaacgggtttctgacgcacggggggccgccgtcatgtgcctcgccgccgccatcgcgtccgcgtccgcctcacccgcccgctgcctgtcgccctcctccgccgcgctcccccgccgcttcctccaccacctcctcctcgccgagactcctccccggccaacaccgcccccgccgccggtgcgctgcatcccgttccaccggatggcggtaagcgttggtgctcctcccctcccctatcgattttctcctgtggcaatcccgattccgtggaaatttgtgcccggcgatgcccaaccggaacctgctccggatggctcctcgtgtgacctgttagggtaaagttgcgtggctaattttggggaatcacttgaaagcgcagatgtccaaaccagtgaatttcggaggtgtgctggattgctcagctgtttgctttgcccttgtgactaaaaatgttcaccttttggcgacctaacttcatatatagggactaccttaaagtgaaatccatgcttgaaatgaatcccgtatcttaccatgtccatgtaaatgtgaatttacattgtacgtcttgtgaattcctggttgctttccaaatgatccatgtactatagaattatgatgagtgaacatttaacttttgagctctgtcgttccccccaaaaaaaaaagttcaagcattgtggatttggttgttttcangatgcatgcactcttttcaagaacacccaatgtattagtttcaagctatgatcatacctgcgatggatgctttcatctgaccattgcttgcttgccatccagcaattctggactcaaggatcactggacaagaacaaagctcttgtcgaatacctgaagcaatatggtgctgttagaactgataaagtggctgaagtaatggaaagcattgacagagcattgttcgtagcagagggccttactccttacactgacagccctatgcctattggttataacgcgacgatatctgctcctcacatgcatgcgacctgcttggagctactgaaggatcacttgcagccaggaatgcatgctctagatgttggatcaggtattcaggttcattactgaaacaccatactcctgtagtcctgtactatagcaaatgcggttgtttttagagtgccctgttgagttttctagaccatgcagttgtgtgaacgacttgctgttatccattagtattagatagttgagatacaaacaattttctaactattgacacatttcatctgcatgtgtaactcttgtaggcagcggttacttgacagcttgttttgcaatgatggttggaccagaaggccgtgcagtggggatagaacatattcctgagcttgtcgctgcttcgactgagaatgtccaaagaagtgccgcagcacaattactgaaggatggatctctttctttccatgttgcaggtatgctaagctgctaactggtctgatactggcactagaattagtgtattactgaacgcatgctttgcttccatcttggcgaaatctaaaatgcaaaatcactatgcgcataatatttcttgccgttctcaacgctgcagatggcaggcttggttggcctgacgatgcaccatacgacgccattcatgtgggcgccgcggcaccggagattcctcagcctctggtcgatcagctgaagaccggcggccggatggtcatacccgtcggcagctacttccaggagctgcaggtggtcgacaagaacgccgacggctcggtgaccgtccagaacgacgcgtccgtccgctacgtccctctgaccagccgctccgctcagctgcaggattcctaaggtcgacggctctaggaggtcatgaaaacacatgtaaatatctcgacgctcagtctacttgggtagttgggtagtttgattagtgctaattagtttcttctaacgaggttgagtagatggtttggtctgagacgttcagtcatggtcatctgtcagatgctgtagatcgagcgtgagctctgagcaatactcgataataaccaataaaagtacttcttagcctttcatatacgtgatttgtttcatgctaggaatgggcttgataatttctccattgagaatgttgttagtttggaatttggatggaagagaacaccacgcgctacgcagagatgtttctgtctcgaacacctctgttccaagttcagttccaacacccacaaaatagttcttttgcacaaatagtgagaatctgtaaattatatactctccctccattttaaaatgtttgttcgaccattcgtcttatttaaaaaaaatataattaactatttattcttttcatatcatttgatttattattaaatatactttcatgtacacatatagttttacatattttttaattttttttaaataagacgaacggttaaacatgtgctaaaatgtcaacagtgtcaaatattttaaaaaaatgtaagtaactatttattcttttcatatcatttgatttattattaaatatactttcatgtacacatatagttttacataattttcaatttttttaaataagacgaacggttaaacatgtgctaaaaagtcaacagtgtcaaatattttgaaacggaggaagtacatccctaattataatactagatgtacatctcaagatttccatgagttttagcagtaagttggctctggcacctacatgtaaaaacttcacatgggcttgaagtttctgtacgagatgaccgcgtaaaacgggtcggacgagcccgccatcccgaacagcctcatcacggcgtccagcggcgacgccggcttcccgccggcggcgtcggagggcagcttcctcaccacctccggctccgtgaacccgtcgacgcactggaagtactgcgtcacgagctgcacgcggctgtaggccgtgcccttccgccacgccccgatcgccttctcgtagaacatccggttgctgaagctcacgatgcacactccccccggcttcagcacccggaagatctccgcgaaaacctacacgacacaaaacaatcaagagatctggagaagaatgcagcaatggcagattggcgttcaaaatgttataattaaaaaaatcaagataaatcaatatatgatatatatttttacaaatatacaagttaaaatttgatttatacaactggaaaaaaacaataaatttgaccatgaaatacgtgttcttttcgtcaaatttattatttttgtttcaatcggtataagttgaatttgaatatgtatagttgtgaaatga

SEQ ID NO: 12528 - DNA, 635 bp, Oryza sativa
agtacccacatctgcgcatccagggacacatcgtgacccgagccagctgcgaaatcttccagaccctgctggcgccgcacagtgccgaatcctcgaccaagagcagcggtttggcgtgggtctacttgaacaccgatggatctctggcctacaacatcgaaacggagcacgtgaacacccgggataggcccaacatcagtttgattgaggagcagggcaagcggaaggccaagctggaggatctgacgccgagcttcaacttcaaccaggccattggtagtgtggagaagttgggtcccaaggtcctcgagtcgctgtatgccggcgaactgggcgttaatgtggccaccgagcatgagacgagcctgatccgtggccgcctagtgccccgtccagtggccgatgctcgggactcggcggaacccattctgctgaagcgacaggagcacacggatgcacagaatccacatgccgtcggcatggcctggatgtccattgacaacgagtgcaatctgcactacgaggtgacgctcaacggtgtgcccgcccaggatctgcagctgtatctggaggagaagcccatcgaggcgattggagcgccagtgacgaggaaattgctcgaggaattccgctgc

SEQ ID NO: 12529 - DNA, 2500 bp, Oryza sativa
tcaacaagcgcaagcatgcatccgacgaagaagacgacttggtcgacgtgctcctccgcctccacggcgatccggctcaccggagcacgttcggcagccgcagccacatcaaaggcattctcacggtacatattacgtacatgaacaagaagagcatagcacgctgtgatatacgttttcctggacatgttttggaagacgcatatgcgcgcaccacactcacaccccacacgaatacgtctcccaacacatacactaagagatagaaattagcggcacatttcttatctcactaaatttcggtcggtcgaaagctctgtgtgcgtgtaaaatttgagcatcagaatttaaactttagtggatagactggagtcatgtactcacgactcaaccaccacaccgctggtgcttccccgttttcctggacattttgatcgatcgaaaccgaaatgtgtggtcttgcaggacatgttcatcgccgggagcgacacgtcggcggtgacggtgcagtgggcgatgacggagctcgtcaggaacccggacgtgctcgccaaggcgcagcacgaggtgcgccgcgtcgtcgccgccggcgacaaggtgcgggaagccgacctcccggagctccactaccttcgcctggtcatcaaggagacactgcggctccacccggcggcgccgctgctggttccacgggagacgacgcaaccgttccgcacggcgcacggcgtcgagataccggccaggacgcgcgtcgtcgtcaacgcgatggcgatacacacggaccccggcgtctggggcccgaacgcggaacggttcgtgcccgagcgccaccgcgacgacgccgacggctgcgcgcagcagcacgacgggttcgcgctggtcccgttcgggatcggccgaagaagatgccccggcgtgcacttcgcggcggcggcggtggagctgctgctggccaacctcctattatgcttcgactggcgcgcgccgccggggcgcgaggtgaacgtgaagaagaagaacgggctggcgggtgcacaagaagaaccctctcgtgctcatcgccaccaagagcaagaggaacacaggtggccattgacgacgcagacatgtaaccttgctggtagggtaattttatcagaaggtacatacaacatgtgtaaaaggtacatacaacatgtgcaaaaggtattattatcttgagatactttctcaagggttataaaattttcttgatagtattataaggatatgttcactttgttaccgcattctaacaaactaaacaaattattgcattgctgttctaccaaaatttagcatttcaaaagtttcttcttatataaacactaccaaattttgatagggctacaaactaaatgcaactaatgctatgaaaatttgacaacattaaaatgtgccaaaatttggtaacgctaaatatcggttaggttgatttcagcaaaaactgaagaagctctaagcactaaatcatcagtaagaaagtttattaatgctgctcccatcaagacggagctcagacgtatccgtactgagataccacaagttcacataaggcagaagccacggactctggattctggaacggtctcggtcgttccggatcggatgggtacgtatgtcgccctcagaaagatgatgacactgactgttgcatttgccaagagccaatgggttgcgtttgcgtccccaaactttcacaaaaacggcagtcctcatccatccctagagtttaattcttttttgggactgagggtgtagccttcctggtgagaaatgaaagtactactggtacaagcaactagaacggggagcatatggaagccgtcgtgaagttgccccggttcctactagctctctctctctctctctctcctgtttccggtgcaggattgggtaaagacagtacaggaagcggcggcgagcgtcgtgcgcacgggtcgccttcaaggtacagataaacggatggtcgtcccggtcgccgatcgccattggttttcccgtcgcgatcaggtaggaaacgcaggcgcaaccggcccgtacccgtatctggatggcttgggtcagtgctggtgttggaccgccagaggccaacatcaacgtgcagaatacggccggagtttgtggaggattgcgagacgcgtgtgcacgcacgatcgacgcgcgggttcggcaaaggaataagttcactttaagtccctctattcgtcgcccagtccgattttcatccctaaactccaaaaccggatactacccgtctccaaacttacaaaaaccggcacatagcggttttggctgacgtggtgtctacgtggctaagttaactaggtctccatgctacgtggcactgatgtggcgcttaagtgacaactcgatttgagaaaaaaacaatacccgtgggacccataggtcagttacataaaaacaataattaataaaggtgggccatgtgggccccacatgtcaatctcactgccctctt

SEQ ID NO: 12530 - DNA, 9074 bp, Oryza sativa
  unsure (1)..(9074): unsure at all n locations
tcgctcccgtcgagttgacggtggctctcccttcccgccttgcatacgcgctccgtctgctccgcctcgggcccctgttcgcctctctccgagcagaacgcacaacgtccttgctccgtgcgcgtgaggggggcacccacaggacacccaccacctgttcgtggaaatgctcaacaccggatgcgtttctctggctgtatgtgcgggcggacttacaccatcatcgcatattcgcatgggcttcgccaagtgcggatgcagtgacaagcaatgcagagttgatgtctgttcgcggaagtgaaggaaggagaaaatcatggtgtggcgcgaagcggggtttgttcaagatgcaagaacagtagttggtgtttgctgttaccggcacgctaacaatagttgtgttctaagatgcgccggctttatttcctttagccccgccctcgacagcctactgtcaacatcaatttgtaatttgtaacttttctctctaaatcttgatgtactccctccgtttcacaatgtaaactattttagcattttccacattcatattaatcttaatgaatctaaacatatatatctatttagattcattaatatcaatatgaatatgggaaatgctagaatgacttacattgtgaaacggaggaagtaattggttggccatgtcttcggccaacccggctaaaaaatgttttcacccatgtcaacatatgacaccaactataaaaagatatcccttttattctctgtagtatcaaagaaaaagcagggtatttatctgtacattcttttattcttaatttttgtacacatatgataggacatatttcaacaggactctagaaaacaagaaatcaatggtactactactgtacacatacggtgttctgtgtattattttacaagctgcaatactatagtcatccaattgccttgaataaccatctggaacttgacacttgctctgtcatattcgtccttgatcaaattcaaacaggatattttcgaaatagtccaagattaactagatgatgttggagaccagggaccatgagatggcaactgcaaaatggaggtgccgcctggtatgtgtttactgcttaatataattttgaaccactgactctcaggattgcaattcggatctacggttaggcacttgcactgatttgtcgtgatatttccatcaggactggcctccaagcatactctggttccgttattggtgagttcagttgaaacatgcattcctgaatttgatagtagcttccactttgaactggatttgctgcaactggtgccaagctttgcattctcaccaacagacttcgcctggaggcattgtccagtttgtttgagtattaactcgtatcctttggtataattccaagcatttgatttatcacatggacccaactcaagtgcctctgaagatttcaccaagacacaaagcccagatagaggatggaatataacattgtaaggctgttgactgtttggaagcccgggacctggaggatggaatattcattaatatgtatagctcaaggaaatacagtgcatattgttgtgaccaaacttttagtggacttttacaagttacatagcccctttgcttactttcttgcacatcggcctgtgtatccatccaagtgatttcttttcaagggacacgttattctatgatgagggctaaaccaatgtgtgcatactagttaatgctccgatttcatatatgttccaataaatctgttccaacacaacccaaaaaggtgaaaaactgaaaagcggtccaattcaaccaatgaaatatgcacaggttttttctgttggttcagcaactgaggattcattataacttcaattttaccagagagctccatttttaatgtgattatcaaaacgtagaacaacagcacagttccagaaatcttgagagttgtattactaacaacgttgctatgtaagaataaaactgagataggttaagtacaaaccttggaatggtgattgcagagcattaatccttttaataaagctggggtttctagctgtacaccaatcccaggatagcaatccataagattcatcataagctagagtaccctccctgatataataactcccttgcagagcccaaatagcccagtccagatccatttcagctgccacggttaagaagcaggtaagatagcgattgtcagcgacatgtgtcccagacatgtcaaacccaaactcggagaaaaacagtggccagccttgctgaagtaggaacagtccttttttctttatggaatcaacaaccatcccacaagcatcgttttggttctgagatccccagtttccatcatctgagaaaccataccagtgctgctcaaagactaactttccagtaaatgttagctgaatttgatttgggaccaagaaatccagagtattgtcgaagttcaggcctgacaaaataacaagaacgccagggtttgccgcatgcacaacttcagcacccagttgcatgtacctaagtttggaatagattataaacgaaaattttccaatgatacgagtcacacataaaagccttttcaatacttctataagcaaaagtaagactcagtgtgtaagtaacaaacctgaaccacaaactaacatttttggagcctcggagctcgtttcttaaactcatgcccacaacattttttgtgttcctaaacattgttgccattgcactaaggcctttcaaccattcttctgggccaaagtacttgtcaccaaaaaagccattaccgtcgttttcgctgcagcaccatcctggagttgtcatttggttatcaagtataaccattatattgttcttggccaaagctgacaccacttcctatggttattaatttaacagaaggagtaaataatcagaattcaacacttgatagcaaaaatctcgtttactttatttcatttaatgtttagtacgggtaaactctcccagaatatactcctgagtatgtgaacacatgttttggtagattactaggtcaactaactagatacatcattgtaaaatgagagataactaatacatccctggtttggatttttttttttaaaaaaaggaagcagaccacctaatgaccccagttgccatctatcgtcagaacatattttacaaagaaagaatttatctagctagagactttcaaggcacccttatcttggaccatcaatttggtgactattaggaataatgtcatcttcacataaactggtttggaagagaaacaaaaggaaaaagggaaagctactcaaacaattaccattggtttttcctgaaatagaaaaggacgatcagattgttgattatgcttaaaccttcaacttgaaattgattgttcttattaaataagcaaaaaaaaaagaggataccctaggtttctttggcaagtcttgtgaaaagattgtgacgagatcatctgatttcaaaatcaataatctgcaaaattttgacttcttagcaagttgtttttgttaaattaaaccacatgacctgcagttggtttagctataagtcaattgattcattgcatactgttgcttccacaattaagccttatgcatcataatagctatttcttcagaaaaatgtaaaatttacatggactctgacttaaatgtttaaatgagcccatagctttcaacaacaaaaaatgtaaatgttcttctaggtacaacgttatctactccctccgtccacaaatataagcatttctagtgtttaaatttagtccacgaatattttctataaacatttctagagtatatttccacattccaagttttcaaccatccctcatagttatattccccatcccggtgaatcggatggtggcatggggattcaaccagggtacatgaaagtggtttcaccttaacctttacttaatttctcctacaactcttggacggagggagtattttcttgcactctatcagcgaaaatactgcttcctccgtttcatattataagactttctagcattgtccacattcatatatatgttaatgaatatagacatatacgtgtgcttagattcattaatatctatataaatgtgggtaatgctagaaagtcttataatctgaaacggaggtagtagcatctagcggtaagacacggtaaaatttggcgccatctcgaagactcgaactcgctaacaatagaaacagcttccatttcccatggtggttgttaaaaaaaaaacagccatttcttagaactgccattaataataagtttacttaacaacttggagaaaccaacgttgtcatttactccgtgtttgcttattcgaagagacgctcacctggaacacatcgatgaggggcaggtcgaggagtccggggttgttgacccggacgccggccacggactccggcataccaaggcgttccagcgacgctctcagcggcaggttcgccagcgtggcgttggtggcgaggtaggtcggccaggtgagcctgacgcagtttaaccccatcgccgccacgcgcgccgcgatgtccccaaggccgcggcgcgacaggccctccgccgccacgggctccaggtgcgacgcccagttcgcgcacgccagcttcacgcgccgcccgtccgcgcccaccacccaccgcgacgccgtcgagagcggcagcggcgggagcgacgcggtggcggtggcggcggcgagcgggagcagcagtagcagcaggagaagtggagaggaagaagccatggtaacaagtgtggccaacggtggcggatctgaggggggtttaaaaggaagagatgtgcctatgacagatggggccggggaaatggtgggtcccagctgcagtgtcacgtgcggtcttccgctctgataattagcgaaacgtgacagccgcggctcgtgcggttaagcggttggggcccaaagcccaactgcccaagcggactccaatggcgggcgccgccgacttcccagcggcggcggctctccccgcccccccaccgcgctggcgacggcgccggagttgtgcattcctcgcggcgtggttctctgcaacgtgcgagcgtcacgctggggtgccctcctcaagtcgggcgcgctcgccacctcgcccgaatccgtcgatgctctcctcgagctgacgccaccgcactcccggcccatggcaccttcaccgcccacgcgctccgcctgttcctcctctgcccctgctcgcctctctccgcacggttgtacagcatccctccctcgtcggcgctggtcactcggagccggaggacgccctccacctgttcgtggaaatgctcgacgccactggccccattctgcaccagcacagcacactgtcgcttgcacctctcgagcccacctcgaggatgtgcgctctggatttaggcgcggcgtccaggcttacaccaccatcaagcatgggctcatgtttgatcgtttgctggctgtggggatgtcacggcatcacttggtgcagttcgacgccatggaggacaacggtgcggtcacgtgaaatacaatggttgcggggacacttcaagaatgcaatggcggacgtatggtgatcttgagttttcttgacaaggcgccgaggttgttcgatggaatacaggtatgcagtggtgtgatgtggttgcatttgctctgtttggattgcaatgatctctggatacacagttacgcacatacgggcctatgtctggaggcacttactcttttcattgagatgcagactaccgtgctgttgctgaacccaaatgaggctactgtaagtcagtagtacataaggaggaagggtcttcctcttaccattgttcttggacttggcagtgcactggtggacttatatgcgaagtgtggatgcagtgacaatgcagataagcattcaaagttggtggctgcctgtgaggaactcagaggaacaccggggctcttctcatccatgtgtgaggccaatgttaaagcccacggacgtggcattcactggtgttctcctgtcttgcagttcacagctgcttagatgagtaggatcgcaggcattttgttagcaatgacccgggattatggcgccagccaaggatcgagcactatggctgtatggttgatctgttagtgcgggctggactgatcgatgaggcatatcagtttatcaaaaccatgcggtagagccaaatgcagtaatttggagtgcactagtttctgcctgcacagtgcacacaaatgttgatagtaacatgcaagatgcactgaggcatccactggacccaattagtcaatcacactggactgatccaggatgcattcccattgagttggagggtgcattctctttgagttcttcgctgaagacagtgaccatcccacccccacccccagctgatgacggagatatatgcgaaagctgaggagatgattgtaagtatcattatggccaggtacagatgatgtaaggctcgactttgatcaaaatgagaaggaagcctccgttacacatcacagcaagaagttgaccattgccttcagcctgatgaaactgcgtctcggtgcaacaattcagttatccaagaatctgagagtgtgcttggactgccactctaccacaaaggtgtacaacagggagattgttgtgcgtggcaagaatagatttcaatcacttcaaagatggttcttgctcctgcaatgagccaatgattactgatgagttgctatactaattctctctgctgagctttcttttatataggagtatataagaggcgcacctgatgtcctgatttattcattggagcagagagtaaatagtactccaaaatatcgaatatcgtttactgttggagtagtacatgtaacaacaattatcgtttactgttggaaggaaaacctgctaacctgctagtataaggggagaaaaagacttggaaggtactgtaacatcaagccatcaattggtgtgaatcgtgtgcagaccacatgctactgtgttacgcatgaattcaaatgagaaatcaacctctcaaattcgtgcttagcttttacggaaggaatacagtttgcattttgaatcttgaatactccagtcatcccattacctttcttaccaattacaacctccgattcttaatatatgattgagttgactttttaaatttgtttactatccatgttttttctaggaatatttgtgcaaatagattaaacatactagacatgtgtaaagtgttttgatgacgaatgtactggtatttttttcgctctaattaaataactaattgaataaatattgttggttttagttcaaggaaaaaaaaaactatcggtgtcatttattaaaaaacagacgtagagtactttacagcaacccttttttctgttttagtttatggagtataaatgaagtaacactatcaaaagtcaaagctgtcagcatttcgttttcttttcatttttgtattatcttttccatgtcatcgaaagattaaacctgctacgtttacatcgacaaagaaatgaagatttcatgttgctctgatcctaaacaaaagtagttagcacttggcagtcactagcgagtaggtgggtctgtgcctagacccacctgtcagtaactcaatgtcaccgagaatgtcacgtgggaatgtcaccgaatcccaatctagaagggtggttgaggggtactaaaaaagaaagaaatttgaatgtgtgtgattgatgggataaatagtacttgaatggtagaaagacaactaatttggaacggagggagtacatcattcgtgcattaactaattaaaacgataatgcttataaactcttatcggttgagccacagctaaagaggcagcggaaatatgaacaaaataatcaaagaaaatttatgaagaaaacttctattattggctgtttacaacttccctctcttaatacgaaacgtacgcaagtattttgggtattaaaaaaatatattggctgtttaaaagccaagttgaaaaattggttatgattaagaaaaaaaccccaaatgtaaattaaaactatatttcaaaaattaatatttaactgcagcaaataagcaaacaaagagacaatggccgtgtttagttcgtgtgacaaaatttttttaagtatacagacacacatttaaagtattaaatatagattaataacaaaacaaattacagattccgcctataaactacgagacaaatttattaagcctaattaatccgtcattagcaaatgtttactgtagcatcacattgtcaaatcatagcgtaattagtctcaaaagattcgtctcgcaatttacatgtaaactgtgcaattggttttttcctctacatttaatactctatacatgtatttaaatatttgatgtgacaaaaatttaggaggtttgaagggaactaaacaccgccaataattctgaatttatgatagaacagtacaagtcaaataagatatctcctcctgacatgacatatgtatagatagatgaacttagccgccctagagacaagctagagaacagcaaagacagcaatgtccatggcgtctctccaagctcctgagttccttgcgtcctgcctcctcctcgccaccattctcttcttcaagcagcttctcgcgccgtcgtccaagcagcgcgccgcctcgccgtcgctaccacgcccgagaggcctccctctcatcggcaacctccaccaggtcggcgcgctcccgcaccgctccctcgccgcgctcgccgccaggcatgcggcgccgctcatgctgctccgcctcggctccgtgccgacgctcgtcgtctccaccgccgacgcggcgcgggcgctgttccgggacaacgaccgcgcgctgtcggggcgcccggcgctgtacgcggccaccaggctctcctacggccagaagagcatcttcttcgcgcccgacggcgcgtactggcgcgccgcgcgccgcgcgtgcatgtcngaagctccttcggccgccgcgggtgcgcgggctccgcgacgccccggagcgcgaggcggccgcgctcgtcgcggc

SEQ ID NO: 12531 - DNA, 9928 bp, Oryza sativa
  unsure (1)..(9928): unsure at all n locations
gatcctgccatgatatatgacttctacaatgatcagcacagctacctttctagtgtgggtgtggatggtgtgaaggtagatgtgcaaaatgtgatggagactcttgggaagggttttggtggtcgtgttgcattaactcagaagtatcaacaagcacttgaggaatctatcgctcggaacttcaaaggaaacaacctaatttgctgcatgagtcacaatacagacagcatttttaggtacatattcttgtcgctgaacaatatgtgtgacatacatgaaatttgacgtaaatcttggttctttgtagttcattgaagagcgcagttgctagagcatcagaagatttcatgcctcgggagccaacgatgcaaaccctgcacattgctactgtggcattcaatagccttttattgggagaaattttcatacctgactgggatatgtttcatgtgagattatggcatccccagtacctctttctttcttttttttcatgccaggctggcagctaattttccattcttgccaatgtaaagagtaagcatgaatcagcagaatttcatggagctgcgagggctctgagtggtggtggtgtttatgtcaggtaattcttgcagtatatttatgcagatgttgtatttgcatttaagaaatttgcatgatctcattatggattttatattactgaactgatatgcagcgacaaaccagggatgcatgatttcagtgttcttaaaaaacttgttctgccagatggcttgattctaagaacaaagcatgctggtcgtccaactcgcgattgcctgttcaatgaccctgtcatggatggcaaaaggtacacacacacacacacacacaccaatttttctaaaaagtttcctgctacttgttctaaaaataatactaactcagttaacttttgtgcagtctgttgaaaatatggaacttgaacaagttttctggagtcatcggagtgtttaactgtcagggtgctggaaattggacttatccagtgaaagaaaatgctcatgttcccactaccgtctgcatcactggtgatctctccccatcagatgtggagttacttgaggagatagctggggatgattggaacggagagactgcagtatttgcttttaattcatgtaaattccattggacacatatttcttgcaactgttacccatctccttcatcgatctttttcacgattattaactgcagctacgccttcaggttctctctcaaggcttcagaagcatcagactatggaggtttccttgtctactatgacatgtaagatatataccatagcgctgataaaggtcagatttttctccattcacctacttacttgagcaatcaattttttatcgcgaatatgcaagccttttgtatctttgtattaagaactcaatctattcttgagcaatcaatttttttttttgggtgaatacttgagcaatgaatcattcgatatatgtttacttcttagagaaatgctcttgtttttgcaccaggtttttggtggctttgttcagtttgctcctcttggactggttaacatgtacaactcaggtggtgcgctcgaaaacgtcacgagcacaggtgattgttcagagatcacaattcagatccaatgccgagggccaggtcggtttggggcgtattcagcaaccaggccggaaatttgcagtgttgatgagcatgaagtagagttcaaacacacagatgatggcttcctggcctttgatctctctcacggttcgtcccaggacaacctcaggaacattgagattctgtacagagcttcctgaacctccattttcagtgtgatttttatgctctttcgagcagattatgctgctctcaggctcttagctgtggataattattgcttnccgcaagcgtgtgttagctctgaattactgcatctcgcgtgtgttgtttgtgccaattaatttgggcttgttctaagtttcgaatctgccggagacagttataatacgaatatgtattttggcagatcaattccaattttgtgccaatattacctaaaacaaaaatattatccctctcgcggtaaacctgtacgtaactttataagagacgggaaggaattgcatggatgaatcatgaattgaattgttacatcacaagaacaccgctcttgttcaagggcagtgtcttctccttcctgcgccagatggcgtcatggcgattgcaatttgcaagatcattctacaacaacaatggatacgtggattactccaccatgtatatggtgagcttgtgctcacgcgcacgtgcaagatggatttggctaatcatcagagggacctaatcttccatgacctgagctttggcggcagctgcgcgagcatggtgttcgtcgccgccacgctcctcgtgctggtcaccagcttgaaccactggctctccgggtcgcagctgttgtccgcgctcaggcaccggcacgggttggtcaccaagctccggccatcgtcgccgacgtccaggcagagcatgccgccgttgctggtctcgggggacgacgacgacgacgaggcgttgacggcgaggtgcagcttggagtccgaggtgaggctccaccgcgccagctcgtcgccgcacgacaggccgaggcgcgccggccggccggcgccctcggcgcggaggcacagcagcgggctgtcccgcggcgacagcctctgctggctcgccgtgtacgcccacgcctccgcctcgccgcaggaccccagctccagcgtcgtctgcaccaccgacgacgaccgccgcaccacgcaccgccccgtcgtcgggtggaacatcaccgtgtacggcgccgcctccgccagaccaggccctgcacacgccaaaccaaagtcatcgccggagaagatagataccggcggcggcggcggcgaacctacctctgaaggggcgctgcagggcgtggagcctggtcagggcggtgtcgttgcggggcttgcaccacgcccagtcgagcacgccgtagacctcgtcgaggcccaggacgccctcccggaggtagtaactcccctgcagcgtccagagcgcccagtcgaggtcgaggtcggcggcgacggcggcgacgcagccgtagtaccggttgtcgttgacgttgccgccgcggttgtcgacgccgaactcgctgaggaacaccggccacccttggtcgagcaggtacagcgcgcggcgcgacacgctcgccgccacccgcgcgcacacctggttggcgttccccgcccgccacgcctgcccgtcggagaagccgtaccagtgcacctcgaacgccaccttcccggcgaagctgacgttcacctgccgcgagttgaggaacgccaggtcgttgtcgaagctcatgccggacaggatcaccaccacgcgcgggttcgccgcgtgcaccgcctccgccccgcgctgcatgtacctgcatgcacgcacgccatttttttcccgcgcagtcgtcagctatcagctcagccgctacatcgttggcgccattttttatttttattttttgcagatggcgctagtacacagtacactgaaatgaatgatgcgaactgcaactgcatcagattattgccattactgttcttcacatgcttgtgcagggacgagcaatggcggacgcggtcagtcagctcagctgccaaccaccactagcttcaggttcatttactgatcgatccaggacatggccgacgatgaacaatgcgtggttcttggatgcagatgctaatcatggcggtcggtgtgcaaattgatgaggaggatcgatcgagcaaatgggtggtgaactggtgtgacttacttgtaccagtcggcggagttctggcgggggccccggagctcgttgcggaggctcatggcgacgacgctggggacggcggcgaacatggtggccatcttggtgaggccgtcgacccacacgtccgggtcgaagtacgcgtcgccgaagaagccgttgccgtcgttgttgccgcagcaccaccccggcttgctcacgtggttgtccagtatcaccatcacgccgttctcccccaggctactcaccaccgcctgcacgccacgccacgccacgccacgccgcgccgcgccgcgcgtcgtcggtcaatctctctctctctctcgcattgtcaaaaataagtagtagataacaatgatcttgccttgaaggcgtcgatgagcttgaggtcgacgagggaggggttgttgacgcggatggcggcgagggactcggtgaggttgaggcgctggaaggactgggcgacggtgagggaggagtaggaggcgttggtcaccatgaacgtggcccaggtgaggcggacgcagttgaaacccatggcgaccacgtccttggcgatggcgcccacaggctgcttgcccagcccttccgccagcatcggctccaggtgcgacggccagttcacgcacgccagcttcaccctgttcccgccctcgtcgacgatccacctcgacgccgtcgacagcgtcgtcgctgccgccgccgccgcggggcgcccatggctggccagaccaagaaccgccaccgcggcgagccacaccaccacgagcctcatgtcgacgccggccgtccggcaatgcgagacaccgagaagaagcagcggcgaggtggatttatagcgagtactacggcggcggggttgcttcggcatggggaatggcgaggcttcacgggattgccatgggcggaagacgacgatctctcctaagctatgctgctggtccttgacatgtgtgaagtggagaggccatgaatgagggtgagtgagcaaatcgcattgctgatgtttcaagaatgcaaccaaatactgttttatccttcaaggcaggacaagctaagcgacatcactgtacgtctgtgacaatgcagtgcatagcgcgtttatttgcacattattatcgtgaactatcaatttaattataaagataaattaaatatttaaagaaataaacttaatgaataatataaaataaatagcctaggcaacattgcttatagtaaagaaaataaatatttttgaaatatggagtaaataatccgttttaataagaagcggatgatagcttattatgggcaatgtatggcgtacttatgaattaaagaagcaatgctgataaagaaatttttcgaagacgtacttttggaatcgtggtactaataatccggttgataatccgactgatgagccaaaccaacctggcctatttcagaaatcagaaccagagaaaacaaagaatctctgcacgtcggtcggtgggtggttggagtaaaaatggccaccaaacccttgcagttacagcttcggtttggacttcttatagtgatactggagtattgatgttggttacttgcatcgattattagtagtacctcatttgcaattaataccagatctaatcgtggttggttagtataattttttcgtgaagcaatcaatattcagtagtgtagcattggtgcacacacaactgggatttatttgcatcctgtttatgaggagctcgtccaaagcctcacgccgttgtcaacaattcagctacaaagacaggttaagaggttttgcttttactctaagaatgttgctagttgtattccagatcatgcatgtaaactgcttgcgattccgtatctgtctcacatcagatcagttaagaaatgccgtgctgaatatgaactaggatgaatgaggattttgcccttcaactaaaaggaaaggagaaaggcgacattgaaatgaacaaagagggaaagaagttgagtgtactgaaaatatagggaaaggcctttctctggcgccacgattgctgtttgcatatttcagattcagaatacaattttattttctcgaacacgtaggagagttgtgtaccaatgtattaagaagggaagtgcagatttcctagctgcattattcagtaaattgctgaggaactgaaataatattgatctcagactgatgctcctgttgtagttttttgcttcatccctcgaatcaaagcagtgacttatgaggttgttgagccagtacctgtgaagtcttcagaagaaaaaaaagtatccaactatgcacaagttgagatgtgcatgagaaatttcaataagtggacaacccatgcacgcgacctcaataactggacaccatccctttgagtgaactttgcaatgttttaagccatgtcaacatataccaaccgtaaaatactaacactttttattctatatagtatatcagagaacaagcatggtatttttctgtacattccttttattctctctagtttttgtacacataggacatgtttcaacagaactctatagaacaaggcacaagtgaattcaatggcatcactatatacatgtggagttctgtgtattattttacaaattacaataatatagtcatccaattgccttgattaactaggtggaacttggcccttactctgtcatattcatccaccacacgcaatcaggatattttcgaaatagtgccatggttaactagatgatgttggagaccagggaccatcagatggcaactgcaaaatggaggtgcctgtgtgtctactgcttaatataattttgaaccactggctctcaggattgcaatttggatctccggttaggcacttgcacggatttgttgtgatgataccatcaggagtggcatccaggcatactctggttccatttttagtgagttcagtcgaaacatgcattcctgaatttgatattagctgccactttgaactggatttgctgcaatcggtcccaagctgtgcattctcaccgacagacttgacctggaggcattgaccagtgtgttgcagtaccaactcgtgtgttgatgtgtagttccaagcgtttgattcatcacatggacccaactcaagtgcctctgatgatttcaccacgacacaaagcccggatagaggatggaatattacgttgtaaggttcttggctgttcggtagtccagggcctggagtgtaaataagtttgcactattatctaactcaaggaaatatagtgcatattgcaatgattaaaatttaccagatttttacatggcacattacttattttgtctaatgtcttacataccatattttgtttaaatgtcttacatcggcactatccatatatcgaagtgttctcttaagagggtacatgtcatattgtcatttcatgaaagggctaaaacaatgcatgcatactggtggataatctgaaatttatatcagtgcaaaataaatttcagccaacaattaagtactgagaaggggcccaatcctatgacgaaacatgcagaagtttatgtgttgattcactaaaagaggtcaaatgctttttttttattagaacagtccagtataaagtatataatcttaccacataaaattcgaaatgtagaacattccaaaaatctatgttcccatattcctgataatgttgctagacaagaataaaactgagataggcgaagcacaaaccttgaaatggtgattgcagagaattgatccttttaataaaactgggatttctagctgtacaccaatcccatgatagcaatccatatgattcatcataagctagagtgccctctctgatatagtaactcccttgcagagcccaaatagcccagtccagatccatttcagctgccacacttaagaagcaagtgagatagcggttgtccccggtgtgtgtgccagacatatcaaacccaaactcggagaaaaacaatggccagccttgctgaagtaggaaaagtcctttattctttatgaaaccaacaaccatcccacaaacatcattttggttctgagattcccagttgccaccatctgagaaaccataccaatgctgctcaaagactaactttccagtaaatgataggtgaatttgatttgggaccacgaagttgagagtgttgtcgaattccaggcccgacaagataacaaggacgtcaggatttgctgtatgcacagattcagcaccctccttcatgtacctaaatgagaatagattgtaaatgaaattttccaataccatgggtcacacaaaaaaatccctatcaattgagataaaaacaaggcctttaggtttcagtgacaacctgtaccacaaactaacattttcataggggccccggagttcgttcctcaagctcatgcccacaacattttttgttttcctaaacattgttgccattgtcttgaggccattcaaccattcttctgggtcaaagtacttgtcaccaaagaagccattaccatcagttgtgctgcagcaccatcctggagtggtcatttggttatcaagtatgaccataatattgttcctggccaaagctgacactacttcctacagttgttcaatgttaaccatgtcagatggaataaaaaaccagagtttttatcatgtattaaaactgtttactttagtttcctttcatatttagtacatataaactctctatatactcgtgactctatgagcatctgttttcacagattactgggtcaactaactggataactcattgcaaaaagagagataactatagatacttgatttggattagataaaaagtagtacacctaatgcaaccagttgccgtctatcttaatcattagaatagatccgtagaaagaaagatctgttctagctagagtattgtggcttgcaagataccctcttggaccattaatttggtaactagtaggtaatctgtacacgttcaaattaaacttgtttggaagaaaataaaaggggaaaatgaaatctattcaagcaacaactactgttggcctttcctgaaatagaaaatatgatcagatctttcttatacacttaagccctcaacatgaaattgattgttcttattaattatgcaaaaatggatatcctaaagtttctttgggaagctttatgacaaggttgagatgatatcatctgatttcaaaatccatcatctccaaagttttgacttctaagcaactagtttttttgttaaataaaaccgcatggcctgcagttggtttagctataagtcaattggttcaatgcatactgttgcttgccacaatgtaagtctacaatcttatgcatcattgcatcgtaatgactatttcgtcagacaatataaaatttgcatggactccgacttaaatgtttaaacggacacatagctttcatcaagattgtaaatcagtctgttcatctcacacaaagttactcctacttacttttcttgcattccatcatcaaaagactagtttctagcggcaagacagtaaaaaattgaccatctttgacttgctaacagtagaaacagctagctgccaatttaatggtggtggtaagaaaaactaaggaactatttcttcagactatcattaataagatttggttaacattgccaaaatctaacgaggttagatttaaaaatgccaaaatctaagaagggtagaacactggccggatagctccaaaatctttttgccaaaccaatgcttggatattgttttggctactcgaagagaaacccttacctggaacacatcgatgaggggcaggtcaaggagtccggggttgttgacccggacgccggcgacggactcccgcatgccaaagcgctccagcgaccaccgcagcggcaggctcgccagcgtggcgttggtggcgaggtagggtcggccaggtgagcctgacgcagttgaaccccatcggcgccacgcgcgccgcgatgtcccccacgccgcggggcgacaggccctccgccgncacgggctccaggtgcgacgcccagttcgcgcacgccagctttacgcgccgcccgtncgtgcccaccacccaccgngacgccgt

SEQ ID NO: 12532 - DNA, 3797 bp, Oryza sativa
catattaaattattatactaatttttttaaaaataatttgcgatgactttttaagtgacatgtttatcctcttaatgaatagagttttcccaatgtcagcaatggcgggcatactttctcaggggactgaaggtactggacgctgaccgtgcagaggacggcgtcgaggctggaggtctggagctcgagccgctgctccttgttgaggtccttgacgaagaagtagtcgaggcgtgggttcttggcgagctcctgggcgttgaggccgtggccgacgacgcggcggagcgggagctcgcgctccggcggcaggtggctgacccaggagctcatgaggtccagcacgtcccacccggggcggaggcgctcgcggtagaggtcggcgagcgccgcgaggaagccgtcgtccacgtgcttgacgagccgcgggaacgcgtagaagtcgcggtccggccgcgcgtccagcttcgcccggccctccggcgtcagcaccagccgccggatgccgccggccgacggcggcggcgacgcgcctgcggcaggggagcaccgcggcggaggcggccgtcgcgaggcccgcggcgcctgaggcggagcgcggagcatggctgcgatttgctgccgtcgccctggagaacggaggctcactggctcgtcgctggacgtggcgctttatctcgtcggggagttcgagtggttggcgtcgcagtgtgcactgtgtagtgaccgtggcacagtccagtgcagatcaaaactccctcttttcaggccatcgttttatgtggcttcaaatatcatcctcattcctcaataaacaggttaaactttaaaataatttaaactgaaattcaaattttagcccgtgtgctatttttagcccgcgaggcgtcatgtcgccatatctgagggaaaaatgatagtcttgccctcataaatgatgacgtggcatttcgctggctaaaaattgacacgagagaaaaaaaatcgtctctttctagtaaaaaaacgaagtcatccaagaggggatagtggtatttgagaatggaaaagtttattagtattaaattttcttttcctaaagttttactaagactagactatgtatcatgctgtgagtatacgtagatatctatgatttttatcttcttaaattaaacgcatgatattattgtttatgagagttttgtaaaaatagaaagaagttactccctccgtcccatattatagcaatctagtatcggatgagacacttcatagtatagtgaatttggacatgctccctgtccatattagttgtgctataaagatgtgacattttcgccgtgtttagttttaaagtttttcttcaaactttcaatttttccatcacatcaaaacttttctacacacataaactttcaacttttccatcacatcgttcatatttcaaccaaacttctaattttagtgagaactaaacatatcctttataatacaactaatctggacaggaagtatgtccaaattcattgtactatgaaatgtctcgttcgattttatattgctatattatgatacggaaggactaagtacatttagcagtgctcttcgagaaggaagggggccaaatagtccataaaaaccccgatttcgtagctgtcgccctcgtcccccccgcgtagtcgcgcacgcgagccgagcgtcgccgtctctctcgcgtcgcggcgagcgcccccatccacacgcgggggtcccgatcatggcagcggaagtactaccggatatcttagtctatcccagctcgaagctgacatggcgatgacggggacggcgccctggaggtcgccgcttcgggcccctcctcctactccctcgcgcgggaataattcgcgcccccgcggcctcgtcccggcgcaatgccggccgtggccgcgtcccagcctcagttccgccgccgtcgcgtgcccgcggagcgaggagatggcgcggctggagcgcgggtcgctggtggtcggcgggcgggagctcctggagcgggcccctcccagcgtggccctccgccgccccgcggtcgtcgcctccccggggggcgccgcgttccttggcgccacggcgcccgccccgtccagccgccacgtgttctccctcggcaccctcgccaggtagagcccccgcccccagagcagagattgcggtgtgcgccgcggccggcagcggtggtactgattcgttgttgggttttggtgtgcagtgggtggaagtggctgtccctgttcaggttcaagatctggtggatgatcccgacggtgggcgaggacgccgccggcgtgccagcggagacgcagatgctgctcttggagtcgaggagcgaggcgggtgccgcgctgtacgcgctcatgctgccggttcttgacggcggcttccgagccagcctccaggggagtcctgagaatgagctccaattttgcttcgagagcggtaggtttattctggatttgctggattctgaggtgttcgaattgaaacgaactgcaaattttggaatttcggttggaatttctgaagagtacagtggtggactgtttttaggtgatcctgaggttcagacactggaagcagttgatgctgtattcatcaactcaggggacaaccctttcaagcttatgaaggaatcaatcaagtaatgtcatcctctaacataaccacaatgacacatatttttgttctatttgcaactggctcacttcagttgtatctccatttaggatgttatctaagatcaaaggaactttcagtcatatagaggacaaagaggtatagtgtagctaaggatgttcatctttgtacttctatcttctacttagaataagactgttaatcatgtaaaccttttctagtcatttatagttctatgttattttgtttttcacaagtcctgttgaaattcatcacaaatgccagatccctgcaaacctggactggtttgggtggtgcacttgggatgctttttataaatctgtcaacccagtgggaattgaagagggccttaaaaggtacaaatgaatcgatcttacttatgtgatattcgaaaacaattgaaaggtcttttttattacccgcatcctccatttgtcaattcctgataaagcatttcttgttgtatagtttgtgtgaaggaggtgcaccaccaaggtttctaattatagacgatggctggcaagaaaccgttaacggattcaaggaagtggatgaggcctttattgaacagactgtgttagcgtctaaccatttttcaacttgctgatcggtccatgaagtatattaaattcctgtttaacaaagaaaatttactccaggaaatggacgtttgagtatttgatttcatattaaataaacaccaatacattttgaaatctctccttatctgtttgtgaaagagaatctagatccaccaacatagactgtatactttttctttattgtgagatttcctatccaatttccttttttttttcccctgaaactgtaaatcactgtcataacctcatattatatctatacacataaaagtgcactcatctgttccttacccatgttgcaatattattaggtttgcggagagacttatcgatctgacagagaacgataagtttaggggagaaacctgcaagaatcttggagaccatgtcaagaaaatcaaagagcactatggagtcaagtacttgattcttattgaaatactagttctataatatgcttttcataatatatgctgagaaaaaggctttgtatgaaactacaggtatgtctacatatgg

SEQ ID NO: 12533 - DNA, 620 bp, Oryza sativa
ttgaaactgcttctattgaaatgctgaaaggaatatatgtgcatgtgtggtagcccccggctaaccctgcacacccgaggggggggtgcggggttagcccgagccaaaacctgacacccgacccccccttcaggggtagaagcgacgaaggtgttcaatgttccacgggtttggcagctccgtgccgtcgcccgtggccagccgtaccgagcccggccgggggacaccgatcactcgatacggaccctcccacattggtgagagtttgctcaatccagcacgcgtttggacgcggcgtaggacgaggtcgtcgacgcagagtgatcgggcccggacgtggcgctgatggtagcgccgcaggctctgctggtagcgcgcagctcggagggccgcgcgccgccttcgctcttccaagtagtcgaggtcatctctacgaagctgatcttgatcagcctcgcagtacatggtggcccgaggagacctcagggtgagctcagatgggagaaccgcttctgcgccgtagacgaggaagaaaggcgtttccccggtcgctcggcttggtgtggttcggttcgcccaaagcaccgctggcaactcctcgatccatgaatcgccgtgct

SEQ ID NO: 12534 - DNA, 693 bp, Oryza sativa
ctggcggcgtgtgttggcttgtgtgtatgttgtgttggtcttgtggcttgtcccctctcctcataggggggcttgtatttatacccatagatgtccctttgtccaagtagaactagggagaccaacatggatacaatccaggtagtccttgtcgttttcatatagaactctgttcgtccttccttatctggaactccttttatatacaatgtatgattccgtataagacatgttatgtggtaggccctaccgagcttagtcaactactattaggtatgtggtatccataaccatgataggggtctccacgcgtcctagccttatgtgatcatggctactatagatacaatcgttgctcatatcatggatgaacaaggagatatcaagatcaagttctccatgtgctggaatccgatttagccacatgctacactgctgacttcaaacggctgccaaatctgcatacgacctccattttcagcccatgagtacttgatggaaagctctcggagtcctctttccaatggatccagtctcaccaccaaattccatctaagtcatccgcagatgaagaaacaaggtgatgcgtcacctgttatgggcctttgggcttataacttcgtttgggaccccggtccaagtgggacccaagtggggtgcgccccaaccaggtggagcacgaccctagagtcc

SEQ ID NO: 12535 - DNA, 639 bp, Oryza sativa
ggggctcctggcgtcatcggacaagcgggcaaagggccaactccggtcgtcaggggccttaggccaccgttcggctcgggggcctcttctccctgctctctcccgggtcgaatcggtacagggttagcctcagggtcagagggtgataggtgcggcctccccgcagtggcctcggggccttcctgtgggtcgggggcacccggcaccgtctgacaagcgggcagagggccgactccggtcgtcaggggccttaggccaccgttcggctcgggggcctctcctccctgcctgctctcgggcctagtcggcacagagtgggggtgcgcagaatgaggattgtcctcatcgcgctccacaaccaacgctgcactaactacttggggggtcgctgctaaataaagagcaggggctcatttggctccggggcgactagaaccgggggagagccgagatatgcctttaactgagtaagggcatgttcagcttcctccgtccaagtgaacggccccgagcgcttgaggagcttaaacaagggaagcgccttctctcccagccttgatacgaaacgacttagggcggccatgcaaccagtgacgcactgcacgtccctaagtttgctgggggggcggggctgcagga

SEQ ID NO: 12536 - DNA, 11709 bp, Oryza sativa
  unsure (1)..(11709): unsure at all n locations
gtgcatcttgaccttttgcttctgcattaaagtcgcggaaacaaagcatactgaaattcttgatatttagccaatctgaaattctgatttctttcgctttcatgtgccgttgaaaacttacaataactagcgaagacaccttgcgccattgagaatctagtaatgtgtcattttttttgataattggaaggactgtactacaatatctatttgctacgagtattaaagtgtagatagtagctaaattatcgaatcaccacataatgagttgctaatgctgtgtttgaggagaatgagatagacgagattggaaatatacgcaaaatgaggtgagccattaacgcatgattaattgaatattaattattttaaattttaaaaatagtttaatatgattttttaaagcaactttcttatacaatttttttttaaaaaaaacatactcgggaagcgtgcgcgcggaaaacgaaacacacaaactcacaatgttacgctgctgaacgcagcctaagggtccgaagttagtttgatcgagttagtgcattcacataaccgattaagacacctttggacccctcacacctcgtattctgtcactttttgataacctaaggtcgtgctcgatgatgaacagtatgtcacttttagatgtatcaatcaactatttatcactggacccacatgtcatagacacatgtgaacccacgtatcattgagatagatgtgacaaatagttaattgccaaatctaaatgtggcaaatagttaaaagcgggggcgggttcattttccttccttcttcccctgagactgataggtggggcccacatctgtcctctaattctctccacccttctcgtttcggaacgccgccgccgccgccgtccaccgccgcaaccagcccccaccaactccggccgttcccggcgcgtcctcccgaacgcctcagcccccacccgccagcaggtggaggcctgcgccggcgcgtcgaccccggctctctctctatctctgtctcacctagtcgaggcgtggagaatcgaacatggagtccgagggggggaagacggagatggtgctcgcggggacgtttccttcaagaaaggcagatcgccgacaagtaccccagggccagtcccgcggccgcagtggaagcacctncggcttctncttcaggccgncgacgccaccttccttccccccgaccgccccactgtaagcgcctccgatccaaaccaatcttccccccctcccccctccccgctcaattaatctgccgatttcttcattgggatcagtttaatggtgtggatttatctaccttgttggttgttgggcgcttgtgattgtactactcatcgaggatttgtgtggattcacttctataggtcaacgagcccttgttggcattgggagatttatctggttagggattgagaattcgatgctatgcattattcatgttaggcccttgtccagccaacggttgctattgtgattgcgcattagattgttcttatgttctgttgcaattttacaatgttactatgtgaataacttaatatggtttagatttggtggtaatctaatagatttttgaggctacggaagctacatgttcatatgccttgtcttgttgcgaaccgtccatctaccgtgaaaacgcaaaccaattggatagggttatcatcatttgtttactctcccaaataatctggataagcaatctgagtccgtgcaaacaacttggttctggaagcggattcttaataatcaaacgatgtttttctactgaagtccaaaagcaggtacggagctgcttttgtggattttaagcggtaatgttataacataagagtattaacatagatggtgcatttcattgtatcaaaagccaaatccacaatcagcttttaagaatcccccttgtgaaaataacattccagaagcaggattgtgagaatcaaaagcaaaataaacaggccccgacaatggtacaataaggatttttttcatacaaatattatgagagatttctagtttcagtacaaacatttctaaaatatttaatctaataagtcagcctaaaggtaaatgctcacctctacctcattagtgttaaacttttaattagtctgttaggatgagatgagcactaatgatatgggtgtctgatggcagcatgatcagcaagtgatgtgtatagaaattacaacaatattcagaaataagttatgttttacaacaatatgttcatcttaatatttttaataaatatagtactagtacatatgttgtgcatactggcattagataaacataggaacaggaacataatatttccaaaatgattaatgagtcattaagcaaagtggatcatttgtacatatcatataatcatgtattgctgtgttgttcaccatgtctaagcagatgacagaatttgtatctttgatcatatgattctggcttttggtattttgatggttgatattgatactagtattgtttatgataagggatatcatgaggtactatttttttttctggttgtgtatgagtcagcattgataggcaagtgaactaagaatcaaatttattctatgagatcataagatgtatttgtttcacttcttaacatcatgaggtatttattcttacatctcctgaaggagaagcgtgggctgtgaatgtgtcgtgatatgttgggttgtcacttgttacataaatgtagtaattaactttgattcagtttgatgcaataccatgctatgagaaatattaggatccgttgtcctacttatcattcttgcttttttataagcttttttttaataagcaagataattgggtaccatttcattaagaggagagaatggaaagggagcagtggccaccaacccggtccaaaacaggccagagtctttacaacacacgcaaaaacctcacctccgaggggctatcgacctctcacggaactcctttagtctagaagccccggctagcgaccacatgatacacttattggccactgtttggaggacagcagttacacaagggttaacaccattaagcacattgtcatttctatgcttcccaatctcccacagtaccaaaatgatgagagctaagtccgttcttggtgtctttgtcccttcctctcatcacccttgaccaccaccttgataaattggttgtatctggacctggggctatatgggccagccccatcctttggaggattataaaccaaacttgccgtggacacctcttatcttaattatttgaatggccattaatgttataaatcacaaggcatggctgaaaattgatgttaagttaattatgccacatattatcacttttccatactgaggctattgcatttgtctttattcttacattatggtgttttgtgcagatttgaatatccagtcgcccccatcaatttatccacccaagagatattgtgacataactggttttgaggttagttactttgctgtgagttcgtcttgttggatttgcatgttttcttgttattttgaatgttcattttatgctacttactactgagtttaaattgatctaaatatcttctgagctagatgggctatacaatatctcgcggtttagtaatattatcaaagtcgacattctttgagttggatctcaaatgctcaaattaaaatcccgtatatgattagcatcagatcaataatccacagaaaatgttatcacaatagacaagctacatgtctggagaattcaatcctctgtaaaggattacgaacacatgcatgtatacagcaacaaaagattccagcaattaaatcttttggaattgttaggaaaaaaaaacatgtggtagtgatagtacaccattgtcattaactcactctataggcgaagatatccaattaaattctatataataactcaaccttttgtccatgctatcatcggatccttattttccaccctctgaactttgaaatcctcaacctttacatctctctgttctaaaactgcctcagcatataccgtagtggtatttgcttgacgacagtcatcagtagattggatatcttccatgcctacttttccttcttattgttgtcaaatatcaaatctcttcctctgtctgtttaaaaaaaatacattctcaatgtgacctaggctaaactcaagtgcatagcttcatggcctctgagctccaccacaggtgcaattttccctagtatgtcatcatgccttctacatctctcctagtcagcaatccatgccacctcccaaatcctcttttgctcctgcaaacacaatacatttcttgattcatttgatagagttgtgtagtattcgtgttagctaaatgaggagctggcccttagactgatcctacatgcagctcatactgcaaagctgccatctcaaattccttccctgttgtgaacgcctcatggacataaatgagctttatttccccacctgtaatcatggtggtgcatatgagggtggaggatcgttgcttacattaccactgaatcatgtgtcgctaacatgtccaacatgagatagtatctcaaattctcaattctactgcagacaagttactgagcatgaaattgaggctgcctgagaggtactgagagcgcgagggagtgaatatggaattgctgttgttttcagttatcttgtttaaattgttactagttacctggctaaatcagcaatagaagatgacatttggagccttcttgttgccacataggccaaaactgtagtggattgggcttttaggtgtttcagtgcataagtattgttagtcgaacttagaagtccaattttggtcctaaatagcacttagttactactccctctctttcatattataagttattttgactttttcttagttaagcttctttaagtttgatcaagtttttagataaacatagtagcattttcaacacaaaataaatctattatcaaaatatattcattgttaatttggtgttttatatattgttaaatttttctataaacttagtcaaacaaaaaagtttgactaagaaaaaagtcaaagggacttataatatgaaatggagggagtattaggtgtccaatttctctacttagagagcatttaagttactgttttggccaggatacttcactgacattgaaaaatgttagagcatatgtgactgacatgacgtttcaccaagaatttcctgttctatcttgttagtaatggtttgtcttggacatcaacttatctgtaatccactagaagctttatttgcgcccaacaacgctttaatgctcacacctaatactccgctaatggggagcacaaaataaactgagacaaacattgataatatcacttggtcttgcattctctatttgctcttcgactgcaatggtgttttgtgtgcctatttcttgtgttgtgtggataataattgtatattttcttgcaggcaccatatgtggatccaaggacaaagctgcgctatgctgatccagaagtgttcaagcaaatccgaatgcttcctgatgaatatgtccaaaggtatctggcactgagaaatgctgccgttgtactgagataactatgcaaaatctatgtagaagagaaatggggatttgtgctcttgagtctgttggcaaatacatctctagatctagtgtgaatgtatatctacttgtatgcttgtttcttagcaaattgtaagagatgacttttcctccgtagtgatagctgacatcatggctggggacgttcagttcgtgctttatcgacgttcatgaattactggtaatctgttctcgtgcaccatagccgaaattactttctggattgccctgatctttatcaaggaatgcaatgacggatgaatgtgcatgcttcttgaccttataaacggtgcgcaaaaaaactttcgatatatcaatttattagagaaccgatttaaatccaaatttgagctttataatatattttcaaccacaaaaacaaatgcagttgcttgtatacacgcgtgcacacaatatctatacgagcatcttcaaaaaattgagctgacatgtttttaaattgactgttgttacgggtgtcttgctatcatcgactgttggtcattgacaaaatattagccgtaaatgtgagcaccgtgctaagcttaggacttatttaattaatttatttgtaccattatataatcgtcacaaataattcagctattcacccatttaacatgagaacgaagccaagcatacggacgggtctcatcttttcgattatacttatgcttatcaacaaaaatttgaattttgaaccttaaatttagagttgattttggtgttttttcatcgtagtttatttttcagcttttgtttttagatcgtttagaacacgtatataaaagttttattcacaaattattttttatttataaatataccgttaggcttattccaccaaacagccaaacgatgggcatcacaagatcatgatttgatgtacctaaatcctggtccattcatttgtgtggaattgaaattaaatcctgggttatacccacatggatgcattgatcaacttggatttgggttcatacaaatgatgtcttatctctgaatctctgatatcattgaagttaccgataattcatgtaattttcacaaagagcaattgatgggcataaagtgcctgagattttcttaattgcatgcaacatcatatttttccttcaagcaaaaaaaaaaaagaaaaaagaaaagaacagccaaaacagctctgcaaatgctgttcctataactgatgactgaacaaagtccgtacctatagttaccatggaatgggggcccacatgtcaatatcatagttttcttttctaaatgtcaactaaaagaaagattcgatgatattccatacctcaacgggtcccacctgtaagtttttgttttcctttttctgttaaaaatctcccccagagtcctctttcatacatactccgatttcgtccatcttctttctaaatccatttaaaatgaagtcggtaagcactaagcactgtagtatctagtattaggttggacacctgggctcactttggtcggttctttggtttttgtagattgtgtgtagctgtgtatgactgaccatgtctgtcagtagcacgagcagtacatgcgtgtgaaagacttttctagagctgactttctttcatttgttcttattaaatctaataatgttcatggtcaattcgaaagacagttactattattatcattacttttgctgttatgtgcagaacaggttgagatgaacgtattgaaaagctgcatggctgacataccaaatgattaattatgtgctttcttttgtttctagccccttttttcttgaaaactcgtcttttgcatcaagaaaccaagaaacctcgttctactgtaatagactttgtgcaacatgtgaacaagcaacagtgacatttattgtttattttttaacaggcccccgaatcccaatcaaatctccccttatccaaacatgtccacactgatgagtatattctaataaaaaggtagcaaggcaagaaaacgtgtaaaaaaaattcaaacaacctaagaaacaaggtcatctggtaaagtcaaaatccatcagagatcatacatgcactttatcttgaggaacatacggcaattgggacagtataccaactcaactgcttgagcaaagttttaccaattccgaagttactgatgatgtcaagtttaacgcctaccatgtttgtctatttaagtacctccagcgatcctctagtgttacattaaatgtacacctgtaccttcctgagaaggtctgaggtgttggttgctgcctggctgggtttatggtgagaaatctctctgtacttttacctgatattgatccctgtgatgtttttggtgatacattgatctatgctgtgtgatcgtggattcagatatattatcttgttttcatgatgaatgtttagttattgtttcttctttgtattgagtgttctgttctatttagtttattttgccagtaatctttgtttagacttattccttgactttaagccaatatctttttaaacttaagtaccctcccttcttattttgttaacttccatttattttttaaaaaaatcttgtgttgaaccagtggactaggtgatggacgggtcacacaacttactgtccaaacaaaattgtcctcagtttaatggttaacgaatgcttttgctaccttaagaacaacataaatcagtcactgaaaatttgtttttttgatggaggtctctgcaaatttcagtttcactatgtttttttgtttcttcttaacggctctcagctttcaatggttttatatttgtacctttcgttcccagctagcatgcaaagtttcacgtgggagcaagcaactaatgggctccaaagaagcattccgacgtatcatattctgcgtcttgcttctactctgtgtgagctgcaaatgcttaacctcagaggtaaacacaacccaactggcagtcctcaaggttgatgcctcaccgcagcatgctcgaaagatccctgagacactctttgggatatttttcgaggtactttagtttccttcccttgaaaaaatatcccagttcttaacttgttaagacttatcaagttttaaatacgaacgtttacatattcttactgattactttggtaaaatactgtaggagatcaaccatgctggagcaggtggaatatgggcagagcttgtcagcaacagaggtacttctactggcctgccattaatctcatctctagattgtgctgtgtgcctcttgaaataatttttgtcaagttattagatagtagagagagtttactacgtggtgtttggtattttggttgggtgaacttgctatggaatgcaactacatctataacaattactgacatttcaatggctctcttacaaaaatagatgagtattgagatcaatgcctatctggtccaaccgaggataaaagaggttatcgtaatggcttataaatacaagtgcatgctatgaagtatagaaaataatttctgcccagcactggcccatactataacagaattgttttctgtttaacaattttttgacatcgaaacttgagcataaactggaaacagcattcaaacaggcattttccttctgaagtttagttcaaccagctcatgaattttatgatacaggtttcgaagctggaggccctaatactccatcgagcattgacccttggtccataattggaaatgaatctgtcatatcagtggcaactgatcgatcatcatgtttcagtcgaaatatcattgctctgaggatggaggttctctgtggtgactgccaagctggtggtgttggcatttacaatccaggattctggggcatggtatgaccttatgttgatcagaggttgaattttcatctcatagctgtcgttttgcgaaatgttttcattaaatttaaccagaaaatacacagtttctgtttggaacttttcgttaatgtttgctttcatgctctcaagtaaggcaaatgtttagtacacattgtgtaatcctgccaattcagctggataatgtgaccttgtcatgtcaacttacagaacatagaggatggaaagaactacagtcttgtcatgtatgctaaatcattagaaaatacagagttaacagtttcactaacaagctctgatgggttgcaaaatctgtcttctgctaccatacagtaagcattctttgtttactaaaacggggtaaacttttcatttttacaattttcatcagtgtatagtattttgttgccatagagttgctggtacatcaaattggacaaaacttgagcagaagttggttgctaaaggaacaaacagaacctcaaggcttcaaataacaactaacaagaaaggtgtcatatggttggatcaaatatcactcatgccttcagacacgtataaggtaccattgtagtttgtttcacaggtattgcttgatacttcgaacagcaaacagaagagtgaacccaagtatatttcacaggtcaattgtagttggattcttcttttatccaagatcatataaaagctttcatttctgtctgtatttatttgtttgttaatccattgagtttgatctctttctagtagtcatgcttatgacgtatgccatgaggttatttccatatttaacttccatttctttgtatgtacagggtcatggtttccggaaagaacttgtatcaatgcttttggatttaaaaccacaattcatgaggtttcctggtatgtgaattattctttccatcgttgcacatatttgatcagacatattttggacagttaactagattgaagggaactattccaggaggctgctttgttgaaggccagtggttaagaaatgcattcaggtggcgtgagtctgttggtccgtgggaggagaggcctggacactttggtgatgtctggggttattggactgatgatggccttggatattatgagtttcttcaggtaccaattggcattatttcagctctacattttcttgattattccataatcatattttcctttgaattgaacatctaagctttctgaggatctgggtgctgccccaatctgggtgttcaacaatggtaattatttttgtgtttattgcatctttgatcaccactaccgtctgcctttattgaaataattttgcctcttaaatgtcaggtttcagccacaatgaggagattaataccacggctattgctccatttgtaaaggcatgttttgagctcccaattcatttttataccagcatagacatatcttgatgcagtgaatgaattccatttgtaaatacattggaaggagcaattctcacttttcctgtacatatatcaaggattagaaatagaaattttgttgctcaatcctttctgagacagctattatatatatgatgggtctgctcaaatgatggtagatgtttatccatcataatcaatattgggacattattaagatggttctttggtttatttacatgtactgcacaaattgatacaacaccttgggttaagttcagattgtttttttcccaaaattattaatggattacttacaattttttttctaaatttgttcatttttatggataaaagttagtaacaactaattatctcaccacacgttgcccatattttccccagacttggataagttataactgaggctcatatcttttgttattgtcttttctccaggatatactggacagcctagaatttgcaaggggaagtaccaactcaacatggggctctcttagagttgcaatggggcatcctgaaccatttccagtcaaatatgttacaattggaaacgaagactgtacaaaaaaattttaccatggtaaatatatcagttagtttcttatggattaaatctatttcccactacaagttgattatgtttatgtatacaaggattaagctcattctttgtcaagaaaaaggaaacataaataattttggtataagcagataagttactcaaccttttcctgtagtttttaaacacaaaatataaacacctatttttatgattgggcatattttgcaaaaaaaacatcaatacaagaattttttttt

SEQ ID NO: 12537 - DNA, 1432 bp, Oryza sativa
tcctgcagccctgcgtgttgtcgtaggttcgagtcccctagagggctacatttttttgtttcttgtttttttacaaggcgcagggtggcctgcggctagcctgtcttggctgcccatgtggaaaatgggccgctggcccagctgaaggggcagagcgcgagagggaggctggcccgagcccaagaggagagagtgagccagaaatggtccaagagagagtgtagcttttcatttttttaaattcatttgaacctcaaattcaaatccttttcaagcaaaacaagttttgaaatgccttttgattatcgtcacactgtgacgattttaaaatcacacactgtgacgatctggataaaaccgtcacgagttaacgggccaagaatatccactagtgcacgtccacgacggaaaacaaattatcgtcacggattgcctctgtcagtgacggtttatgaatccgtcaccaagaattcgtcatggattaacaagtttcttgtagtggaattccaagttctctgtcggagttttaacacgctgatgctacaatctgaaagtcgttgtcgccaccgctggtgagttactcattcccctccacaaattcaatgctaggttaaatatgttacatgatgacaaaacccagtaatttaaaagttacagataacacttgaaacatcaccaaatgagagtatgagtctgtatatatactgatgacatgatgacatccagttgatccttctttttttttctgtatgtcttatccatttccaaatgatactgtagcaatctatcgctcatggtctcggagcggcacacgcaaggcagggacaagcaggaggtcggagcaccgccgcgtggtgagccccaacgcctccgtcatgtccagctcgccgggaagcatcccgccgggcagctcccagtcgaagtggtacaggagggcggcgagcgcgagctccatgttggccagcccgaacgccatcccggggcacatacgccgcccggcgccgaacggtatgtactcgaagtccgtccccttgaagtcggcggcgccgacgccctcgaacctctccggcgcgaactcctccggcgagtcccagtgcgccgggtccctgccgatcgcccacgcgttgacgagcaccatcacaccctccggcacgtcgaagcccatcacccggcacgtctcccggcactccctcggcagcagcatcgtcaccggcgggtgcagccggagcgactccttgatgaccaggtgcaggtaggggagatcgcgcaggctctcctcggtgacgccgtcctgcccggcaatggcgagggctcgtcggacctcgtcctgcgccttgcgcatcaccctagggttcctcatcagctccgacatggtccactgcagcgacgtcgccggcgtctcgctgctcgccacgaacatgtcctgcacaaa

SEQ ID NO: 12538 - DNA, 39787 bp, Oryza sativa
cttgtccgatatattattcttactttaatatcctgatatagagtagtatcggagtattagctgatacatgctagatctatctgatcggctatactataaacatatatagtcttgttattgacatatattttaatttaagtgatttatactgtctcggcatggtgaccgatctatcccaatcacttgatttaagtatatattgatataagaagtatatatcattagtcgatcgagtagatttagttcttctttacttgttcatgactgctgatcgatgcacagatgacatcggcttaaagataaatgatatgtcatcggcatctagccgatcggctatcatttatagatttaaccacggtttctttgcttctagttcttgatgattacaggatcaaatcagctagcacgctaacacatctgaatgcgagctttggacctgcactagagttaagcagatctctcagaccacgtgttttctgtcaacatccctctgtttcagattataagacgttttaattttggttaaagtcaaactactctaagtttgaataactctatagataaaaagtagtaatatttacaacaccaacatagtttcatttgagtaactccataattgataatatttcataatttattagtttagggttaaaaatattactatttttttttacaaaattggtcaaacttagagtagtttgactttgataaaatatcttataacctaaaacggagggagtagctaatacgtgtataatattttttatacatgtattaactgccaaaaaaaatatagggacgaatgaggttttatgaaatatttatcctaaaacctgtgattctttgaaacaagttataaacacatgctacaaatttagctggacggtttctagccaaaaattattaagtccatatcttttaacaaacccgctccaaaattgatagaaacctgggagagttctttttcctcattgatagaggcttgtttccatgacagcgtcttctgaatatagtattagcacttgaaagaaaattctacagcagagaacagctcaccgatatacaaaaccagagattatgcactaaaatatgtagtaacaaaatagattcgagcgtcatgggcggcaggcctctgcaaggctgcaatgaacctgtagctgtcggcgttgcctttctttggttcttcgcgaaacagaaaacggacatgtactacatgcctagcacgttgcattagttcttagtcaagtggcagttccattctcttctttcggcgtcatgacctctttataagtggacacatgtacagtacttataagttcaaagcattcatttaatcttttattttttactccatccatttattctaaataagtttatttataagtaatcatcacattagagtaaataaaggtacaaaataaatgcattgaaagtaaataaaaaattttttatagtgggatttgataaaatagatatattctagtcagtttggttttatattggtatgtgtaggatgtgtgaaaaataaacttattttgggacggatggaatttttttaataatataccatcaataactataaaattaacgtcatattttcaaattatcacgctacaataaacatagatgttacattaaatactccctccaattttttgaatctacattaaaagatgattgtagtattagttaaaagttacggatatttattaaatgccatgcacttactcctagataagtattaaggcatactattgtatgggttctttttttacatgaaatactattgtatgggttcttttttttacatgaagtacatttgataacatgaaagagagaagagaggaaagggaaacctcgttactatatttgatattagcttagaatcgagtcttagcatttactaatactaaaaagaatttggttgcatggagtgaaaaaaaaaaagataataccaaatattttgatacaataatagataagaaattttgttgtctcaactattaaaaagatagttgtattaacaagagcatatattggaatttacccatgtccatgcccttatctagataaataagcaggagtattttcatttcccaaatttgtctgacccatttggccagttcaatccaaaaaccaagtgtccaaaatggaatggatccgtgccattgttgccttaatgccgtcctcaggcgattttctccgttgtacacgccctgattacacgggtggcaaaaaatagcctgattcttctcttcttccttttcactgtgctccatatgccctcaatatcctatcaaatccaataaatacccttgacacactaagaatcgaattataatatttacatttctgcccctcacagggctcaactgaaattacagaaaattgtcgaagggatcaagcgaaaggcttcttttatgtggaaaatggaataaaagtctcggattaaagaagcaattgccgtttcagacgagggtggcagccatataatttgcttgcgccaaaaccaaacatagagcagcaatagagaggaggagagggagatgatggcccatctccttctcctccatccacctgccagctcgaagatttctgtctgaatcgatcggatcaagatcaaatcaaggagggaggaggttgagcaattcctgacagggacagatcgggaaagctctcacagctttttctttgtttttgtttgatttgttcctgcttttcgattggaaaattgggaggggaggaaggtgatagccattgaggtggtggcatttgctgtcaccacctttagctatcgccttcctcttcctcgtctcgctcgccccccggtctagcttctttctgcaggtattcaatcgatcgagcaatcagttattttcgtttttgttcttgttttttcttttttatcatggaagctctctgttcatctgattttggtagtgaatctttaatttgtttgtatggcacgattcacccataaatcaatcgataattttgatacgattcagagagtgattgatttactgcactggtttcatccagggaagaggggaataaaattactctttttgcaaaaaaaaaatctgaaaatagggaaaataatccagcaaaatcgcatgtaattttgatgtttgttcatcgtttcaaactatacgtattaggagaaaccaatctctactgctcctggctgattttgtgatgaaaaatggccagtttcctctaaaacaatgaccaaatttgacaccctcttgttcttgaagggccggacggaaaaaacaaaacaaaagaaggcaccagccagccatggcgatggtgctggactccttcgtcacccggtgcacggcgtcgctggaggacttcgccgggcaggaggcgtgcggcgccctcggcatcggggacgacgtgcggtgcctcctggccacgctccggcgcgtccaggccgtcgtctcccacgaggagcgccgcggcagggtgctgagcgccaaggtggacgcctgggtggcgcaggtgaaggacgcgatgtacgagaccgacgacgtcctcgacgtctccatggtcgagggcggcaagatgctcgccgagggggacagcccgccgacgcccaaggcgcgctgctccctcatgttctcctgcttcaagcctgcatccgcccccaagttccaccacgagatcggcttcaccttcagggagatcgacgccaagctgagggagatcgaggaggaaatgcccaggctccccgcaggatctttgcactctgaatcaagaagggattggttcagtagaggcatctgcagtaacttctctgacgccattaggccactcgcggttgggacacaggttcagaaatctctggatggccttgtgcctaggatgattagagagggcaagaagaaggtggatgtcttggccatcgtcggcgcagtggggatcggcaagacaatgcttgctagggagatttacaacgacgagaggatgaccgaaacatttccaattcgtgtgtgggtgaagatgacaaaggatttgacagatgtggatttcttgaagaagatcatcatcggtgccggtggtggtgtcaatgttggtgagattgagagcaagaaggagctccttggaatcgtcagttctactctttcgaagaggtttctcattgtattggatgacttggacaacccaggtatatgggatgatctgctcaaagatccactgggagatggtgtggcccgaggcagaatactaatcacaacacggagcgaggaagtggcaacaggcatgaaggccatggtccaccgcgtcgacaaaatggatgcagagaatggctgggcattgttgtgcaggcagtctctcccagagtgcagttcagaagagctcgcgtcactgaaggatgttgggatcaagattgtggagagatgtgatggccatcctctagcaatcaagatggttgctggtgtcctaaggtctagaggcaagagcaaggctgagtgggagatggttatgagaagtgatgtttggtccatgcggccaatcattcctgagctgcctcaagctctctacttgagttatgttgatctgccttctgaattaaaggagtgcttcctccattgctctttgtatccagaagaattacccattcagaggtttggtcttatccgacgttggatagctgaaggccttgtaagtgacaaagacaataagttgctagaagattctgctgaagagtactatgcagaattggtaagcagaaacctgttacagctttatgctggtaatcttgatcagtgctggataacgcatgatcttcttcgctcactagcacgctttctgataacagatgagagtatcttaatcagcggccaacagagattgagcacagacccattgtcattgtcaaagccacgacacctgacattgtgcaacatggaaaacagatttgatgatccaatttcagtaaagcagcagatgagcctaaggtcattgatgctcttcaatagcccaaatgtcagatcaatagataatctcgtcgagtcagcatcatgcttgcgtgtcttggatctgagcaagacagcattaggtgctctcccaaaatccattggtaacctgcttcatttgaggtacctcaatcttgatgaaactcaggtcagagacataccctcttccattggctttcttataaacttggagactttgagccttcagaattgccagagattgcagagacttccttggaccgtcagggcattgctacagcttagatgcctttcgctcacaggaacttctcttagtcatgtaccaaagggtgttggtgatttgaagaatctgaactatcttgctggtttaatcattagtcacgacaacggtggacctgagggttgtgatttaaatgacctacagactttgtcagaattaaggcaccttcacatagagaacctggatagagctacttcaggcgcttctgcacttgcaaacaagccattcctcaaggatctacacctctgtgaacaggcaccattgatagaggagcagcaatctgaacaagaacaagagaatcaagatgaccaaaaggaaacagaggaagaagagaaggaagtacttgatgtaaccaatagccaatttagtagagaggaatcaatcaaagcgagcgaaaagatatggaacgaactcaccccaccccagaacattgagaaactagtaattaagaactaccgaggtggaaagtttccaaactggttgacaggtccaaagctgggcatatcattccctagtcttgtgtacttggatatcgacaactgcatgtcatgcacggcactgcctgctcttggcctcctaaaccaactccagtccttgcaaatctcgaatgcagactcagtcgtcaccattggtcctgaattcctcggtgctgcttcatcatcatcggccactgcttccttccccaagcttgagatattaaagctcagaaacatgaagaaattggaagagtggtcattagccgtggaagagaatcagatattgttaccatgtcttaaatcactgcacatacagttctgccccaaacttaaagctctaccagaaggactgaagaatgtttcgctgcgtgagcttcatgtcgagggtgcatatagcctaacagaaataaaggacctgccgagaatatctgatgatctccaactcaaagacaacagagcacttcagaggatctctagcttgcccgtattgcagtctctcaccattgacaactgcccaaagttgaagcatgtttcaggccttgacacactgcagcatctcaggctggcgttccctccatccacagagacattttattttgatgagctgatcatcttctggagtattgcattcccacggtggctggagctgttgatccgtaagcgcgatgggctgtgccatttcgagcttcagtgcagcctctcattgctcaggagctgcctggacggtggcaagaactggagcatcgttcagcagatccccgaggtgcggatcaccagcaccgatggcaagaggtacatccggtacaacaaacgccggtgcatctatgagacgaatgctcaatctgaagattgaagccttcgtgaaagtcccagtgcagtacgtttttttttttcatcttcattgtgcagttcatcttgtcaaggttctcttgttcagttgtgtggtgtcattacttacagaagtgtatattttcgttgatttattggcagtggtttgggttgttacaaggacacatctcagttttcctgggtagtccttccatgagttttgtttgcaatatttgccaacacgtgcattcacacaggctattatgtaagcctttgttctatcttttctaattacatttgttttgcaaatcaaatatccgataaaatttagttatcccttgggataagggacagattgaaaaactgatatgcaggtatatttttctcacataagattccaacattgatggaaactagatacgataatttgttcggagtttctaacaggtcaattcatatatctgtataagccgtaggtatattaaacatgtgctggtttaaaaagttgatgattacaaaacctactctcttcgttccaataaaaaccaacctaggattagatttgatataataattgtggaggttggtcttttttttttttttttttttgggatggagggagcatttcacagtaatctcacttgcacatgtttttttccaggttatagtaaaatgaaaattgtagacaagacaaaacaagtctaaaatgggtagggatgaaaacggtatgaaaacttcccagattccggacctattttcgaaaacaaaaactttcagtcggattttttcggaaatggatatgtttgaagtggttcctacctatgcggaacgaatgaaaatgtagaaccttgtacagttggaaactcggataaagcagagttggtagaggacgattcaggagctgaatttgtatggattcaagccgcattttcccgctaataagtgaacaaccatgatgatttcgccatgacgttcctgctatatgcgatgggataaatgtattgatgatattcatgaaggggcatcagcagtttccggctttcccgcggagtggggcgggagggaaaggagaggaagtgggatggggtagcggaggcgccaccatccaccaggcgtcggcaaagcggatgtgctccctgccggctccaaccaacagagagaaacgccgcgggtggtggagctggggtgaggaagctgctgagggtgctgatcgagcttccctagtagcaggctagcagcaagccaagcctctccatcattgggacttgggaggaagagctatcggtggagacgtagggaggagaggcaggcgccacgctgttatgtcatggcctcatggggaggttacgggaggaggaggaagcatagctgcctagaattgggctttttgatattgggccttccggtctgcacatgtgcaaccagttgtgattagggaatttttttatttttaatttttttaattaaaagttttacaaaaaaaattttatttcaaaaaatgacaaaactaatctccccagagggcgggaaatgtgacgtggcagacggccgttggctctcggacgatggccgtcaaccgagggcaggacattttgcaggcggcccccttgccgccctcggcaagggcggttttaaactgtgcaggggccacctacaagagggcggcgagagggcgtggattttttttgcaggcggcccccttgccgccctctgggagggcaattttgtactgttgagggaccaacagccaaaaaaatcatagttttgtaatggttttgatttattttgttatgtttttgtattgaatcgtttgttataaaaatttgctaaataatcatattgaaaacgaagaaaacatgagtaatgtttgtagatttgtttgatgtaaaatatcgtatttgaccgaagaaaattaggtaaataatgagtctgaaaacaggaaaattaggtagttttttttaaaaattttagatgaatactttgcagtcaaattggaggccgaggaggtggtgtgtgactttgaagtgttaggttaatgatcttatagaaacaaacatagtatgtaaaattttgtaagtattggatggtatatttttcagccggattggagctagggatggtgtgctctagatcaaactaaactacattttacaattaacactacgatctaagtctcaattcctactaatatcttctgtgccctagatctatacaaatgtgttgtgttctacagatgtactaaaatatatggaactaaaactaaaatgcaacataaattaaaaacacaatgtatttacagatgatgaagtgagcaaaccagcaggggcttcgccgctccccttcttctaccccacacccctccctttttcttttttttggaattttgagtgattataatgaaaattcagagagggggaaggggttttattgtgtgtgtgtggggggggggggctgcaaaattccaggccactcgctgcccttttgcaggcggtcccctcaattgtgtaaaatcgctctgtgtaagggcggcaagggggccgcctgcaaaatagccaagcccacgtcgccgccctttttgcaggcggccgcccgcatagtgtaagatcgcccttagagagggcggcaagggggccgcctgcaaaactgcacgccccctgttgacgaccatcgcccgagagccaacggtcgtctgccacatcacatttcccgccctccgggagggcgatttttaaaaatcgtcccccccgagggcggcgggagattagttttgtcaatttttgaaatagaaaattatttttgtaaacttttaataaaaaatttaaaataaaaaaattctgcgattaggtcggatggctatcatttcattggtgacaattagatggttgtggtttttgttggtgacaaggcttcaccacaacatagagaattgctattaactacactaagtggggatgcattgtataggtttattataggataacacaggtaatcttaaacgctacaagtaataacacaggtatacagtagtgtagtaccttggaaagatatagcaaatcgttaaatatcatatgaatacttaatttttcttcaaattgaggaaaaaatggtggcacattatgataaacaaaattgtattacatgctccttccgtttcatattatatgactttctagcataacatatatatgaatgttggcaatgctagaaagtcttataatatgaaaatgatgaagtatacttttttcttcaaaaaaataaaataaaaattctagattatgtcgaggttcgtggtagaagtttacacgtagggattggtgacgatacatgttggtaccataataatacatcgatgatacttagaggtatgcttgttagatatgggtgatgatacacataggtaccagtggtttcgttggtacgttttagctggtatcatataggtgttggcgatgatacagcataggtatatatcaatgatgatacatttaatataaatactagagacggtgcaacataagtacatgatacatgtatgtaccaaggattatataataaggttggtgatgatacatgtaagtaccagggacgaaacatgttggtgagatatacttgtactagtgacgatattttgtcagttatgaacttgtgatgccttaagatattattacaggtaaagaacccatctttacttatggttcgcaaccccttttaatccctggtacacaaccaggataaccaatccggaactaaagatgcccatctttagtctcggttgaaatagccgggactaaagagtttttttcttttcttttttcattgtttgcatattgatttcgtgccaaactcacggatcaaataagagtaaattacactagcggtccttaaacttgtaacgaggtttcacttaggtccacgaacttgcaagcaaaatgagtatcgtggaatttttttattttttctcccttcttccttcttttttttttctcccttctgccattggcccacctgtcagtgggcctctctgacctcacattagcctcttctctctatcctctctctctccggccggttacgcaggatgggcggccggctaccgaagcagcgacgggcggagcggtcggcgagaaaggagcagtgcgtaggcaccgaccggcgggaggagaggagcggtgcgcgtgcacgggcggcggctggagaggagaggagtagcgggcgtgcgtggacggcggttggcgagaaaggagcggcgcgcgtgcacgggtggcggctggagaggagaggagtggtgtgcttgcacgaactgcggccgacgagaaaggagcggcgcgcgggcgccagccgacgggaggatgcgcgtgcacgggcagcaattggagatgagaggagcggtgcgcgtgtgggggaggcgtcgccgaccatgcccgggaggagaggttgctgactgtggccatgcgtgcggggggaggcgtcggccatagagcgcgctagcttggcggtggagatgaattcgtcgccgaccacacgtggtagaagtttacatgtagggatttgtgatgatacatgttggtactgtaataataattacattagcggtccttaaacttgtaacgatgtttcacttaggtccatgaacttgcaagcaaaatgagtattgagatccctaaacttggtttaatgtatcatctcggtccaaagcctcgtttgaccgtgatcttgcctacgtggcgtgccacgtggacgatgacaaggaatttttttattttttctcccttctcctttttttctcccttctgccacaggcccacctatcagtgggcctctctgacctcacttttccctcttctctctatcctctctttctccgaccggttgagcgagacgggcggctggcgatgggcggggcggccggcgagaaaggagcggcgcgtgggtgccggccggcgggaggagaggagcggcgcgcgtacacgggcggcggctggagaggagaggagcgtcacgtgtgcgcgaacaacggccggcaagaaaggagcggcgcgcgggtgccggctgacgggaggacgcgcgtgcacgggtggcagccggagtggagaggaacggtgcacgtgcgggggaggcatcgccgaccacgctcgggagtagaggttgccgaccgtggccacgcgtgcgggggaggcgtcggccatagagcgcgcgagcttggcggcggagatgaagtcgtcgccgaccacacgtggtagaagtttacacgtagggattcgtgacgatacatgttggtaccgtaataatacattgatgatacttagaggtatgcttgttagatacgggtgatgatatacataggtaccagtggtttctttggtacgttttagctggtatcatataggtgttggcgatgatacaacgtaggtatatatcaatgatgatacatttaatataaatactagagacgatgcgacataagtacatgatacatgtatgtaccaaggattatataatgatgttggtgatgatacacgtaattaccagggacgaaacctgttggtgagatatacttgtactagtgacgatattttgtcagttataaacttgtgatgccttaagatattattaccggtagagaacccatctttactcacggttcgcaaccccttttaatcccgggtacataaacgggacaaccaatccaggactaaagatgcctatcttttttgtcccgattgagcgggatgggcggccgtcgaccgaagcggcgaaggacggggcagccagtgagaaaggagcagcgcgcgggcggtggttggagaggagaggagcagcgcgcatgcgcggatggcggccggcgagaaaggagcggcgcacgtgcatgggcggcggctgaaaatactccacatatataataccttattcatattaccttgctatttttaacgtagagaaaagtttcagtaactgaatttaggtgatggcattaaaaggtggtcttttctcctgaagatgaagacgaagatgaagatgaatattaggtttttttacgcaaaacgaggtggtattaatgtacgattgattgagttttaattattacaaacttgaaaaatagattaatattatattttagagcaactttcgtgtagaaatttttcgcacgaaacgcaccgtttagcagtttgaaaagcgtgccacgaaaatcctaatctttatccaactcatgttggagaaaagaacaggaccaaaatgtgttgcacaattcagggtgatgagacaatacacttcttttttgtgttgttcctgtactgtatttatgctcccttcactaagaaatgtaagacatggtttgtcatggcattctccataattgaacttgtccagatatagtgtagttctttatgcatcaggtggtattgcaaaaggagaaaaacataattaattcttcaggatctatgatgctaaattggttagtccatgttttgcactgttattatcactgatctggaattattctcgcagaactcttaagggtcatccgaagattgaatttgaaagagcagtggactgatgtgctacttcactttattactttgtatgctctgagatcaacaatctctcatgatagatagcatattgtgtaatgctggagacgtggatagagattagtacgttcattacaagtgaactcgtggcataattctcttgatttttgtggtgtttgatacatgtctttaatggactgtatttgattatttcaattcagtccctatcatttgatttaaaaatatagcattcatctgtaatctctggagataattttcattttgtaatatatataatagtttgttatatgcacatagatcatgattttttatgatgttcagaagactggtacatgtgaatagaaaaaaagggaaatgtcatgttgtttggggtgaattggtgatagtttatggcaatgccaatgtatttgtacgggaggtatgttatagggagatctgcagctcatccatgacaaatactatatctaggtatgcttgatgttctagatattaaatttccatagcattcttctatctactactatgttctaaatattaaacaccatgagattgttttatatgccagaaagcttacactcggattgtgtagtggtaatagattttttgtattgaaattaatttgaattaaactacagaacaattttgatttgtagtctcttcgatttgccagatttttaaccgtgttcaacaaattttcactcaatgattatttaacatcttttcacctcatataatttgaaattgatatatattatttcacgttgcaacgcacggacacccagctagtatatatgtaatttgtaaatatcatttacatgttttagcaatgtaataatcatgttgtttacttgaatttattggagcattcagttttgtttgcaaccataaatttatttccttagcaacgcacatgcacttaatttgctagcataataaattcaaaattgctagacgagcgaaaaagttagtgacacacaagagattctcttgtgtattcgtaggagagattatattcgtaagagtaacaggaaaactcaaacgaaattggctgcaaatgaaattttgaggcttaacttgtcataagtcacggctatttgctagctgacgagtactcataatgttgaacagaaactaaacaaacaaacatcaattaagttcgcccgccctatatatctgtagaacagtagaagtagcagatatgaatcaggccattgtaaagcggggttcagagcctctcgccacggatcctcctggcgagctgaacgtctttggacatgatggtgacgcgcttggagtggatggcgcagaggttggtgtcctcgaacagacccaccaggtacgcctccgccgcctcctgcagcgccagcaccgcgtggctctggaacctcatgtcgtgctgcaccgcaccaaaacatcgcaaaaatcaattaacgtacgtacaagcatccttagaatagaatgaatcgatcggcataatttaaacgtttggttaccttgaagtgctgtgcgatctccctgacgagcctctggaacggcagcttccttatcagcagctccgtgtttttctgatactttcggatctccctgcaatcgtatatatatgatataattcaaataaatataatataatataactgcagcagaattacttatggagagagttaagcatgcatgcatatatgctatggaaagatcgctcaaacaattaattaatttgcttcatcgttcagttctttagaagataaaaaacagctatagcgtggcgctgggacatgtacatctttgacatagatgctggattgaattctgtcatcattgaagaaaagaatcatgtatctacctaagggctacggttccaggacggtgtcgacgaggcttcttaactccgatgaacggaacggactttcgagcgactcctctgctggacggagcaggcataacagcggctatctgcatgtcgatcgattaattgtaaagatgcatcgttcacaagtgaaacaaaattaattagtattgtagtaatcatttttggcaaagcatttgtacatacagcacggagtggctttctaggggcctttcctcccgtggatttccgagctgtctgcttagtacgagccatcctgcaatccatatagacaagaatatgcacattatccacattggctataacgctaagacaacaattttgaagaccctataatatgaacaagaacggcgggagctctgcggtttacaaacctcacgcagatccaaaaacttaattacaacgttcacgaaataataataatgttaattaagattagacttaagaccttaattagcgccaagaacaaaaaaaaaattctaatccagaaaaaaaaaagaacaccttaattagcgtcgtagatgaataatggtggcgcttgattggcccaacagatttgaagagggtagaagaggtggaggggcgatgattcaacggctaacaattctggaaacaaaccggtgacaacagtgtttcgggtctttggagtagaggagaagagtccggatcaggaagggaggttacaagttgcgaagaattgggaagaaaatagaaaaggagaaggggaagaagaagggtcaaaaaggacaatgcggatatttgccaataaattcttggaataaatttggaactctgaaacatggttcgaaaagtgtagagagcaagcctaaaaagtctttagatatgcatgaaagtaagacatttttcgtcaaaattgagaaaaaaaaaacaaatggccgagcaattatggctttataattaattagtcgcaataaatctaatcttgtttaaatatctcgattaagttaaactaagaaaataaacaccaattcaaattttaaaagacccgtacaaactaaaaaaaaagaggaaaaccgggatgttacagacagagagatgcttattattagtacaatttacaggaaactaactagtgtggagatcgattgaagaacacgttaattagtaggacaaggaatttcattagattaaaaaaatgataacttattttatacctctcacagttcgacgagtgcagcaactgctattgctgtgtgtgcctccgaaaatccccctcaggtatgttttggtgtgcagatctgaccggagaagagggctaatttataggcgatcgggcgggctaatttaccgttccataaaccgacttattaattagtttttatttaaccagagctcgattgattaccgttgcatttaattaatcgacggctgatatggtttgtttacgtggtggcacggatcggtgtcgatgcacgccgcactgctattggctggcgctactaacacaaggatttcctggttcctgcgaatttatgatggtaatcctcctttggataaaaattgtttcctttcactgtagatcatcaagacaaatcatgccatatatatctatatctatatctatatctatatctataatataaaaaggaggagttgtccacctccaatcctacatacaaaatcattcggattgatccctaccgtccatctgcgcgagtgatttcaccaccacacgatccatccatccacgccgaatacgccgaatacttcgctcctcctcctccacccgcgaagacatcaccccacgcgcgaatacttcgcttctccagttctcctcctcctcgctcgcttgctcctcctccccgcatgttctaccgccgcgccgctgcatcctctctggagatcttccccgcgtggactgccgccgccagagcctctgattcttccccgtcgccggagccagtgcttcttccccgcgtggattgtcgccgcatccccgccgccggcgccgctgattcttccccatcgccggagccggtgtttcttccccgcgtagactgtcgccgcatccccgctgccggagccgctgcttcttccctgccgccggagccgccgtggccggttccgacctcaactccatccgccggcgccggcgcctagatccactgccgcggccgaagccgactttccaccgcttccttgagacgttcaacgagagagacgactgccggtgcgacacttcaacattatgctctaccacaacgctacagagtacagaccaggttcggcacaatactaggtttcctcgcttttaacttcacaattgcttctgttccttctggtgtttgttcccacaaaatgcatgtggcatggaagatgcttgatggaatactcaattgattattcgatacagtatcatttgttgcagtttttagatcttccaattaactagcgcaacaacaacagattctggttcctctttctttattttctgcttgccatttatatttatatttatgttcgttaaaagaaattcagcactgaagtataaatgttcacccatttctctgtgatatcaggcttgttaacaacaatgtttttgtgcaggaattcctatttattaaaaagctatggtatgttagctacattttaaacgaacaggatatgattatctgagctttgtccagctccagtctctaaagatgggatgttcagtttgtaatcatagaacacacgcgcaacaatcttgcagtggggaataccatgatgcacaggttagaatgagagagggatggcattggaattgtcaaagatttctcatacacctaagccaaagccctttcctcttttggtctttccttctttctatgtaacaagggaatgatctggtcacagaatactgcagcggtttgatcaacgaaaagcaggtgataaatgttggtgtttgacttatgcccaggttactgtcacgcccataaattcacgaaccagaatttttaagctgaatgtgcattaaatccctgtctaggaccagccaggatatacaaatgacaattgttgacatatagatccacgtcttacaaaaatagaaaagattacaaatgcagccgaaaagataaaagcgagctaaaccgggaagcttgacttcagcagcggggcgactccactccacacaggcaatccttgacggcggcgatgaaaccaactttgacaagacagctcccactaggaagattttcagttctggtgtggggaaaaagagagcaagactgagtactacccactgtactcagcaagtcataccggaagaggaggtatgatgcaggatataaccaaaggaggctaggggttcatttgcataaagcaggcatttaaaagcagaagttgaaaacagtaaaacaattgtagtaattaatcaacattaaccaatcactgtccaatgctacaccacgttgcaacaagcccaaccaaccacctgaactacaccagttcattaagctaaactaggggtgagactaatcacggtgaatctggttgatcgcccataaccacgggcacgactattcgaatagttttactctggccagaggtgtacaactgtactcacaagacacaattccacacatgttgccatgccccgaagtatcaccatgatactgcaaagggggaaatcgtgacaagaccctccgcataaccctcccctaaccatccacaccacgctaaggtttcacccgcacccccaacgggcagtgggcggtcccctcttgcgccgcggtgaatccggcagctggacaactggacaccccggctgacccaactccatcatgcccaccctcaccaccggtgcctaggaaagggtcgagctatacttcagatcaagcagttacccactcccgcttgtggtaagcacgataagtcttctagggtttcccgtgaaccggtccttaattgccatgggtgcgaccagaaaaaccatgcacccacagcccacccttcagtgtattttaattaactaacaccaatgcggtggcaccaatccaaagctatgctcatagtcaaagtctatgtaataatgtgatccccatttgtgtactagttgaactacacatagctaagcatttcctaaaccaacatctagtcatttggacactcaagttatcaatggcataaggtaaacaatatatggctgagtaatgggacccatcccacatgacattgtaaaagaatgcaacatttaatagaaatgcgggatatttgtaaattgggtacaatatgatgaattgtaacgcatgacttgccttcctttcgcactgatgagcccacatcaacgtcttcgtggaaccgcggatcgacaaaacggccgaaatctacgcgacaaacaaaacacacaagcaaaacacactataagactactgaaaaaggaaacaaaaccatttttaatggattctagggatttttatgaatttactgagacttgaatggacttaaacggagctcggatgaattaggtatgaattttagaagataaactgtgtttttactactaaagaaaagcccttaattaattattgcgcaataaatccccagggctgacgtcatcaagggagggggcggcgccggtaagcgggccccacatctcagcggctcgaggtggccggtccaccgtggaccgggaccacatgagtggtccaccgccggtccacgggaccgacggtacagatcggcctgaggccaatcggacggcgtaggtgaggctaggcatggctcggctcggcacaaagacggccggccagccatggggagcggcggcggcgagcgcgcgccggcaacggaaagcggcagtgcgggaggcagcggcggacgtctcactggccggcggcagcggccgaaggcgatggcgagcgcagagagtggcggcgcgtgcgggacagagggaaggagggaggagaggagctcctcaccgatgagcacggtggccggcgcgaaggatggaggtggcggcgatgaccgcgatgcggagggacggacgggcggcggcgacaccctaggagaagatggagaggcgtcaggagaggagataacgaccacggcggctttaaacaccggccgaagatggggtggacggcgtgactcaccggcgtgcgaggagagaggcgctccagtgggattccggcaacgtgaggcggcggccgggaaagctcttgcggcggcggcttggcacggcggcggccctagaagcgacagcacgcggccggagatgggcggcggcgacggagctcggcgagcgcggcgcgacggcggtagagggcgtgggagtggacggttaatgggggaaatgagagagagagctcgagggaggatttttatgggcgctttgggggcagaaacggccgaggatggcccctatttggccggcgacgtggggagtggagagagagagagaggtggattcgaatgcgaatcccgcccatttttgggcgtgcgcgagagcgggaagaggtggaggaggtgggcggcgatgtgggcgcgagcgcggggcgcggagtgggggcggggaggcggaaaacacggcggcgcgggcggttactgccggggcacggtcggctggaggaaggggacgaccccgacaggtggggcccacctgtcggcgttccggagggaaggggaaggggaaacaggccggcccaacaaggggaggtggcgcgggagagagatgggccgacggcccatcaagagaaaaaggaaggaaaagaaaagataaagaggaaaatgattttcctgggattaaaaatattgcacttgctcatttttaattggttaaaattatttatagggctctgaaaattccactaaaaatcttgttaatgcattagggcatggggaactcaagaaaaattccaccacgctatttccaattattagttgcatttattaattagggattcaactctaggttaattagaacaatttctccagacgatttatttaacaaatttttaaaacaagaaaaaggggaaacttcaaggcgtgacaaagattacccaccttgattttgtgcctaccttgaaacatgaagcctcaatatgattgttcaccattccagcttaccaactatattgaaatatcaatctattatgtaagctgcctttacaaattaattattactctttgttgataatgttcagagccactgagcttgttcttgctttcaaatatggtgctgctctcatgaatattgataaagtttgccatctcttcatggtagttttgtatgtttgtgcaggtcttccaaattacacatagttcattatgcttgggacagaataatacaatagttgatataaatgtgcagaaaaaactgaaagaaatttcagattgcttaatattttgatgtgagtttatcacgggtgcatattggagtgactgaacaatgattctcattggtaatcattttctcctaccttctacttccttcagtttctcatattccttttttacgaattatatacctccgtatttaaacagctttttatatatttgttttctataaatattaaatgataattactcatttttcattttttttcgtggtggtacactatgagaattttccgaaatactatgtcctgccacatggttgctgaatacattcaagggcattgcactgtccattccattcagtactgggcatatgcattacattaggcacacacaggagaaacatgccatagattaagtcatagagttctgccttcaaatttggaaagaaaaagatattcagagtggcttcagccttcaggtaatgttacgcaagcggacaataatgttgttattaatttgatatatttttaagtgctatagaaatcgatgaaactaattcaggttttgtagacagcttggtgatcaaggcctaccaatatttaatgagttatgtcccttgattgatacactaaagcttattctcataggcaattttgatctagcaaaatatgtgtgcaatgggtgcaagtaatagaagctgcaaggcatattatgaacaatcaaattgtttctgaactgaagtagcaggtttaattttggtcaggtatttaatacagaccaaatttatagtggtaagaagtaacgagaaatgcccgtgcgttgcaccgggtattggtggggtggctgaagtttgatattaacgacttatcaaaagcacacgagatgattataagtacaatgataaaaaggtcatgtttgtttttgataattaatttactctatatttggacgacttagatgacgcttctgacgtgtgtgggcttgatggtcatggcaagggaggaatgagtggcgaacaattaatgtgtctccttttgcatatagggcgacatatggaaatttatgtgatgaaaaatgaatggaattgacctaaaggcacctccccagatttatatttccccatatttatatttgtagtttaattaaactttcttcagcatttatttaatagagttgtaaccgaaccaagggatttcttgagattcttaagttatcaatggtgagattctgtcaggtgacttctaaccttgaatttgtttcagaagtcaccagattgtttaacacgctagatgctatctcactgcaagatcctgcctttttttttatctgaagttatactgagctgctacctcctcaggcttcattctgtccccgtccgcaccttcctcgatgatgataaccctaccgcaaggtaactattcatgtcatcttctttgggtattcacgcacatgtggcaacacaacagattggtacatgtgcttttctacagccagatcattgcacaatgtctagaattttctacttatttgcagggtgacatgagaattagtttatcaccccggtcgaaggtatgccccaaaaactagattgaatatacttatgtctctataaagggatattgtgtggattctatgcagctttcagattcgtatgctaaattctatatagatgtatatgctgaattttatgccccaaaaactagattgaatatacagaactatatgcagcttttactctttgaaggtgtatatgcatgctaccatgtttcctgctaagctgtatatagtgcaatttactacgtcctctcttttttttatatatataccttcacagaagacagtaatggatgcaggtagctaactgcgtggaaattggtcttccgtcactcattcgcaaaaataaaagagaagcgtctccattgcttctgaattctggtgccttgcatttgatttaacctcaggataaaaagagtcttgggatatatggcttctttactttacggattgctcttcctgcccaataaatgtattttgcagccttcaagcagataaggatcatggaggctctccaaatgatatatgcttctgttcataatctgcttgtgggttactgtttctgttgacacggataattagtccatctctgtagtcacagatgacaacttttttcccttcaatgcagccacatttttgtgatgctttacaatcttgacagtcagtgcaaaaggaccaatgcagaaatccataaaactgaacaaacaaatggtctatgttaactgagattataagcaagttatttttatactgaaatatatttgtcgccctaggaatatttgagggctaatatatttgtcaagcttaaatattgaattccaatccatgtgcacttggcttcaaggtaaacataattttatttctaagatgtcattttagtttacagtagatgtacacactttaactaggtatgctgtttttaactgtgaactcaataggtgtaactcctactatttaaatgcagatttcaaaaccaagtataccaaaattggcgttgttaagtagttgtacagcaatactgactattatttggtttttatacaatacaactctgctaataagtatagaatcacatcagacatgtaggcatatatgtgcacatgcataaccaggtgaccaaggaagctatactatagaataatgtgaactccttccttttctttttctaattagacactttattgcatagtgttgtggtttgaatgtaaaatagacagatctgttgctcgaggtttccaaacatttatcaagctatgaaaaaaattacatatttggtatcattagatggagttgtttgaatgtaaaatagatagatctgttgctcgaggtttccaaacatttatcaagctatgaaaaaaattgtatatttggtatcattagatgtccttcatttttatagttagtgtaaagggagagttatgtggcatattaatattaaattttgtatttatatgtcctgtgtgttacacgtcgtcggaaaaccatataaatttgattgtgtttatatgtttactatgatatatagtgcgggaacgtgccttgcacgtgcactcttactagtatggaattaaattaagagatattacttatactcaaattaaatattatatctctatctatactattctaaaaattaaagattccgctaaaattttggtactccctccatttcatattactccctccatttctaaatatttgacgccgttgactttttttaaatatgtttgaccattcgtcttattaaaaaaattaagtaattattaattcttttcctaccatttgattcattgttaaatatacttatatgtatacatatagttttacatatttcacaaaagtttttgaataagatgaacggtcaaacatgtgctaaaaagtcaaaggtgtcaaatatttagaaacggagggagtataaaactttatagcatacattcattaacatctatatgaatatgaacaatgctagaaagtcttataatatgaaacggagggagtatgtcataagtgtttgagttagttctatgtcaccgtatccaattcgaagtgactccacccagcttaatccaaccggctcacaccaccttgatgctccatcccgcactgcgcgcctctccccgatcgacgtcttctctctctctctctccttttttttttttgctatttctccttttcttttctcccaatcatcatgtcctcttcctcccctttcaatctcctctattttctcctccttttctctttttccctcatttttcttccaaatttctctcctcataaatatttttttaaaaattatcattaaggtgtgtatggggcaagagtgttactttgcaaatgttttccatctacagttaaattcttttactaattgaatagtcaaaatttcaatctttgatcgatgacatatagcagaaaacataaacgtcaacttatggaatagccacccgatcgatttctgagactatggaaaggtgtacataaaagattcttcatgtgatgatgcatgaagcgagtgcaaccgggtttaatactatatatgatttatgactttgttttgtcattgttttgtttttttgtttgtcatttaaattggtaaagtttttatcaatcgtggaaattgtcttcacccgttgcaacgtacaaacatctttggtagtatgcatggcccctagtccaatttgcatctttgctaccgaatatgtttggtttctgcttccaacgttcccccttccccttctattaggtctaggtcggaagtcccttaaaaaatgtgatggccttttccacgtccaggttgaattacaatttacaccagatcgagcaatcttttgtaccctcctaactccatctccctcttccttcttgcttcatcctcccgccatcgccgcgagacatacgatcccatgaagcttgctcactcactgaaaggagaattaatcgtcctagctaagtgtaatatcccacatcgtacgagattgagtcgctaacgacgaagaagaaagcaaatacttgaagaatgggaaagggattctgatgtgaccatcaaatatatgaatacaaccaagtatgaatggacttgttctggttggtagccacgtcgcaaacgtcgcactcgatcaaagcgagagttatccccttattagaagatcgggccacgagagagagcgtcatcaaattcagagaaaagagggaggaggttgtcaacttacttcattttttctcgccaaatcctataaatctataagtgatcctcacttaatgtagttattacccaatttcctatcctgtagttcatccacgtcataaaaaaaacgtcaatcattgtatgaaatctcaaaggtttggatgcacccaaatcccaatggtatggatcagaacagtccaaacgagagagcccatgagcccatttgtacgtagcctcccgccccgcgactattaccaaaaacgattttcttgtacaaggagctctttagattgcagatagacagcacaaaatcgattttcctatacaaggagctctttagaaaattgattttcgcaggcaggcctcttaatggtccgcacgtaaaaataagcctatttttgcaggtggacctcttaaggggccgcatacgaaaatcaatcttcgcgtgcagacctcttaaaggcccgcctacaagtctattccccctcctatcttccctctcatcaatttcaaaatttttaagtcccattctttatctcctcacctctcattccacagccttatctcctctcccttgtcaagtgcgttgtgtgatagggtagctggccctcggctacggagctcgtagccgcgcgccgtgatgttgggcgaggttttccccctcagcaccgatagacagaggcaaagaggaagaatagaaagtttgtgatcaactccttttcttccaaattctgaatacaaacttaagtaggctctcgggccttaattcatggcgctaatcaaatcattgtaactaattattcctattactaaggatctgattgatccttctgttttcaaatccacgcgctaatcctgctcagccgcgcgtgatcgcgtatacggcgtcgacggcgcgccttcagtgcccctgatcttgcggcccttccttgtataggtgcggccccacatgacatctctccctccctcgacgagcagctcgtcctcgagctagaatgctggatagcgatccatgaaggtatccacatcttcccatgttgccgatgttgccggttctcccttccactcgatgaggacttgtcgcactcctcgagcaagccgcatgcgggtagcacgttcaggttctgggatggcagcaccgttgtggatggccagcagtggtggtcgtgcgtccggcggcattcccacaaacttcttgagaaggctgacgtggaacacatcgtgaagacgagtgcgcggtggtagtgccagccgcacggcaaggttgttgatgagctcattgacttggtaggggccaaaaaatcttggctttagcttgccttttgtgacttgaggaagcgaggccggttcgcggtggcgtagacgcagccatacccagtcactgacctggtaggagacgtcgcggtggtgccggtcgtagaaggccttttgaactgcttgtgcttgctccagccggtagcgtatgtcagctaggatcttgtccctgtcttccatgttgcgagctactgccgccatccgtgtttcacctggttcatatgaacggatggttggtgggtcgcggccgtacaccacgcaaaacggggtatcccgtagtgacgtttggtacgccgtgttgtaggtgtactcggcccatggcagccagtggatccattgtcgcggctggtcgccggtgaagcacctgaggtacatgacgatgactcggttggccgcctctgtctggccgtcggattgcgggtggaatgctgtcatcatgtgtagcttggtgcccatgagtcgcatcagttctcgccagaacaaggaagtgaacactgggtcacgatcggagaccatggactgcggtacgccatgcagacgcacaatgtcggtgaagaaggcttgggcaaccgactcagcagtgtatggatgcgccagggggatgaagtggcagtacttgctgaagcggtcgacgaccgtgaggatgacggatttccatcctacgcgcggcagtgcctccacaaaatcgaggccgatgttggcccagacagccatcggtaccggtaggggcatgagcagtccagccgggtgaagatgttctgacttgtacctctggcacgtggcgcatgccttgatgtagtcctgtaccattcggcggacgttggggatgtggaagtcgcgccggatgcggtggatggtgcgctgcaccccctcatggccgtcgtcgtggatggcagtcagcaactctaggagcagtggggaggacggtggtatgtatagacgtgcgtcgaacgccaccatgccgtctatcagtgaccaaggcgccgcgcgtgtgccggcttggatctcatcccccaaggccctgatggcaggatcggtatcctgtgcttgccagagtcgctcgacatagtcgaaccgtggcgcagagatggcgaggatcatgccgtcgtcggtgtcgcgacgtgagagggcatcggccaccgtgttcaaggcacccggcttgtattccacagtgaagtcgaacccaaggagcttgccgacccagtggtgttgtgggatttttgcgagacgctggtcgaggagaaactttaaactgtagtggtccgtgcgtaccaagaaacggcgtccccacagatatggccgccaatgcctaatggcatggacgaggccgatcagttcacgttcgtatgccgcgagagatcggtgtcgaggtgcgaccggcctgctgaaataggcaaccgggtgcttgtcttggatgagtacggtgccgaacccatgggacgatgtgtcgcattcgacgacgaatggcttggtgaagtcgggcaaaaccaggaccgacgccgatgtgatagccgtcttgagcgcctggaatgccgtggtcgcgtcgtcgttccacaggaacccctctttcttgagcagtgctattagtggtgcagctatggtgccgtagtcgcggacgaacttgcggtagtagcccgtcaagccgaggaagccgcgcacagcttgaacagaccgtggttggggccagtcacggacggcctgtaccttggcgggatccatggcgacgcaggactcggtgatgatatggcctaggtaggagatggaggagaccccaaacgcgcacttggaacgcttgacgaatagccaatgttgttggagagtgtcgaggacggcccggagatgtcggagatggtctgcccacgtgacactatatatgagaatgtcgtcgaagaagacaaggacgaaccgatgaagaaacggccgcaggacgtcgttcatcaatgcttggaatgtggccggcgccttgcaaagtccaaacggcatcaccaggaactcgtacagtccgtcgtgtgtgcggaacgccgtcttggcgacatctgctggattcatctggacctggtggtaccctgaacggagatcgagtttggtgaagaacttggcgccatgaagtttgtccagtagttcgtcgacgaccgggataggaaaagcgtccttaacggtgatggcattgagggcggtagtcgacgcagaaacgccacgtcgcgtcggctgtcttgacgagtaggaccggtgaagaaaacgccaaagagctccgacgaatgatcccttgctccatcatgaccttgcactatcgttcgagctcatccttgtgtgtggccgggtacctgtaaggccgaacagccaccggctgggcacccggggagaggacgatgctgtggtcgcggctccgtggtggaggaaggccttgaggctcggagaaaacatcagcgaacgcgaagagcagtgcgtcgagcaggttgtcgccggctgtggtggtgtggagtgatgtcgtctcctgtcctgccacgccctgccagcgaacttgacggtcgctgcgccaaaatgacatagtccgggaggcgaaatcccagagaatcggccccagagacgcgagccagttggtgccgaggacgacgtcatagccggccagcggtaagacgaataggtcggccgtgaaggtgtccccattgatgacgacgctgcttgccagagtacgctgaggcagggaactcgctccccattcgcgacggtcaccttcatgcgagcgcgtcggtgtagcgtcatggccgtgcgtgcggctgcgtcctcggagatgaaattgttggtggagcccgagtcgagtagcgccaatagggtcgtgtcgctgatcttgatgtgcagctgcatggtggcgctgaggcggatcccgacgatggcgtggagggagatgtgcggctcgctgtcgtcgtcgtcttgagactcgtcgtcggtgtcgtctgcagtttccagcaaaaataggcgctagcataccttgttgtggccgcggccaaaattttcgttgcagttgtagtagagaccgagtcgacgacgctcctccatcttggtctgtgacaggcacttgacaggacggccttccacgatggccgtcggcggctgagcgtttggcgcaggcaaggcgagacgtggtgccggcggtgggagccgatctcgttgttgtcggactggtggtgcggcgcattgcgctcgcagctccagtttgcgggccaaactcatggcgtgggcgagcgagttgggattgtgaatctcgacgtcgaggctgagcggaggttgtagtgcagcggtgaagagctgcaccttctgtgcttccgtgaggtggccggcgcgtggcagcagcgcctcgaaacggtcctggtactccaccacggaccctgtacgcttgcaggctgcaagttcgcccagggggttggaatggagcggcggttcatagcgcaaatgaagtagctcggtgaagcgacgccaagacggtgtgccttcctctcgctggacttgtatgaaccacatttgcgcaccatcctcgagattgtacgaagccatccataccttctcctcctccatgacgtgttgctggtagaagtaggactcgcatcggttgatgaaggcgagtggatcagtcttgccgtcgtaccacggaaagtcgagcttctgaaaccttggcggtcgatcttgggtgtgttcgcccgagcttgtcctgccgcttgtagacccagtgcactgattgttgaggagttgaatggcctgtgagtttgcctcgacggaggcttgcagcgacttgatggtggcggtgagggcttccagtgatgcttggatagctgcgtctcccatggtggtcgatcgctacggcgtcgttggagcggaactggagcgtggtggctgtggaggtggtgtagcgcggcgcggcaaggatggcctggatcgtgataccaagttgtgatagggtagctggccctcggctacagagttcgtagccacgcgccgtgatgttgggcgaggttttccccctcagcaccgatagacagaggcaaagaggaagaatagaaagtttgtgatcaactccatttcttccaaattctgaatacaaaacttaagtaggctctcgggccttaattcttggcgctaatcaaatcattgtaactaattattcctattactaaggatctgattgatccttctgttttcaaatccatgcgctaatcctgcttagccgcgcgtgatcgcgtatacggcgtcgacggcgcgccttcagcgcccctgatcttgtggcccttccttgtataggtgcggccccacatgacatccctcaccactaacttacctctaccttctcccactttccaacggcgaccgacggcgacggctcaggagatggagaggcgcggtggcgggcgtcggacccaacgacgggtgcggctgtgaaggcggtggagaggtgctcgtgcggccgccggatccgaagatggggatccgcaagaggctcggcctctagtggctggatccgtcgccggcaaccgtttgtagagtggatccatcaccggccaccacagggagggcggatccatcgcaggcaactgcaaggacgacgacggccggcctcgggcagggtgaagatgatgacgacggctaggttggcagcagtggtctcccgtcaacggtagcaccgaaaacagtgttagatccgccgtcgcggggcctcgggcggctggatccgtagccggcgaccacagggagggtggagctgtcgtcggcgaccgcggggactaccacggcgggcctcgggcagggcgacgatgacaacagttctgccggcgacaacgggaggtgcggatccgcggcgacgacgatgccgaggaggaggtggccgggagcggggtcctcggccccacaacggccgaatctgcgccgtccccgccgatgatgaggaagaggcgaacgggagcagcgccaccagcctagcgcgcacgtgcgctgaccagattcgcgcctccgccatcggattcccagggttttgatttttttttatttttatattttttttggatttttagttttccttccgggcgacataagcacccgcacgcgaaaatccaattttcgcgtgcgggtacaccacccgcacagaaaaatcagatttcgtagaccttttggcacagacgggccaggcttccacacatgaaagtaggttttggctcgcacagaaaaattgtttttgtactagtgtgccccccagctcagtaacgcatgtttctccatctcccgttctgcgagaaacagaaaccaccgccgcaaagttagaagacttcatggctgtcatcaagacagtggcatcatttcctcaacttcaagaaaccatattttctccacatcatgcccctcacatttcttctactaaggttctgaataaattatatttttagttttttactgctttgaccaagttaattgaggttctaaatgtagagataaaattatgaaaaaaaataccagtgagttgcagaggttgagtagcatttgtatgaatttttacatgattttatcttgcaccacttacttttaagattttatataggcttgacattacatatatgttttattgttaagatgcaactaaatgctaaataaaattataactagcttatgtatgaccttagatgttgttgttatgcttgatttctatctttcatgttttcataagttgcatgtatgcatattttgtgtcataataaacaaaggttaaggtgaaatatgaattatgtatgagtaaatgtaattatataattttgtattcatgagatgtattcaggtgaattgccaatttagatgatggattctaacatatgtcatgttgtaattttaagtcataataattttaggaaatgattttccatattagatgtagggtcatttactttaattactatgtgatactccgcactttgctgcagtattcatggatgagtatacgttaaatattgtcgaaatgatgaaagttgaaatgttgagaaaataatgtgtggaagatgattagatgcatacttgttgatctctataatataatattgtaaatgatgtgtaattgttagtgagtgaagatgtagcatgcttgcatggattttaaatgggtttgaatagtaattgctagtgggtgatcatgtggtatgcttgcatgttgaggtttagcttctaataattgttagtgtgtaccaactatattgaaacaatagatttgcttctagttttaagtaatgcacacgagacctattatgaagtgcatttaaaatccaaaaacacacaaagaactcaaatcacaccaaaacaatcatgcaaaaaatgcaagcacactctatgttttattttattctagaactgcaatggaaaggttttaagggcatgttcactttgatgccattttcaaccttaccaaattttggtaaagttaacaaaaaaaaagtggctacatttagtttgcagccaaattttggtaactatataagaaatcctaacaaaattttggcgagttgccaaaattgccaaaatttggtaagatttttttggcatcaaagtgaacaggccgcgcttaaggtttccggtttaggtggtaaacttttaggaaattacctaagaaacacacttttggttatgttacatccgatggcccacatgtcattctaaatcgtctgaatttgagccaatccactgccaaccgtcataggggccaacctataatctactaggaaaagttagtggccgaaggtggtggaggtggttcggccgaaccagccttggcggccccggctgcttccttgcacatggcagctgcccattagttggtgatggcggttgtggatgaaccgacctccacaaccgacattccaacaataattggaagctataataggataagctcactcactttccaaatgcacaacaaagtggagtacaactcatttttatattctaggcatcactttagtatgtggaattaggtagagagtgagggggagctccggaaggagtgtcccaaatgttgggtttgtcgacattcttccactggagtttcggagaagcactgaagttatcggctttcttctctcgcttgtacctcgacggatgctctttgaatgaagtaagtattcgagacgtctatatggtatttaatttatttgcttaagtgacatatattcctatctttgcgggttcctcgcttagtattattattgagtgctttagtactaggactcttaataaagaaggaagttcctgcacaatatagtagagtagtaatcaataacttagacatgctatctaggttagcggttatcttcatttgttgcgtactccacggaaagtgaagtagacagcaggaggtgatagtcatatccttcaatgttcaagtacattatagagccgtagtccggactctgcttggtagaccgggggagtcggtgcctgaagccatcgatagtttagtaaattaacccataggaatcatctatggcctaaacctaccattagttgttgtacttagataaagtactattcttacgctatacacatgttccctgtgaattaatactcttatctcttggaatactctaaggtaaggtgctacaatggaatccccatgattcagtacatttggaatactctgaggtgaaatgctacaatggaatccgtgcgcttgctgatttatttgtgagcgtatcaagtaccaacagtggtgtgttatttttgtattctgtgtagcatgatcctattctggtctagcagagggagagggaattaagttggggtcccaacaaaattgccttcaaattaaagtttgtggaatataccatcaagtagaacttgcacaccagtagcttaattaacttggcatacgagtagtatttataatattgaacggaaactaaacaaattaatggccgacaattaggttcgcggcgtaacaactagcgtaactgatataagctagtatcatatatgttgtcgaatagcagcagtatgtgaatcagaggcccatgcagtgtgaggttgggtggaattagagcctctcgccacgaatcctcctggcaagctgaacgtccttggacatgatggtgacgcgcttggagtggatggcgcagaggttggtgtcctcgaacagacccaccaggtacgcctccgccgcctcctgcagtgccagcaccgcgtggctctggaacctcatgtcgtgctgcacccaccaaaacatcgcaaaaatcaattaacgtacatacaagcatccttagaatagaatgaatcgatcgacataatttaaacgtttggttaccttgaagagctgtgcgatctccctgacgagcctctggaacggcagcttccttatcagcagctctgtgttcttctgatactttcggatctccctgcagttggagcaaaattacttcagtcttcatgagggttaagcatgtgatggtatggaaaacattgctctgaaattttcctcaaacaatttgcttcatcagagttcgatcgatacaacagaaagaaaacgcggagatgctggattgaattctattattgaaataaaggaacaaccagcgtgaaattagacgaaaaaaattgtgaatatgtatatacctaaggttacatacctaagggctacggtcccaggacggtatcggtgtggcttcttaactcctccaatgcacggagcagacttacgagcggcggcctgcatgtcgatcgattgtaatatatatacatcaacgcacgtgttggcaagcgaagcaaaaaaaaattatgttcggtaaactattaaataatgtattgtggaggtgaaggatatattgtacatgtatagcagcgacgagttgctttctaggcgcctttcctcccgtggacttgcgaacaatctgcttagtacgagccatcctgcagcaaaccatgcgcacgcatacacatatatagacaagaacattattcacacgttggctatatacaatagtaatacatcggctttcaagactcttataaggagagcaagcttttttttcatcgcacggaggggaaaaggaggggaaaagagatttatagatgtcggttttaaatgaatcggtttttatgaaccgatacatatgagagattttatagtagtgaagttagaatggcgagagagatctgaatttataaaccttatcccaagaccttgcaatgttcgcaataatactacccctatatatttaaataactttttttggtacttagcgtgcaactttaaccactatttttgaatcaaaacataataataataataataataataataataataataataataataataataataataataataataataataataataataataataataataataatacaaaaaatattataaaagtaaagcaaaaaatataaaaatctacccatatgatttttagttatgttttaaactaagtaatttgagagctagattgttgaagtttaagaagtttaaccgagtaaactcaatattgtcacatatttttatacggaggaattagccactcgttcacaaaattagaatggacacattacctgtcgagaaaagataaaggcgaatcctacaaaagtatttactccatctatttcaaaataagtttatttttagtcttcattatttgtggccaattaaatgaacctctatcgcttcgtctagttacctatccaccatttttatactatttttttactagtagagttattttggatagagggactacaaattagtacaattaaaaagatgcatgaaactttgcatcacatcaaagagctattgacgaagcaactatgcttgaataatcaataagtcaaaataaagctaattttgttataatatttgaattgagaactaagaatataaaacaccaagagaaactttatagagatcttgggaagctaacgtgtgcggaagaatggatgataactcgtacctctgacagttcgagggcagtaaccgctttgctcttcagggatggccgactactgatctgtttcttggtgatccggacggagaaagagggcaatttataggcagtcaggagggagggtttaccatcttgtgaaccgacttaattactcatgagcctttaacgtggggtcgtttgattgccgttggtttgatcggacggctaagagggttcgattaggtggtggcacggatcagtggtgatacatactgccctcctattggctgtcgctagtagcacaaggatccctgtgtagtaggggtgaaaacggagcggatagtttccgtccgctccggtcaaaaacggatacggatagtgttcggagcggatttttttcggatagttcgaatacggatacgaatacggatattttttctccggatacggatacgaatatggtaacgcagtttccggcgaatacgaatacggagccgaatatccccggagattaagatgcgcggatatccgcgtaacgcttgatgtctctccagcctccagcccatcccttcaatttcagcacatagttttctctcggctatctaaaccctagctgccagatgggcgacggcggcggcggcggtgacgacagcagcggcaagccggcgacagtggcggcggctgtcttagatctccttggctccttgctggagttgctgggcattggccttcaatccccctagtgcttgtttctgcttcctatctccctaaatcgtgggacagtgggaggctaggagccgttaccaccgccggcggcaaggcctcttgcatgcactaatctcttaggtaatccattgatttgttcttctcctgtaacctttgttttgtgcctttcatgagatcgataaactgatgtagatcttggatgtgcttttttttactttgtgtctagattggtgatggagtctggtagtgcaagtagtgcaagtgcagctgcaagtaccactgcatcatctccagttttgcaactcccagcacctccaagccatgctacggcagctacgcaggacacttctcctactgctggtgccttggcacacaatgatgcaattgatttgacaaccaatgatgattctgaggttttacctcctcctggtaagaagcaaaagaagtgtagttctgaagtttggcagcactacactaaatataaggtaagcaagaaagggtcagatgacactgtgattgtagaggagtatgctaaatgcaacaagtgctcatataaacgtcggtgtgagagtaattgtggcacttctgttttctggaatcacttgaataacaagcacaacattaagtcaggtcaacaacaactacagatgaaaaagagtgaagatggtactgaaagagctgttgagacatacaggagctgttgagacatacaggtatgatgagacggttagcctgaaaaagttctatatggcaatcatcatgcatgagtatccctttaacattgttgagcatgattactttgtggattttattaagtctttacgccctacttttccaattaagagtcgcattactgtgagaaaggatattctaaacatatatgaagaggaaaagaagaaattgtggcagcatttgcttacactctcatgccgttttagcacaaccatggacatgtggacatctaaccaaaataaaagttatatgtgcatcacagttcattggatagaggacacttggaacatgcaaaagaggatcattaagtttatgcatgtagaaggacatcattcaggaagtaatatgtgcaaagagttttatgacaacatagttgattggaatcttgatagaaggcttgttggacttactttggacaatgcatcgtctaatgatgtttgtgttaagggtgttattttaaaactccgtaaaatctctcctttaatttgcgatggcatcttctttcatgtgagatgtttcaatcatatcttgaaccttgttgcacaagatggtctgaaacaaatcacaggagctgtattaaagatcagaaatactatttcaattctaaagcactcgccactgcagtttgaggcatttcagaagtgtgccttggaagttagtttggataacacaaagggcctttccatggatactcctacaagatggaactccacatttctcatgttgaagaatgctatctactacagaaatgcttttgataggttgtttcttcggcatggtagaaagtatgcaaagtgtgctcccaccaaggtagactggtctatggcaatagcactatgcaagtgcttgaagccatttcatgaagcaactgaactattctctggtactacatatccaacagcaaatcattttttcggtaagttttgttccatcaagctttatattgttgattggtgtaacagtacagatggaacaataaaaaccatggcaaacgccatgcaaactaaatatgataagtactgggagaagtcgaatatggctcttgctgttgcatgcttccttgatccacgttacaa

SEQ ID NO: 12539 - DNA, 8909 bp, Oryza sativa
tccgtcaattttcaaaatggaaaattatttttgtaaaacttttaataaaaaaaattaaaaataaaaaaaattcgtcgtccgacgaagaggagtcgtagtaattccagcggcccgacctaacggcaaacatggctgcagatttagacggaaaaagcttgctcacaatgtgtatatattgatataacgtacgtactactactactgtgtagcgcccgctcgttggagacgaggatcgctgtgaaataattggaatacatagctaaaatatgctccccacccctaatcagatcaggtttgggttccgtggagcagagtttggatcggatccgtgcggacggctgtagttatagggcggtaataaagtcgaggtcgcaattgacgacgatgagctcgcgtcgtgtcgatgtgccgcccgtgccaggttcctcgttgggcttggcggtggtgaccgcgcgcggcgggctttggtacgtgtggtgagggtctggtaagcggaagcatgggccgatcgatggttggcattgctggctaactgggctgttcggccttgcccttgctgggcctggtcagcgtggctaggctaggtgactggatagacctggccggcgtggtgctggctcggcctaatctagctggctggtttgagcatggccgactgggctagcccggcaggtttccggttctgaagaacttactttgggaataagttcacttgccttccctcaactttacattaagtttgttcggcataccttaccctcaatactatatatcttcaaccctaaactatacaaaaccgtgcaatttagttcctatggcagaattagcagctggtttcgttgacgtggtatcctagtcagcgaaagaaaataaataacatacgggtcccatatgtaagtgagaagaaagaaaaaaaatatatgtggggcccaacgtgtcaacgcttctcttttttacccaccacgcatgcgaggtcaacatctggggaggcagcagcggctggggcggctaggaggtggtggtgacaaggcggcttcgactaggggcgacaaggaggtggtgatggctaggggtggtgaggaggtgacggcggcgctacaccggctgtggggtagcgatgaggcgagctcagctgggggcagccggtctgtgcggtggcgaggcaacaccgcgctcagggtgttcgccggtcatcctcttgttgcccaagcacctcgctcgcgtttcatctcctcttcgttgacattggcgagccagagccacgacagcgtcggcagcagcgcagggtggggtagaggatgtagcctcaaatccgggtcgacgtcgtgaacctcgaagggagaggaggggagaggcggtcggccacgccggcgagagagggggaagagtaggccaacgaacctaggagggagaggggggagaggcagctgaccgtgcgtggtggagagggggaggaggccgatgaacctgggatggagaggggaagagaggtggtcggcatccatttcacgcccagaaatttagccctaaatttccagactattttgtgtattaaatccctgtccaggaccagccagggtacacaaaatgacaagtaatatacagttccaaacgtaaataaagcgtaaaatacttacagaagaggcacttagtcctcacaccgaaacaaaagccgcagcagcggaaaaaggcgatcctagcggggcttcagctccactccacaggcaaaactcaactggggtctgagccttggtcctctaactccgtcttcagctcagaagcactacacttctgaaaagggggaataatagtaaggctgagtacaaccaccgtactcagcaagccacaccaatgatgcagacgtgcacggggacacaaagaggggtttgtggctatttgcgtaaaggcagttgtaaaacattttattgagcaaaatagtaaaacaattgagtaattaaggtaagattaaatctccactgatcaacgctaaaccacgttgaacaggcccaaccaacccacctgaactacagtgcattaagtcgatttattaggggtgagactaatcacggtgaatctggtcgatcgcccataaccgcgggcacggctattcgaatagttttactctggccagaggtgcacaactgtacccacaagacacaatccaccggcatgtcacagtgtcatcatgtgcccatgatgaacacgtcaccacgtcgagtgattgtgacaagactcttcatataactctcccctaaccatccacaccacgctaaggtttcacccccaccccctaccctagaggtgggcagtcccctcgtgcgctgcggtgaatccggcagctggacaaccggacaccccggccgacccaactccatcacgcccaccctcgccacggtgcctaggaaagggtcgagctatacttcaagtcaagcagttacccactcccgcttgtggtaagtattgtaagtcttccagggtttcccgtgaaccggtccttaattaccatgggtgcgaccagcaaaaccatgcacccacagcccaccattcagtcgcattttagttggataattacgaccatgaaacatggtcaaatgtctcgagcacgcagctcgtcaagatactaagatgtctaatattgtaattatcacatcaactgagctagtggcaattaagcatggctaagcatatagttctagctgtgtcacataagtaacatgagctagtcgatttatcacccaaggttgacaaaggacagatatcaagtaaacatggcacaagcgagcagataggtaaatcccgatcccatgtaattagcaaaacatgcatatttatttgcaaaaggtaaaacatttgtaaagtaggatcaaaatgctcaagggaaatgtgtgacttgccttgcttcttcaaacgatcttcagaactcttttcctcgcgaccgcggacttccgaaacgatggattatacacgctggcacgcaaaacgaggaaaaactctaataaaaaccaaggaaatagtacataaaaagtaaacaaacatgtagagctcaattttagatgaattttgcaagttgaatagctcaattcggagttcggataaattagatatgaattttagaagttttgagccaccttaatggatttatagaattattaatgatttattgcgcaattaataatggtttatgacgtcaccgaggggaataggttgcgccgacaagtgggccccacctgtcggtggctcaaaggaggtcggcgcacggtggactcagtccacgcgcgcgctgcccgcgggcgcaccacgtggggggccgcggtggacggggaggacgaggtggcgccgacgtggcgccacagggcagcgacgccaggcggcacgaggagagccacgtggacggcccatatcgccccgaagggggatggggtggccacgggcgagcgggagccggctcaccgaccggccggacggggagccacggcgcatggcccgatgatcgccggcaacgaccaccggcgcgacggcatgtgcgggaggcggcagaaagaggggaaagggagaggagatggagggggtcctcaccgaggggcgccggtgacggaaggacgacggaaggcggctggcggagctcgggcggagggaggcggcgctgctccggcgatgggcggcgcttgggaagaaactgacgagggtggccgcgacctgcggaaggggaaggagggattaaggaggggaggaccagagcggtgcagccaaaacaatggccggcagcgacagtactaggtggagctcaccttgagtgatggggatggggtttcggtgacgattcacggaggatgagcggtggccgggcttgcccttgggacggcgaagccggtggaggtggttgcgcggcacggcgatggctaggacggcagtggtggtcggctggagacggtagaggcggcggtggctcggttttgcagtagggcggcgtttgtgcggtggtttcgagggggagagcagcggccggggtggggcttgatgcagcgaagccgccggcgcaagcggcgaggtgcggcgtcaactagcgcggcgacagcggccggctgaaggttgccggcgagcggcggcgatggggagcggcgtggggagagcgggagaaggcgagggaagcgccgacgaggaggggaaacgagagaagggagcccgaggatggattttataggctcggggagggaaaaacgttgccgggcgtggcggatttggggcggcaatgaccagcgacgtgggtgacatcatgggcgaagtggagctcgatcccggcacgatttttgggggaaacgtggggagagtgtagaggaggtggatgggaaccgatttcatgcggtttgggcgtgagggcgtgagcgggaggagccggaatcggcggcgatgtgggcggcatggcggcttcggcggtttggatgagggaggctggaggtagaggaagggtctgacaagcgggtcccgcagccccacttgtcggcctgaggggagggaggaggcgcgcagggaggcaaagcagacttggggaggggaggcgcgctgggccggcggcccgaggagagtagggaggagggggcggccagccttagagagagggagggcgcccaggccgcggggaggcaaaggagacggcccaagggaaagaaggggaatttaaattggttttctttttattttaattgataaaatgaactttgtgactttaaaattacttcttgagctccgaaaattcgcggaaaaatccagaaagtattttagggtacaaagaatattacaaaatgtttccggccaataatttttaagggaaaattttaatttcccctataatttcacttgattaaattgcttaaatttttatttaatttctgggaaatgcattattaagtgatttttaatcccgaacgaaaatcggggcattacaatccagcagttgctcctccatccagtcccccgtcggtccttctccgctcagccccccgccgctccttcctcaccagcgttgcctgtgtgcatcatcggtgtcgtcgagccggtggagctcagccggccgcctccccccggcgccagcgacctcccgagaagagaagagaagaaaggaaaaaaaagagaaaagagaagaaagaagagatttgggtcccacatttttctcacttacctgtaggtgtcatattttatttatttatttatttgctgactaggatgccacgtcagcgaaaccatagatatatactgctatgggatctaaattgtgcggttttgtatagtttagtggtgaagattttttgtattggggattattgacgtcatataaactcgacgtaaagttgagggacagctgttgaacttattcatacttctactttggaagaagagattttgcgagtttttttttatttcggttgctctctgcctctgtagctatctcatagtatacagagtaaattgcctctggaaaactactcaaaattcatggatacaattaataaacaaaccaacattgaataactaaacgatgatggtacgtttatatgtcaacagcatacgatgaaatgaaatgcgatacggtgtcataattgcatgggcatctggccaattttcaagccataatagtactatataaattgatgccctatttggtgggtatcttttctttctataaagttaaggccaaaatctcaaacctcatgcttctacgtcatcatcaaattgtgaaccgttggatgaatgtattaggatgaatgtattagattgcttctcaaacgttggagggaatgcagcatagagcctaacccatcagtcaccggatgagtctcttcgcctacttagtgccaaatatagcccacatgaacacattggcccatctccacacacatctacatgtatccagcccgtcaatccgtataaaatagttttatggctgaacgctccttcagttgacatgtgctacctaaattatctacaaattttggatagggctgctaaaaagaatttcttcaagaaagctatttgtttcttttgtttcttcttgagattgtacctcctatctaacaaattaatattaaccaagtcccacaacaacgcgaggagccctctagtattatatatatgtgcgttctgaagaaccaccaaaacgaacacgatccttcacccggtcacccctactggccaacgtgttgttatagacgctacttcctctgtcacatatcaaattcatttgtagctctttccatttatctcaaaataaatagttcatatttagaaaattattgcgttggaatagttatattggaagaagataaagtatgagtattggtatacttcctccgtacttataaaggaagttattttagacaatgtttaagtcaaaccttaggaatataaatcaataataactcttaagttgttgagtttgaaaatataaaaattatattaatagatttgtcttgaaaagtactttcataaaagtatacatgtatcacttttcaataaatatttttatagaaataagaaatcaaagttgtgttttagagatcgtgtcgctgttttaaatgactttttttacgagtacggagggagtatgtgggatggatggaaaaaaacttattttgagatggatgtactattaacatgagttagtttcaactatatttagaatatgtcacgacttaatgatgatgggatggcaacattgtcaaccagctttaattactccttaatctcttatgctcctagtcttgcatacctggtgacggtggtgagccatgcgggaacgacgaactatcgtataaaactttgttgatttcttagccccacatgttatagaccccatcaaaaataaaatttggtaatagaatattataaaagttttcatctttacaaaataatgataaatttattataatgataatatatttgagaaaaaaaccgttgcaaatcacggagattatgctagtgtttaaatagcaaatctggtaggcctgcctgaagccatgctgactaggagcctgctagtgacaggctggctggcaaccactttggatgcattaaatcgaccatgagcaaataatagagaagttgctcacaaaataagcaaaaaaaaaaaaccaatacctgtatttatctcagagcgatggcactcatggaataattaattttggtaattttattttctaatccttttagtacttcaattttatgaacatagaccgttgaaaatctttacatatctatattagtccccactaccaactccttatttttcttaaaaaaaagaagttaaaatgacatggatccacatatcaactacttccaccaccaactcccaactttgtgagaagaaaaaaaaataatgcgagacattaacaaatatatgctgaaatcaaggtatgctatatacatagaaaataatgataacaatgggctatataataattttttaattaaaatctcatcccaacgtataggtaatatgcaagtaatctaaatactactacaaaactaaagttagtgctgagttcatgcagtaaaaactgcaaagctttactctgctcatgcctcattgcctgctcaagctttctgtcgttgtgacctgttctcgcttcagctttttttttttttttttgcaaacacattaattgatttataattaagagtactacagacagagctgaagggaaatatcatccgcagtacattgccagaaaagataaaatatatacaacaaaaccatccattcagacataaagccaattgaactaagaaaaactttctccaagataatccaaacaacagtaatggacgagatcgacaagggactgtggcattgcgcgacgactacgtccacgagcctctactaaagacatgcacaccgctcttcggctgcctccacggaagtgacactcttcgagatttgttgttgagttgtagattttgcttaaacttcaccagactcaacaaaggatcgccaaggagttctccatcaaatctgaggagcactgaccggtctgtactcaacccgaatggaatcctcaacttaattggatactgctgcaaggagaaccggaaaaagtcttcacaccccagctcgtctgaggacgctgattgtcaacattttgtcaaatgaagaagaagaagaagaagaagaagaagaagaagaagaagaagaagaagagaagattggaatgagggagaagaaaggtgaaataataggggcagcatcaaccatatgaacatatatattacattggttactgcaaaactaatttggtgatattatcaaagacaaaaaaacttggtgtcaaaagagcaagtgcagacaaattcggtcctacatcatcaaaatttcctagtttattaaccagtgggccaatgctgtcttatcaattattgtcagaactaaaaaaaatagatttggaaacaagttccaggatgatttacttttaaaacatcaataaggccagctagtgcagaaggttctttgggggaagcgctacacaaaacgacatccattcatattatttttaataattgcattagatcctagcgtttagttcgagagtttctagccaaaaaatattaactccatatctttaactactttgggcactccaaaattgatagaaagttgggagagttctttttcctcaacgatagaggcttgttttcatgctagcatcttttgaatatataacaaaacaagagatcacttgaaagaacattcctataccgtctattatatttcatttctaactcccgcacttcatattgggaaaagtaaagatgcaaacgctggtagaagcatcatataaatggattacatagacccaaacagaatgtaatcgtttaaaacgatgtttatttagaaagtactcccttgttaacaactaaat

SEQ ID NO: 12540 - DNA, 8490 bp, Oryza sativa
ttgattccattgacatctgagagtataatgtagctaacattagaagactcattgtctaaaaaaaagctaacattagaagactatgaataaggagtataatgtagctaacattagaagactcattgtctaaaaaaagctacattagaagactatgaataagtaataggtaggtaactcgcgattgcataactacataaggggggacaaacaaattattgattaaaaagagcattcaaagccaactacataaggggggcaaacaaattattgattaaaaagagcattcaaagcctacatgggttacctgattattaactataaacagaggaatcaatgtaagatcgtaacaaccaaaatgagaatggctccaaagtagaaaaagggaccacacaccatctgattacttggttacattaccaccagcatctgacatcattagcagcattcacgtgatggccccataagactaaatagaaatttctatcaagcataacataacgttcacattctcttgtgctacaaattttagttgaagaataatttcaaatgtgctttattcatagttttgggagtaacatgggtttggcaacataactgttcaaaattacaatgacggtaggaagtccatacccacatattactgaaacagaagggctacgcttgacgcattaagacctagtctgatcatatttcttaccttaactaatgaaataatagaagtacaaataaaacgacatcgattacaaaactacccaactctacccagatcatcagaacccatgaaatacaccatttcacctccccacccgaaccgcagcggcagcagcccaaacaatggaagaaacaccctccgaagtccgaacccacacattacagcataattaggcacagcctagtaggctaccgcataattagacacagatgcgatccgcaccaggcgagctccgatcgaacggaaggatccagcaggcacgcgagggggcaaacggagcagaagaggaatcgagacggagaggcatggtaccttgggccgcacgggctcggggcgcctctcgggcgtcgtcgtcatcgcgagccgcggaatgcggatggggcttcgctggagcctcctcgaggtcgtcgcgggccgcccagtcgtcgtcggcgggttggagggaggtgatcgccggcgccggcgcgggcgcagggtcggcgtcgtgctccatctcccgcgagcacgaggaggaggaggaagcggtgggggttgggttgtttctgccccttcgcctttgtgcccacttggggtttttcttggcttagcggaaaatttccgctcttttcgctgttttagggtttttcagtttttttcgtagggggattttggcctggggaaatggggaggagtggggggctacggcggcaggccgagaacggtggagagggcaatacacgagatggtgctgctttggcgacttgcggccccgatcttttcccaaacaaaatttttacagattgttatatcgaattttttgacacattaagtattaaatatagaaaaaacaattacatagttcgttagaaaatcgtgagacgaatcttttaagcctaattgcgctatgatttgataatatggtgctatagtaaatatttgctaatgacggattaattagacttaataaattcgtctcgtagctttctggcggaatctgtaatattttaaatatgtgtccgtatatctaatgtgacatgcaggggcaaaaaaattttccaactaaacaggccctgcttatcagccaaaatttgaattttcaacattaaatttggagttgatttggggtttttcatcgaagttctaagaacacgtatataaaaattttatttacaaattctttttcgtttgcaaatatgcagtttcacatataagcgaaacgttgaggcctttggcgtgctcccgtgcctcggcccgcaaggcggatcggcctaaccgagtaataactgggcttctgggtttggcctttcggtgtctggtcagggttgaacgtggtatttatgttgactagtaatcatgcaatgcagatgcaatatgaggaaatcaatgcttgcatggtaatgctcatacatcttgacacagtaaatttagatatattccaagttcatgatcagaagataatatggattttataagacagtatgaacttgtaaagagtaagatcggtccttaattagacggtacagtgtagaatatttcttgcacacattgcaaagacaaagtcagttagaacttagaaaccttgcatccgattgtctttatatggcgaatttgtaaagtttcagtacttgctccataagaattcataacaattagctcagatgaaaaaaaaaacattgaatgccatgcacaataggatgcctcctcttgtaaagaaggaaaaaaacgaacgcctattaggcatgtacaaaggaccaaggcaaaaaaaaaaatagctagtcatatatagtacatatggttatttctgagaaaaatacttttccacatattgggggttatcttgtgatgtaaccacagggagaggagaggaactttgtttgctagatagatgaatatttctgaaacaattctgtctcctggaatgcatagaattttgatcttgcagaagtcttcttaaccggctctggttgctttggtgcacatataagagcatcttcaacagcctttccaaatattcatatagctaactctctatctgatttggctagtcaaactagctacttgctccaaccgcctctccatctaccacccctattataagtctatgacaaatagaacccacgtgtcagcctcacttcctcttcctcttccccttctcctcctcctgtgtgcatcctggcttcctttcctccacccacgatgccaaccaccaatccgccgcttccatgccctccccttcctccctcacattcgattagcttcaccgccgcgcccaatcgccccgacgtgctgctccaggccaccgattccgtccccgtccaacgccatggcgccaggagaacgacgacggcggcactgggtggatggcgcggcaggtagggatggggaaaaagggagagagaggagaaagggtgtaggacccacaccgatggcaagccatatcggctggctaactttggctagtctggtggggactttagccagctggatgtcttggagaagcatttgactagtctgttggagtagaatttttgtctaagttagccaaattttggcttggagaaccatttggctaggctcttggagatgctctaatgcatggtcattttttactcttgctgagttgatctggagtgtttatgttgtttctgagtataatgttaaaacagagggagcatattgggaaggctatttgactagggctgtgtttagttcacgcaaaaaattggaagtttggttgaaattggaacgatgtgatggaaaagttggaagtttatgtgtgtagaaaagttttgatgtaatggaaaagttggaagtttgaagaaaaactttgaaactaaacatggcctagatagcattggatgttttggtttccgaagttccttaaggaaccacatcaggcaaattagaattttactgaccagcactgatgtatttttcggacgtgataaccagctaccactccatctatgatagacactattcatctatacttcaaatacgattttctcttaaactactcatccgatctacgatccgattacaccgttgtgttcgtaacaattaaatctttataacaagatctcacatgattatactttaatgaaaaaaatataaattacttttataacatatctaaattacttttagatttcactaagttacttattagacatataaaagtaattcaataaagcctaaaaataatttacatatactctagaagtaacttataacaaaaagaaagtaacttctataatatatattaattactttaaaactttattgaatttacttttatatgtcgaagaagtaacttagtgaaatctttcactaaaagtaatttagatatattataaaaatagtttgtgattttttatcaaaatataatcatgtgagatcttgttgtaaagatttaattgttacgaacacaacggtgtaatcggatcgtagatcggatgagtagtttaagagaaaattgcatttgaagcatagatagtaggaatattttttctatttgcttgatcaattagtactatagtaaagtaatattcttcaagacacatatatggacaatggctgatagcgtcgctcgttatgactaaatcgagatcgctctcgatgtagattttgcgtttctggacggctggatttctggttgtcacgctagttgagtttctgctcattatctaatctaaatatagtaattatgtagaaagtctgttatctttgatgggaggtcgtgtccgtccacaatatgagcaagattaatcggtttctgtaactgaaacaagcctgcacaactctagctcactactagaaaaactatttttcccaacgtgagggttttattttcacaggcggatatgacccttagagtcaaatgaccgcctacaaaaatataaatcggggtgaaatttaatgcccaggcggaccatttaagcggcgaatgcgaaaataaacttgaatataaataggcttgcgggccctaatttttttctaagtccttacacctctcagtcctcccctcgctccacacctctcctctcttcctcaccggcctctcccctcccctcccctcccctctcctcctctcccctcccctcacttctactctccctagcggcggctcccggcggcgcggcgggcggtgacggtggagggcggcagtggcgaggaggcgcggccgaagtccgggaggcggcagcggctcccccctccctcccagatctagccggaggagggaggggggaggctggtggcggcagcaacggcgtggagcggccgcagcgtggtccgggcggctcccctcccccctccctgtcagatctggccgaaggagggagggggaggccagcgggggcaacggcggcggctcccctcccccctccctctcagatctggccggaggagggagaggggaggctggtggcggcagcaacggcgtggagcggccgcagcgtggtccgggcggctcccctcccccctccctctcagatctggccggaggagggagggggaggccagtgggggcgacggcggcgacgacggcacggggtggccggcggcgtctccccttcctccctccctcgcagatctggccggaggagggaggggggaggccagcgggggcggcggcggcgacgaaggcacggggcgacgacggcatggagcggcgcggctcctctcccctcttagatccggccgggggagggcggtggcggtgacgacgacgactgcggcggttcccctcccctctcagatccgcccgggggagggcggtggcggcgagccgcgtgcagcgattttttttgttcgttttttttttttttgcattttcacaggtgggccgttgccccgactgtcgttgtgatgcaggcggatctccctcccgcctgcgaagattagttttggctgcctgtgaagattagttttctagtagagtggctggccgggctagctactgctgaaacattaaactaaacaaagaaaaaggaaaatattgcttatatcttcctcgaactggtagatgactggagcatcttagtgtaattctcacatagtagtcagggctacataatccggcttaagtaggttttatacccatataaaaatatgaatatgatcacgcatatcccggatataataatgccctgcaagaatatagagaagagtcagtatagttggtaattaatcatctcattttggactattctaagagcatgtgcgcgcatggtgtctaataacggacgctttctattgccctgcaaataaatttggtgatgtggaagagagagagggaaaaggaaagcaaaatgtctaaacgtttattaacggaaattttgtttcataagggtggattaaaggaaagaaggataataaaaattatttagtgcattaatggttaagaggttttgttgtctctattattgtagcatgatagtatctagtgctacaaagagctcgtattagactctacctttatatatgcctaaaaaactaatttctcaacaaaaccaatcattagaaaaaaccgaacaacttactggattcaaatcctctcagtaaactgaattaaaaaaaaagttacaacgcaccggcctgtaactaacacctagggaaaaagaaaatatggaaacacttgcatacgtacccataagcaattaatcgccggctgccgccaatcgtcgacgtcgcctccatcatcacccacaaaatcgtcgtcgatgcttttcgtcggcgctcgcgggaggagaagaggagccgcgggatcgtcggcgtcggcgtccttgcccttgatgatgcgtatggtgatgtaggtctcccctggacgcagatcccgcgagcggctaggcggtggcgagtcgtcgtccgacgaattttttttatttttaattttttttattaaaagttttaaaaaataatttttcattttgaaaattgacagaagtggtcgcctaccgccctctgggagggcgatttttaaaaatcaccctcccagagggcggcgaaagtgacgtggcagacggtcgttcgctctcgggcgacggccgtcaacgaaatttgcaggcggcccccttgccaccctccgctagggcgattttgtactgtgcggggggccgcctacaaatgggcggcggggggcctggaattttgcaggcggcccccttgccgccctgggggagggcgattttatactgtgctttatattttttataaatatcaatagttatcaaatttttttatattgaaaactatacaagattaaaatctccaagactggtaaaatacaattttattattttttagggcctatttggaatgttaccgtacaaatattttgttagtgccaaaatataagcaagttttggcactaccaaatatttggtaaggtaaaattgcattcgatcatatttggtttgctgccaaaatgtaaaattgtagtgaagaatgttctacataatctcaaatctagattacgtattaccaatgaataggcttcaatcgaaatcaaacacaagtactattcaaattaccaaaatattggtagggcatgtttttggtagcaatccaaataggcccttagtcttacgcatacaaaaaaatcaccaccataattaaacattgtaataataagatagataagaagtgccatcgatacacggtacaaatttgtcgatcccgacgaatcaagcatgcggtaacctatcggccccttctaggtcggtcagaatgcattgcattctcgtggtccttcaatcgttgatactctacttgtgtttctgactctgttatcttctggccatgatatgatggagtgacattgtcgatccatcgagtaaatccacccatccttggattgcatcttcggtttgcattgaaatatttatatctttctcttgtaccgacacaaatataacgaggggccatgaccgttcaaaagccatttccacataccgtctccaagcagcagtgctgtccatcggcattagttcccaaaaataaccttctgttgcacgactcactacaactgatactgacattgtgtagacttcttggtctattctaaatcctctcaacaaccaactataaattgactgaaatgttttctccgcaggcctatcgatacccttagatgtcattacaaaatctgacagatcaacaccatctggaccaaatctaatatttccttcaccgtgaactatctgaaatgtgaccttatttgacattgtgcctgatgaaaacaataactgcgttaacctcgcatttctgtactacgccctaagttacattctctacaatattgttctccaaaattctaaaagtaggttacattctccagatcaaactaaactacatcttacaattaacactactgtctatgtctcaattcatactattatattctatgctctggatctacacatatgtgctgtgtgctacagatatgctaaaatatatggaactaaaactaaaacgcaacatatatactcaaacataacatattagtacaaatgcaaaagatgtatgggagcaaacctgtgatgaagtgagcgaaccagcagggcttcgccgctccccttctgctgccctctcctctctctctttcgttttttttggatttttagtgaatataatgaaatttcagagaggggggactgggctttatagggggaggcaaaaatcgccctcccccagggcggcaagggggccacctgcaaaaacccatgccccctcgccgcccatttgcaggcggccccccgcacaggacaaaatcgccctagcggagggcggcaaggggg

SEQ ID NO: 12541 - DNA, 10512 bp, Oryza sativa
tttgatgagttcaatggggttatcaaaaaattgtttgatgtttatgctactagtgcgtgtgcaacatcaaagaagaaaggtgctgaaatgcatgtgcatcaacttcaaattcaatctgatcctgttcataatactgatgagtttgatgatatctttaatgagaatgacagtagccatgatcatgagcaacattttcaaagatttttgcttgagagaagtcagccaatttgtagtgataaaaccgagttacaaatttacatggaacaaccactgttactatggacttccaaagatccatttgatattttgtcttggtggaagctcaaacaagcagaatttcctatcctctgcaaacttgctcgtgatttcttatgtattcaagtgtcaactgttgcttctgagtcggcatttagtgctggtggccgtgttgttgatccatttcgcacccgtcttgatccagaggctgtgcaagctttagtttgcaccaaagattggattaaagcagctaacaatggtacactttgtgtctgtgttcattgcttatttggccattccttcttgtatatatcaatatatgtatagctgatccatgatctgatctggcatcattcttaggttataagactcaggctatcatcaatgagttggacattgaaagcgtagagaggcatctggcaaacttattgatagtggtgagctattttcttattttacctctatgaatatttttcttaatataacaataatattattcgactcctgtaggaaaaagaggagaataatgatgacatggaacaggatgatgttctgatggatgaaatggatgaataatgatgttgcaattttcattcatcggactgcaagtgtactgaaaattgctttgggctgattactattttgatcttatctgtgttacctatagaactcgaactcaatatgtgttgaacttttcaacgtgtttcgatttgaacacgatacactttgtttaatctgtgatgcgtcctacaacgatgatatttatattaaattagataaatatatgtggtgcatttgtatctacgagcagtttgagtggtctctatattccgagaaatattcgttttcgtattcgtgtccgatcatattcgatccttattcgtatccgcgataattcgtattcatttctgtatccgagttattcgtattcgtttccgtatccgcctaacaatatgaaaacggatacggtaagagcattatccgtccgtattcgctctgttttcacccctactgggtagccctcctattggctgggtacgtagcttgtcgaggaattatgggatctccatcttcaaaaaagttgttttcctttttttttatcgaggctatcgagagagactaattaagatattgcatacattcatacagaacaattgtgctattttataccctaaaatcggtactataggtgccggaacagctaaacccaccggtaatgccttttcctcctccgcggattaaaaccacataaacccggcacatttaaacaaaccataggtgctggtttttaaaaaccgacacctttaatataggtgtcagttaattacaaacaaacaacattcataaattcataaattataggagttggtttttttaaaaaaaccgacacctacacccaactgagccgaactggtgagctaagcatcggccttatccattccacacgtctttatctctctcttgtctctctctctcacctctctcgcttttctctgtcacggcggcggcccaaggaggtgctagcggtggcggcctcaccctccccttcgccagatccagcttgaggggggtagcgggatgggaggcgacggcggcctctggtgatgacggtggcggcagccgtgccctcccctccaccagattcggtgggaggggaagcggcggaccacggtgatggcagcggcagtggttgtgccctcccctctattagatccaacaggaggggaggccacagtggtctccagtgacggcggcggcggcgcccgcactctcccctccgccagctccagcgggaggggagacggtgcaccttggcgacggcggctgcgccctcaccatgttgcaacgatggcaagggtggagaaggatgtcggctgccatcgtcttcttgatgttaatctttttaatgttcatcgatgttgttgatgtttatgtgttgatgtgtgctttaatcttgtatgtattctttgatcttgtcgagatgaagtggagctgctcgatagatcggctcgaatcgggccgatgcattgagtcgttttttctttgttcatggaacctcagaggtgccgactaatgtgtaccggttgaaaaaaccgacacttttagctatttctgtactaatgaatattcatcgtatttctaatgaggtgtgagacctaacaaactaattagatgaagatatagtgccttctagtctcccatcttttcatccctatcaaatagccttccttctaatcaaactggcacctcatatgtatgcatgcagtgtggtcataaaataaggttatattctgataatttgtgtatgctgctaatccgcctctaatcttctagaaatgtaactgttctgggatggaggtagttaataaaaaatattaggattcagaaaataatgttagtatgttaaagcactttcacatatgcaatgtggtcataaaataagctcataatttgtgtatgttgctaatttatctctaatcttcttgaaatgtaattattctgggatggaggtaataattaataaaaaatattaggatttgacatcagaaaataatgttagtataaactaaagacgatgtgggatgccgtagagacaagacggtccggggtggcacctaagagtgagaaggaggagacaggcgggaggcttgtgcgatgaggaaggagcggggagccgatctgcaagggtgagtgggctgacgtgatggggccacggcgtcatgtagcgaggttggtggttggcaaaagaggacgtgtgaaggaaaaggtgtaggagattgatttgcgtatgtgtagatcgaaactgagtgatgagcacgtgcgtgattttctacctgggtgaccctgtgatggcgtcatagtggagaggtggggggtggtagtctgcgaggagcagcgatggcagcatagtagagagcggcgggcagcaaggtggagacagatttgtgaggaggcatgatggcggcatggtggagggtggggtgacgtggtttccgggttggtgcaatggttactgctagagaagatatgggagtgaggaggggaggccgagaaaaaacatggctgaattgttggatttggtgattttgggatgttggatttatttaatgaatggatgaactatacggatacgtataagatacagtgtatgtaagatgaatgatataatatgtaaatttaaatctctcatattatatcatgatagcacacgagcaccggaatgaagactacaaaataacacaggagcagaaaaaataacgtgtatatacattcacaaatataatttaaggtcattacatgtaaaaaaaaaaaaaagccattctcatttcaaggctccccacctcaaacctgaacctctggactcaaaacacgccaaggggggcattataaatacgtcctttgtacaaacagctaataaatagttaatttacaagcgctaaacaagatagtaaacatattaacttagagagcaaaatgcatacttacaatatgaaataattgcaaggcgtcttgcagacagtgggcagtctcctccattatggatacgagtgatatgactatgcttgctcagcttcatccggccttgaccacgcgcagtcttgcacgatgagattgatgcctctgacccatagctcgacgctggacgcggaggtggcctcgaagtggatctccctcccggtcaccgtctccaccattaggatcagctgctcctcgctgcccgtcctgatgatcctcctgttcctcctgaacgccgcgctgggccccgcccgggcctccctgcaggccacgttcctccggcgggtcgccccccacgtcagcacgccggaccgcatcatccgcaccgccttgcggtgcggcggaccccggcccccgcgcgtgtgcttcgtcagctcctccccggcgagcacgtgggcgcgcgccacgtggtccagcagccactcctccgtcgccttgttcgacctgccgctcctcctcgccaccgacagcgccgtctcgctccccgcgtcggcggcgccgccgcgcgacaccagcgccctgcacgcctccagcttgcctgcggcggccgcgtgcatcagcggcgtgtagccatcctcgtccatcgcgttgggatcgtggcccatcttcaggagctgcgtcagggaggaggtgtcgccgatccgggccgcgtagtgcaggggtctgaaagatggctgctggcctgcgatcgcatccgcgagcgaagcctggagtaagatctgttcgaaccgatcttggttcaggagctctgcttcggatgatcgacatcgcggatttcccttcggcactcgtggcagcgatatctgcccccgccatcactagaagcctgaaaatgtcagcatggcctgactctgcagcaaccataacaggagtgagccctgaaccatcaggcctgttcagatctgctgctgagtagtgtagcgtcattagaagagcttctgcactgtcacttgcagcgaagaagtgcagcggagagaagacggtgatatccgatgaagtgatgcagcctccgcaactcaatgctctggaaagaatgtcgatgatggttgagctaaatgagcttttcttagcaagcattattgctgtgtcacctgcattgttcactatcccaaggtctgcccctgatttgatcagttcaagaaagcaatcggagtgtccacacctcgcagagaccatcagaggagtgtccccagtagaagtctgcgcattgatattagccccatccaacatgagttgtttcagtacgggcgcatgacccaaccttgcagcaaaatgtattgggtaggagacgtgtgtgccgtttgtcatcattatgggaaatctgggattggcaccagcatttagaagcacgcttactgcattcgggttctgacagagtatggcatggcaaagaagatttcgacccttgcgtggggtttccagcaaccatggtgctttatcgagcagcaatttgaggatttcaccactgcattcgtagtactctactgcacaccaaatggcgttgtatttttccccaaggcatgcaccaacacgaagttcttcacccgttgcagagtcccaacaccaagaaccaacttgcacaagacagtccaagtaagagccttcctgcacacaaattttgatacaagtatcattctaagaatgtggaaacattctaaattagcatagtactcataaataatgtggaaaattagactgcctaaaatttcgtttactgaaaaagggacggccagtgcgtttagcatactggagtggaaacaaatttggattgcttggcatacagaacataaacttaatgggaaagtagtcggagaaacaaaaatcatccagacataatgcatccccacttgtcatatatatggctgccttgaatctacagaaatggttggaattgttgcaaataaaaaaaaatgggtattattagataatgagtttttcttcaaataaaaacagtgagttaagtaggaatggcaatgcacaactaagcattgtgaacagagtactacatccatctctgtacctagactaataagaacgcttaaaagatattcagttattgcagatacctcaatcaagagtttcacagttgaaatttgccggctcattactgctgccaccagtggagtgcaattcacattagcatgtagtgcaggcttaacagacctcaagaggaccctagccatggaattaacgtcaaccccattctgacaaaatgaaagtgaaccagtaaacacacacatatatatatacacaagaaaatgttatctttgtaactggctgtatataactgatatcatttgatcagacctgcagtagtatgaccacaacatcatcaaagcctcttgaagaagcagtcaccaaagcatgtgctgcagcttcaggctgtatcatctctgaacagactaatagccgaacggcttcagcctcagcaaaaagagcagcctctgatagggaatcttcacaagcttcccgagtgactccagcctgcagaagcatctctagaatatggatgtttccttcacgtgcggcagctgttgttgcatagcctagaaataacttttgattaacatcagctccagcaacctgtattcaaatatcaagtcaattactccatgaacacaattttagagtatacataattcataatacaatatatttactaagatactgaataattcccggctgtcctgttaagcacaagcgtcttcttttcgtcttctagatcttatctccttatggctcactcgtgccggcctatacatcattcgatcagtttttcgtcataattttcgtgagaaagcaattgtaatgttatcagatagtttgaacaaaccaactctagttagcactatgcaatattttcatcatgacacttctcataactgtttagaactgactgactggctaggtctgttaacctgataaacctgtctttaggcatgtctatgtcacatatatctagatactaatacggctccaatatatatgcaggaaacaatcgaatatctgtattatatgaaagaatctaatggtgcatgtggcttctaacgatgccatttatggactgatgaacctaaatcaagacaacgagagtacgagacaatatcagcattatgtcctcagtgcgacctcgttaaacctctacactgaacctagctatttctgtacctcaaataccgagcagtatacttttttacaacttgatacaccagccacctttccaccacctccactctaataatcagccttaaaattaaagctactgtagttagaaatattccagctatttatctctattagaaggccgcttaaaattgccaggtttgacattcctatagtatgctagctatctcgctctagtataaaatctcattgcaaacttaggtccctttttttggcttatcatgtgaaggttttcccaagttcttaattaatggtacgttttcttaaaagtttttctttaccagcatttcttagaaaactttttttagatgaacattttaatattcaattcattcatttgtgcgctggaataattgtcataaactcaggtttagccatcatccatcaactatatcaaacggaaccgtgcacctgatacatatcttattgtgcggttcctgtattagcgtataaaatatacatgcatgttcaatatacgtgtaaaaaatatatctactattatacttcatatgccaaataagaaagccttaaaaccgcttacatggctaccttccccatgagctctacgaggtgaggtgaccacacgggactccgcttactacctttttagaacattatcatctataatattaaagcacatggataacaaaaaatatttccctctaaaaattgggcccactttctcagtaaaatcagcttagagttaacaacagtaaaatctgataatttatatatagcaaagcttggaaaatatactactgagaaattgcttagcttcccaatttccaaatttcgagaatgtgctcaaggtgagttgtgatgtatctcttgtgggcattggacctgtggtaagtcaatagcaagatctgccatcttctcaaggacactgttgaatgcaactactaatctacctaactttgtaaggggcttcacagaacaggtccaaggaatcccatctgttttgtatcacatcaaaggtttgaagtccacttcaggcacttgtatagtgggggcactaggaaagatttgagcatcggaacaccaccaacatgaaaaaactcataaaacaacatagcttgtgatgagaaaaacatttttcattaggcactgcagagttttagccaaggagtacatgctagtcaaattaataagtgatatagaagtttcaaagtggaaccgaagccatcacattcttgtcttgaaaacaaccgaagaagattatccatcccattccagaagggagagcagttgccatcacaccataccaaaaggtgtaacaagattacccatgtccctaatcctaactcaattcagtgatatgcattggcaaacctgctaatattctataaaccaccattagaatagactgataaatctctccactacagtaataattttaacaggaaaagaaggggatctgcaacagccattcgtttgaatggttttagtttattcttaataatttagatcagaaaacactcattcataatttgtgcgaatttattttggattactatgaaagggtacaagtcatccagaatgtttttttactaatcattacttccaatttattcagaattccctccgaacgtacctactgaacaaatttgaaaattttgtcatgacagacaatgcgcacaaattatttcgctctaaaaatatttggtcagatgattaaacccttggagattgaatgcgaggggattcaaatcttggaaagtgagagaaatgaccagtctgttgacgaaaatttggttacgatccttaccaggagggtgcgaacaacttcggcatgaccggcgtgcgcggcggcgaagagcggcgagacgtcggtcttgagctcgcgggactccacgatcacctccccggccgcctcctcgcggagggccacctcagcgcacctcacccgcaggcgcgccaccccgacgcggctcgccgcgggcacgccatcgtccgtgtcgtcgtccgctgcggcagcggcggcggcggccgccaggcacgcctccatggtcaccacgtccccccgtagggcagcctccacgagacgctgagcgggcgacgcctcctcctcctcccgcgccgccgccgccacagcggccgccctgcgccgcgacatggccgccaagtgtgggaggcggcggcggcagcggcgtctaggtggtggcgctcgccaggtgtttgcggtgtggtcggcgaggagagcgaggaggccgctggtgctgcgtggctgccaacgttcgggtggcgaggcgactggcgagactttggggagtaggtggaattcgaagtttgaaactagtcgcactggtataaaagtgcaaacgcgtgattttctgaagtaaatatctgagtcaaattgtttttgttttttatttcttgaatattatttttaaaaacaagccccgttcaggtctagaagcttttactagtgttttttttaagcaatttggcacgctttattaatctgcaaacataattacatcgttcactataatgttcagctagaaaattggagtctcatcaatccaattataagaattcttaaacttaaaagtataattagctacaagcctacaacatgtgccacacaatttgcttccctattacaatgctcaacagagactttaacaaaatcatatatcaaaatctggcattcatataaaattgccgctgccgtagttgcttaaaaacctccatcttgcatcgtctccaccacctgcaaacaatctgattgagtaaatagtactccctcattccctaaatatttgacaccgttgacttttttaaatatgtttgaccgttcgttttattaaaaaaaacttttgtgatatgtgtaaaactatatgtatacataaaagtatatttaacaataaatcaaatgatagaaaaagaattaacaattacttaaattttttaaataagacgaacggtcaaacatttttaaaaaaatcaacggcgtcagacattttgtgatggaggtagtatcttgacaaccaatctgctgggcgaggatgagtccatccctgaggacgtaggcttctgccattgctgcatcagcaacatgagacaagtacctacaagaactagctaaaaaattcccttgtgaatctcgttgacagctctggttcctcctgtactcgagacgatgtcaaaggaagcatctatgtatacgagaattccttcaggaggtttatgctatccttcccatggttttgcatccgactttttcttcgccatcttataatttagtgttagagcaacaatagatctagcagccatctgaatcctttcaccattcactacttgtcttctttcccaccaaatgtaccatccccctgttaaaatcaattcagcaaagcttttaccagtgtttctttcagaacatgtgccattcggagtgagagtttcaaacttatagtccctcgttttctttgtacatgcttctcaaaatgctaaatgatttttttagaataaaatagaaaagttgctttcaaaaataatattaactacttttaaattattttaagctaatacttaagggactacttattgatcttt

SEQ ID NO: 12542 - DNA, 503 bp, Oryza sativa
atctaaaaagctaattactttatgtccagaagcatcattaactaacatgtcggctataggcataggatattcatcttttggagtagctttatttaaatttctaaaatcgacacacactctaatcttacccgtatttttcttttcaacaggcactatattagagatccactccgcatatcgacaaggccgaataaacccagctttcaataaccgatcaatttcttgtttgatacggtcatacatatcagaattaaaacgtctagggggttgtttatacggccgaaaaccagatttaataggcaacctatgctcaactaaatccctactcaaaccaggcatctcattataactccaagcaaagcaatcaacaaattctctaagtaatttacataccttgctcttctggtcagcccccatgtttgcattaataaatgtaggtctaggaatactcccatcaccaatatcaacctcctcaagtggatcagctgacgaaaacccctgac

SEQ ID NO: 12543 - DNA, 635 bp, Oryza sativa
cctgctttcagtgtcaagcaaacgacggctcaaataagccacaacatactccttcccatcgtcttcttgcgtcaagaccgcaccgatcaccctttgttgtgcaacaacatataatctgaacggcacaccggacttgggcgcccgaagcaccggaggactcaacaaatatcgtttaatgttattaaaagcctcccactgttctgcccccagctaaattcgttttcatgtttcaaccgaagcaaaggaacaaacgattcaatctttccagcaaggttagagatgaatcgtctcaagtaactaattttccctagcaacttctgcacatctctcttgcatgtcggctcttttaactttttaattgactctacctttttaggatctatctctatgccctgctcatgaattataaagcctaaaaacttaccagccgacacgccaaaagcacatttgagaggattcatttttaatctataccggcgcattctttgaaaagccagtcgtaaatcggccaaatgactatcaaacccgtccgatttaacaaccacatcatctatatatacttctacaacaatgcctaacaaatcatgaaaaattaaattcatagcacgttgatatgtagcgccggcattctttaa

SEQ ID NO: 12544 - DNA, 685 bp, Oryza sativa
ggtaccctgttcaaagaaagctcatgaccaatttctagccgaccttgcgagcattctaccgagtaacaccacaccgctcattgtcagtgatgctggctttaaagtgccatggtataaatccgttgagaagctgggttggtactggttaagtcgagtaagaggaaaagtacaatatgcagacctaggagcggaaaactggaaacctatcagcaacttacatgatatgtcatctagtcactcaaagactttaggctataagaggctgactaaaagcaatccaatctcatgccaaattctattgtataaatctcgctctaaaggccgaaaaaatcagcgctcgacacggactcattgtcaccacccgtcacctaaaatctactcagcgtcggcaaaggagccatgggttctagcaactaacttacctgttgaaattcgaacacccaaacaacttgttaatatctattcgaagcgaatgcagattgaagaaaccttccgagacttgaaaagtcctgcctacggactaggcctacgccatagccgaacgagcagctcagagcgttttgatatcatgctgctaatcgccctgatgcttcaactaacatgttggcttgcgggcgttcatgctcagaaacaaggttgggacaagcacttccaggctggggatcctctagagtcgacctgcagg

SEQ ID NO: 12545 - DNA, 1154 bp, Oryza sativa
acatatatccatggactttgtagaagggttaccaaagtccaaggggaaggatgtgattttggtagtggtggataggttaaccaaatatgcacatttcatagctttatcccacccatacacagtggaggaagtggtgcaggtgtttatggataatattcacaaactgcatgggatgccgatagctattgtgacagatagggacagagtttttactagcacattctttcaagaagtgttcaaatctcaaaaggtccaattgaggtttagcacagcttaccatccccagacagatgggcaaactgagagggtgaaccagtgtttagaatcttacttaaggtgcatgacatttcaagaaccacaaaattggtgctcttggatagctttagcagaatggtggtataacacaacatatcacacagcaatacaaatgactccattcaaggccctttatggatacagtccacctcaaatcagtgaattttctgtcccatgtgatgtatctcaagaagcaagggtaaccctggaagagaaagagactatagttcagaaactcaaagcaagcatggaagatgcacaaagaaggatgaagtattatgctgataggaatcgaacagagagaaagctggaggtgggagatatggtatatctgaaactacaaccctatagacaaaatgcttttgggatcagaggatcattaaagttaagaggcaaatactatgggccattcaaggtgctagagaaggtaggtgctgtagcttatagattgcagttacctgaagaagctgctatacatccggtcttccatgtgagccaacttaaaaagcacctgggtactcatgctgtaccaatgccaaatttaccggcagtgggaccagatggtcaaatcaaaacagagccagtagcagtgctgcaaaggagaatgattccaaggaacaatgttgctgtcactcaatggctaattctgtggagcaatttaactccggctgaagcaacctgggaggatgcttcttatattcagaaagtgttttcaaattttcaaccttgaggacaaggttgggcttaaggggggagtaatgtcagactcgtaagaagaatggaggaaaatttagaaagttcagagtttcgggtaactgaagatgcaaaggagggagaaa

SEQ ID NO: 12546 - DNA, 14571 bp, Oryza sativa
cttgctgtgataccggtattttcttgctgctgctttaatttgttgtatgcaaatttggtgattcatgtggattcgccaatttagtcacaaacatgtgattcacggcacaaggaaaaataccgttagtagaggtaccagtgaccaagtttggtttagggtttcgggttcagccattctagctctacatctatataatgtgcatacacttcacctttcttttctttcctccctttgttgcagttgtagaagcgtggtctatggtttcctcttgctgctggactcataatcttctgctgtatatatattctgtactttggctcattcaatcaattgtgtttggtcttcactaatctcactcaattgagatttgaagtggatgtgttggtcatgcaaactggttacgagatgatggctagcaactatttttcgagatgaagagggaattttgttaataattcagaataagagtacattcttcaggaactatttgctctatagaataaaaaaggaaatcaacatatcaatatcaacggcagaacgttttaaacattatgccaattgtgcaacctcatgagcaatgaattatgttttcctcatcatgatccggcaggacaattaaaccaggtaattgttcatcaaagtcgatgaggcaaactaagtaactttgcaatgtttgagcaatcaaacactaatattataggttgcttgatccaatcaacaggaagagctgaattattggttgccttgtctacacgttggccattcaacctgtatatgaggcctgcaaaattattattactatactttttttttctgctgaatgaaaacagtcagtaaggtaaattttgcttgcacacttcaaatatcgtattcttttctcttcatgatcttttgagacttcctttcaaacacatgagttttacaatattttcaaagaaattagttctattaccacagttcatgtgttccaaaaggaggctttacgggatgaaactagtagggaggtgtttctacatgacgttaattaccacaatgcgaagtcctgtcacgacttgtagaaatgttttttatgatactcgaagattgtctagactagtcatttcacactgatccaacagttggcattttttgaatcatattacgtcctatgcaaatactcactacatttctaaatatttgacaccattgactttttagcacatgtttaaccgttcgtcttattaaaaaacttttgtgaaatatataaaactatatgtatacatattagtatatctaacaatgaatcaaatgataggaaaagaattaataattacttaaattttttgaataaaacgaatgatcaaacatatttaaaaaagtcaactgcgtcaaatatttagaaacggagggagtaggtcttaaaaggaggcattacatttcaaacttgctattgtaagcatggcgacccaaaagacaactataatttttgaaataacgttatttggcacattttgaaattttaattacaaaatacaactgtaattttcacaaaatatgccaattctgttaacatcacttggcaaattttgtgaaccttctctaatttttcactatgttaacagaattggaattattgccagcctgcctttttttacattcatctggtattttggccttggtggatctccccgtttgtgtttgcctgatggcggcggtattagatgctttgattgtctcatgcatcaagaagttgcaggatatcattacagacaatgcaatactcgtgctaggagtagaagaagagctcagtgaactggtgagaaaaacagattacatacgatgttctcttaatgacgctgagacaacgaggttggatcatgaagcagttaataattggcttggacaactaagagatgttatgtatgatgtcgatgatattattgatttggctagatttaaaggaagcatcctactagctgaccatccttcatcatcatcaagcaaaccaacacgttgcaattgcccttcgtgtcattgtaatatttggacacgtcatgaggttgctgttaagattagaagcctgaacaaaaagatagcgaacatttcaaatgatgaactacttcaagatctcagacgtagaccgcatccgagaaatggttcgatatggacaccgataaaaacctccagcatagttgaacccaaccttgtgggtgaagaggtcatacttgcttgcagagaattggtggatttggttattgaaaataaggaaaagaaagattacaagcttggtattgtagggacaggaggagttggcaagacaacacttgctcagcaaatatataatgatgaaaaaataacagggaatttcgataaacatgcatgggtttgtgtttcaacagacagcacacaaacttctctattggaagaagttcttcggatcatgaaaattcgatatgggaaagcaaaatcagttgaagagctccaaaacaagctcaaatcagccattaaagagaagagttttttccttgtgctagatgatgtatgggaatctaatgcgtggactaattcacttcaaaaaccattgcatgctgcagccaaggggatagttatagtaactacgagaaatgaaaagtagctcaggaaattaaagtggaccatacccatcaagttcatttgatgtcagaaaatgtagatgggatctactttggaagacatgggcataaccgaagagaaacaagttcatcatctgcgggacatagggattgagattgttcaccaatgtggttatctcccactagcaataaagatcatcgccaaagttttaattagcaaagagaaaacaaatgatgaatggaaaaggatattgagcaacaattcgtggtccatgaataatcttcctgatgaactaagagctttatatctgagttacagtgagctatcacaccaactgaaacaatgttttctttattgtgctatatatcctgaacattcaaccattaaccgtgatgatcttactagtatgtgggtggctgaaggcttcattgatgagcagaaagaccaactactagaagatacagcagtagaatactacaatgagctgatccattggaacctccttcaactagacctttcatattttgacctaggtgggtgcaagatgcatggtctcttaaggcagcttgtttgctatttatcaagagaagaatgttttgttggagatccagaatcacaaaatggtaatacaatgagtaaaatgcgacgtgtttctgtggtgacagagaaggacacggtggtgttaccaagtatggataagaagcagtataaagtgaggacttacagaacttcatattccaagtcactgagagtttacaatccacttttcaagaggcttacatatctccgtgttttggatttgactggcacacttgtacagagcatcccaagtcacattggaaatttgattcatatgcgtttgattaatcttgatgggacaaacatatcttgtctcccagagtccgttggtaaccttcaaaatcttcaagtactgaacctgcaaaggtgtaaatctttgtacaggcttcctttggcaaccacgaaactatgcaatttaaggcggcttggtcttcttgatacaccaataaataaggttccaaaagggataggaagactgcaattccttaatgatttggaaggatttcctattggaagtgtaacttataataaaaaaatgcaagatggatggaatttggaagacttggctgatctttcacagttgaggcggcttgttatggtaaaactagaaagatgtactccttgcagcagtgaagattcatttctcctaacaaacaaagaacatctgaaagttctatatctagaatgcactgaaccaacaaatgaagcatgttcagatgaacatgttaaacatgttgagaatatctttgagcagctagtccctccacagaacttgaaagatctatctattctgagattccttggtcagaacttaccctcctagctttgtaatgtctatctgccttcactgaaatatttgatcctctctgattgcaaatattgcatacatcttccaccaatatggcagctacccaacttggaacgcctgaaaattgtgaaagcaactgcaattaccaagattggacccgaatttattgggcaatttccaagatccagggaagcagttgctttccccaagcttgaatggttgatcatcaatgatatgcccaactgggaggaatgggcctttattgaagaagatgagatatcacttgcagcaatgaacgaaggaggaggggatggaactgctgtggccgaagaggaggagatatcacttgcagcaatgaatgaaggaggagaggatggaaccactgtgacggaaaagggggaagcctcatttccaaggttgtgtgtgctgccctctttgaagaggttggacattgataactgccccaagctgagggctctcccacaacagcttggacacgaggccaccagtttgaaagagctctcccttgtagcagcaagctgcttgaagtcggtgaaggaccttccatccctatctggtttcctttctgtttgtagatgtgaaggcctggagagggttacagaacttcccaaagtgagaaagctgtttgtaagtgtttgtccaaatttgagctgtgttgaggagttaggcagtttggagcagctatggttggatgtgaatatggaggactcatcaccgtgggtgcatgggcttcgagagcagtaccgccacctggatgtctacacgtggcctagagagtgagatgtgaagacccaactaaaagacagtagattagtagagacacaaggtaagggcattggctctgtatttgttgatacatatttttattctatcgttatctaaaatagtggaaacatattttaatttcattccaactttgcatattttcagccaaaatcatgcatgtctaatgttattctcacctgtacactttacattcattgatgttgtacactttgcatcattcttagtaaggagatcatcatatatattagacaaaatgtcaaactttcggtagttgttatgattaatatttgtacctatattactgaccttgtcacctaaaactagtacagaaatccttaaaactttgtgttgtaattattctcaatgtccataaccagtacagaaacaagtgttatagcattttataatctattatatcctaaagtacattaaacctcctacaaacgcttctaagccatcacgtagcactcctacgaacactcctaagcctccacatgacattctaataaattaaagaaatttctaaaaattccgagaaaaacaaaaacatcttgtcatttatctttattaaatctggtgaacccatcatttacaaccattagatctagtcgtcaacccgtgcgttgtatgggttattaaaatatttaagaaattcaattgtacatgtggttgaatacatgggttaaaatgattattttgcttaaaaaaatgttggaatggcggcattcgggcatccggtctcttgtactttaccatgatttgacttggaaaacagtgagggaagtctccacggttcggatataatgatgattaatccaaaactaattaattaattcaattaaaaatactcaactacagtaccatgactatagctggccaaatgggtggcccggcccaacacgcacggccccactagtggcacgacccactaaggcacggcaactgtagcaggccgtgcacgtggcccataaaaaattgaaaattgagggaaaaataatatgaagttaaaaaatgaatgaagacaggacaaacgtgaggaaaatttaggaaatatacgaaatatattagaaaatatatggtaaaaataggataaaatatgaaaaaaaataaaaaaatatgagaaaaatatgggaaaaattagaaaattgtagggaaaataaatgggcagctgggccgtgctcgtgccgacccgtcaacaggcatgccgtgccgtgtaagcccatgggctaaggtgctggcccaagcacgacacggacaaatgggccatgccggcacagcacacagtccgcccaacatctgttcctagtgtagggctcctaattaattaaggtttgtttggtgaaacaaaaaagccacctaaatgtctttgtattggttcaaattgattaatagttttgttcgtgttctacctgttaaaagaagaagaggatattgctgatcggcatgcctatgtatagtccatgtgtgtcttttccttatgccttttgtaatgcacgtgtattgtttggtaagttcaattccagaaaatatgattgttgaaaaactgatagcacatatattttcttttccttaattaagttattaaattaccaaaatacttatgtatatatacatccatgattaatttctgtgtgcttatttattttgtaggttgttaatcttgaagaatttgggctgtgcagtcacttgtaatatgtatttttgttttacctagttattggtctttgaaatattaaaaaaattttatttttttaaaaaataaataaaacaaaaatatcaagaaagggaaaatgtcaaaaaaataaaaaatatattttctttagctcttgtaaaatatattgtcatgtttcgttagattttgcgtgtgtgtttcttttctttttatttttttttgtaggtgtgtaggtaactccgcctatgtcatcgtaggtataactaaatgacatagccggtccccagcccggaaaaaggaggaggggatagtttggtatagatgtgtgttgaaatgatgctccgttgctagatcattgggaattttctgcacttttattagattaatttcattttcagtgatggaataattgtggaaacatttctggagactcatccacccttattgctctgttggacaaatctgattctgaactatttaagctagcttgaccagaccaccaggtctaagagctgcgaattgacaagtaggtgaaggaaattcagtgccgaccatgacctgatgaggagcaaaaatttttttcaagtcttggagcccaaatgtgcctgaagtcctgaacaacaagatacaattttgctgcaggatcaaacaattttgctcctctcatttgtttcttgtctttacctagttgctggtctttggaagattacaaaaactgaaaaaaaaaagagtgaaaagaacacgaaaattacaaaaaaaaagtcaaaaaagggatacagatccaaaaatgaaaaaaaaaacgtgtttttgttttttgtcttgcacgtgtgtaggtagctcctcctatgccatcttgggtgtgcatctttaatggcattgctagttccaagcccgaaaaagagaaaattgcatatgtaccatcgcgtaaaattggcttcgtaaaaataccatcacttaaatgggcttcgctagaataacatcctgaactgagtacacttcgccactttaccattttcatcatttcttccattttaaatttattttatcatctttgcatctctttttggactgaaatacccctaagtcatcaacgctgaagcacttctggtcccaagcccggaaaaggagcagggggtaatagtgtatagacattaagtgaaacaatgcgctgctgctatctagagcagtgaaagttctcttgaaaatttctgcactcttgtcaagttaattgcatttttattgatggaatagtttactgaaaaacacttctagacactcatccactctggtgctctattgggcaattctgtttctaaactattttagcttgacctcattgcaaaccagttttcatgtgaaagcaatggaggcgaacacattcaccagttcgtcctcctctcattccctgcatcctgtttgagaattgagaattgtgaacactgcggtgtggaggctgcggttcgtcagaagtttaaattcctagatccagtttcagatacttagcagcatttcacctgatggcatttgatcgtaatgttcagagaatgttatctcctaatgctttggagttcactccccaaattttcaacactgtcatggactctgaaattagaatccagctgtgttgcgttcattactgtaagagctctttttttttttaaacctaagccagcattgctggttttatattaagagagggagaaactgtacagacaagagacatcgggcccgaaacccatacagctgcatggttaattatggggaaccgacatcacagaggaaaacatgggacctaactacactactaacaacaacggcggagcccaaacgcaagacatcattgccaagctaaacacaaaagtggcacaacagctccgacatcatagaagaggtgttatcgttgccgagctagccggccaagcaacccagcagcgccgacttcaccactgcagcgacattgaagccacggaagttgccaaagcgaaagcagctccgacatccacaatggacatcagccaagccatgaaagagccacttccttcacatggccagcaccaactctttggaagagaccgcaacacgtcatcgttgtcaagcgtcgccgcaccccagcagcgagcagctccgacttcctccgtagaaacaaccgaagagtgtgtcgcccaccacaagagcgaagcgaacccaagaggcttaggcctcgccaagcaccaaggaaagaaagcttttgaaccgaagagaccctcaatagtcatcgatgtaaaggaacttccccgaagcgacgcccccaaggaggacacgacgcgtaacgccgccgccgctcgtccgaagccggagcaaggttttcacttggagatttgtggggcaaatgggagagcacattgacaacgccttcaagaagggaaatggcgccaatgggtgcgtcgtcgtcatcgagccggccaaaggtacagcaaggctttcgccagcgtctgcacattacccacacaagcacccccacatcgacgaccaaacgatagtccaagatgactcacaagcattccaccctcgacgcatcctaccatcgcccacactcctctgctgcaccgaccagaaccggccaaggcggccaaggtactggtcgtcgaagctccccgctgccatcgcctccacgagcacccactccccgctatgccgctgccaccgtcgccacaagcgcccgcagccccgctgcacctcgtcaagacgccagtgggcgtagctggaggttgccactgcgccgacaagggcctcgcatccgcctcctcgcagcaccagacccccgccgtcgccggcctcccactgccgctctggcgagggcacactggtccccaccttggcagcacgccatcatccagccaggagggtggtggatctggccaagggccaccggatccgaccgcccccatcgccgggccgagggccaccgccgcctcgcggctgcctcgccgtcgtctcgcggctgcctcgccgtcgtctcgcggccaccccaccgccgtctcgcgtggccccccatcaccggccgagggcctcgccagccggggcccgcgtcctccctcgtgccgctcgatgcccctctccacctccgtcgcgacgctagcccgctggccgaaaccgtgggtgagggggccagatccggccacggaggcgccggatccgccgccccaaaccgatcggccgtctcaccttcggctgcgccgtcgtcggccttctccgtcctcctcacgcagaggacggttccaccgagctgtacgtttgggccttgccgccgccttcccggctcaccactggctttgccgccggcgagcttcggcggcggcgaggtggaggagggggatgagggtgtggcggcacgggtggctagggtttcgcccccgagccgcccgcgtgagagcgacgcgggggacgcgtcctcctttcatcttcctgtaagagctcttcagtcattcagtttagtgcacagactttttagggcccctttgaatcgcaggattgagaaaacataggaataggaaaaacgtaagattttgataggaatgtaagtgtaaaacagaagattgcaaaacgcaggaaaaacacaggaatgaccgtttgattgaatcgcaggaaaaacacaggaattagatgagagagatagactcgtaggaaagttaccaagaggttgaagctcttgctaaatttcctccaaaatctctttaggattgtccataggaatttcaaaggattgtatatgattcaatcctttgtttcgaagggcttcataggaaattttcctataggattgaaatcctccaaaattcctatgtttttcctccaattcaaagaggcgcttagtgtcatcgcaacaagttcatctaacaggtacaaaattgtcttcccctggatgacaaaatgcagcagaaagcaaagcaaaactgaattgcattcagcgacgggaaaagaaagggaggagtgagaggtgtcgcttacattctctggtctccggcacgaacgccgaggtgggggctcgctcgacggccgcgcgcgctaggagctcgaggatgacctcattggctcgtcggatcgcccgctcgcagcaacgcccggttcccttctccccatcgcctctcgctgaagctcctgccgtcgccgggtcgccgtcgctcgcaacgacaacaatacgagataactcgagggcctatacgaaaataaacccccagttcacacttcacaggcgtgtttaaatctcagccgcctatatcagatcgaacggtgcagagaggctgaggttttggatcgctcgaacgaagagattttttttttgacgcaaaaggtagagactaccttataaccattgcattaatggtggtcaaatcagataaaatctggtaaagccgaacaagagaacagaggggggagaagaaggaaaaaacagaaagaaaagacatgagaaaaaacagaggtacaagggagaaaaacaggaagaaagaaaaaaaaatacaagagatacatagatacaaaaggggagacaagatggttaagcgaatttgaccacccaagcagtaatgtgtgctcgaaggcaaggcttgaggcaacgaagagattttggtcgatagtagttgagttcatgttcctttgttggtctgtagcgctcagtgattcacatcatctcaagacatgaatcaacctattttttttagataatggataaaatccggcctctatatccaaaggaatcaacctatttctgtttgggagaatgttagaacaatgcttcccgttgaagtcgcaatccaactagaaatgctttttatatgcagcttgtagatagatgtgcagacaagattcagttcagcacttcagccaaactgtattcagacaagattctattatcaaaagacacaacagtagtccccacatgtgacatgtggaccaaaaggagtgaagtagtatattgtaggagtatttcaaaaactcccctgtagcctccccacttgggtctaattttattttacaggaaccgtaagcaaaccctaggattttgcttatacaaggtttacctaactataccattgatgatagagacacttacattcttgccctttcctaacccgccctgctccttcacactgcggaggcaaactttttttgaatgactcgcacgagattacaagattacaaccctggagggtcgtaaccaggaaaaagaaaaaaaaccccacccacacaccgacatcgccaacacacaagcccaggagaaggctagcaccggaccggccgccgctaagtatgaccgaccgccactaggccgacaaagggacactgacgagatcgccccataggggtgccaaaacgatgtcttcaagaagagaagtgacggaaaagccgctgccgccgtccgtcgggactcgaaggagccaagactaggctttcgcccggcaattacccttgggggatgaaacaacacgacaacaccctcaggagggagaacctcgttgttggttcgaccaaggccggactgagttttcacccgccgctcaccacctgcaaatccacggctgacgcactgatgccccaccaccatacaagctctgccgacctgtgggacccctgcactggtgtccccagtcggctagccttcgagcgccgaagatcgcgccacacccaccagcagattctcctcacacctaggtcgcctcctccaccgtcagccgcgcctctcgcgccaagccggcctcctccaccggacacgcctctcgcgccaatccggcctccctccatcggacgcgcctctcgcgccaatccggcctccctccatcggccgcgcttctcgtgccaagccggtcaccgacccctctaccaaacgatgtcgcgccggccaaatgtagccatctcccacgccctcgtcttgccgtccgaggccgccatgcctccggtgaccgtagtcatggccaccaccaccacagccactgctgttgaacgcaaagccacctcaccgtcctcatcctcacctcgcacctccacttgctgccgccagtgacccgcatccgccgacatcgccagcgcctccacaggctatcgcagaagatcccgccgccgccgggtcaccgtcgatcatgacgacaacaatacgagataactcgagggcctatatgaaaataaaccctcgattcacagtcacaggcatgcttaaatctaagccacctgtataagatcgagcggtgcagagaggctgaggttttggatcgctggaacgaagagattttggttgatagcagttgagttcgtgttcctttgttggtctgtactctgtagagttcagtgattcacatcatctcaagacctgaatcaacctatactatctctgtttgggagaatgttagatcaatgcttcccgttgaagtcgcaatccatatgctttctaaatggtaaatgcaagtagcttgtagatagatgtgcagacaagattcagttcagcacttcagccaaactgtatctgttggacaaatctgattctattatcaaaagatacaacagtactccccacatatggaccaaacacagtgaagtagtttcccagtaaaatcaattgggatagacacatgcaccagttcatccccctctcagtccttgcatcctgctgtttgagagttgagaattgagacacaagttaggcaaaggaaatcattcactgtttgttagcagtacgtacaaagtttggccagatacacaaaaacgcatgaaaacaagtatacttgtaaacaattactcctgtaaactccaatatttgatgagaaatatttctgtatgtttactcgtgaaacctgtccattggattcaacgctaaaagttttgatcccaagtatgcaacaggactggaaataagccccgaattctcatagaaacctctgccgttgtctctgtcaaccagctctttcacaatgcaaatgcatgcctaagcagagaactggttggcgtcaggaaggccaagtgagattctgttctccagacacttggagatactacaaagatttgatctttctcatcttttaatcgccttcttgagagagatcatctcagttgcctgcagcttctagaaaaaaaaaacaggtacaattcagcgaggagagggaaggtcagcaagaagcagataggacacagccatgttccagaaatcagttccaactgttagccttttttttttcctgtaaaagaaacaactgcgttaccactgtcatataggccagaacacaacatcagttagatcttactacggagctagtgcccttgtttggttgattcaggttcattcttgagctaaaaagtactaacagtttaggatggcaatgtcactgcattgcttgactgaacttgcaattccctgaatcacaggaggtagctggcagtagagctactgcgcgtaccataacgtggtgcaccacaccgcccggggatttcacccaggtgctccaggacgtcgccggcgaccccaccctgccccgcaccaagtccgtccggtgcgccgcctgcggccacggcgaagctgtcttcttccaggtcaggattatcgatcacaaccaaaccaactagtttattcagagttcagagttaatacaaaagatactcaactaacgcaagttctgcatattctcaaaaaaaataattctcggtttcggttcagatgccaactgtgattaacagaatgtgtagttgcagatggagtaataattcggggtatctttgtgaacattgcagtggagaggccgcgccaggggcaacgcccggttcccttctcctcatcgccggcggcagcggcggcggcgtctcgacatctcttcctcccttgtacaacgacacgacaacacgagataatacgagggcctaaacgaaaatcggcccacggattccgaggcgcgtctaatctcagccgcctgtatatgatcgaacggtgcagagagaggctgtggttttggatcgctggaacgaagaaattttggtcgatagcagttgagttcgtgttcctctgttggtctgtagcgttcaatgatgcagagatgccgtactgccgtttaagcttcagaacctattgatgttatacagtacagatacgagtaca

SEQ ID NO: 12547 - DNA, 9162 bp, Oryza sativa
tatggcttcactggtcaatcaagttttaatttaggtttaattagacctaaagtgtatatatatacttatacatgtttatgtattaattaaacaacactatgtgtttaaattcttatttcactaagttaaggttttgatcaatgttctctacagaaggtgccaaattttattttactatgttgaagataactatttgctggttctatagaaactttgttcatttcatttggactaaaatgaattttctacaagttttacaaattaatggctgctctatgttagtaaatccttatatgaatatttagagacttttactacacagcaagtatataatattatttcataacttggaaatacttgtgttagtgatcctacataacttaagtttattcaaattgaagctaaattgggttctacatgaatttctaaagtttagcttatctaaaactagtcattttaaagataatagttttagaggcttttaatgcaaagtaagtaattacttttatttcacttaatcagagattgtatgatgatgaatgatgaatctgtagaatttgattttgtttcaaaatgagttgaaatgaattttctatgtattttataagtttgtacatgttttatgcatgacttatcttagataaatcttagagacattatttgtacagtaagtgtcaagttttatattcctggaataaagttcataacttcaagaatctacagaaactggaatcacttcaaaatgagctatatttgattttatatagattttacaactttgtgcatttttctgctaaacatataattgtttgggcattttcctaatttttcttcagattttaaaggatgggtccacatggctgtgagggaccaatatgcacaaaggcccttgatgtttctaggaatcaacccgcagtcctaggcccatatgtcagttactaacattttgcgcaaaaacctctggtttctcgggaaatagatcccgcagtcccctagttttaggtttgtatgcaaaacaatgcttgagttttagtttatttacagattattactggtcctacttgtaagtgactgttccagttgttaatacatccctgggagtctttaaatttcaaaagccatgcccttgctctggacagagcagagcagcagcacagccgtgagcttcacagcatcaccagtggcgaacaatggcgattcagcttaagctcccaaaacaaaaagtgtagagaacaaccgtgcgaacctattggtggctttctggcaagatttggtgctctatagcggctgttagggtgttagaggcggtggctaagctcggcttgcacatgcatgtgggttttgaggctcgatttaatcgtgcatgcgtatgataaggactctagggactactaggaggctcaccaagaatcaaacgcggctcggcgaagtcttggcgacggtgtactggttcggcgacggcgcaactgctacggtcgtcgtcgacggtgtactcccgggcttctactgcatatagagggtgcatgcttcggtttagatcagcacaaggtagctctaggcgaaaaagattgcgccgaagctcaccagagaaggagaaagaaaggaatggcggcggcggccagagcacgacggtgttccgagttgacgcggtcgcgttcccggagattggctgcactaaaagaggcgttcttggtggcgttagagacggcattgagagggaattacagaacgcttattgaacggaaatggagctcaccggatttcgacggcgtcgaggacttatctcaccggcgccggagttggcacccccgttcccggcgaatctgaggcggggtacctcggttcttccgcgaaacgagacaggggcgagagagagtgagagttggtcggccggtcgggttaagtacggtcgccggcggagatggggaggaggagctcgccctcttccgcgctcaacgcgtgctcacacgcgtggcgcgcggggtctgagtcgtgggcccgtgtggagagggatgtgaggctgacaatggggtcccactaggcaagagagaggtgtagaaggaggaagtgttggacagggctgaacctagcctaaggcactgacaagtggggccaactcgatggaaactaggccagggagagagatatgggtagaagactggtaaacttgatttttagattaattttcggaattattttctcctctaactttgtaactacataattcaatgtgtggaccaaattaattagtgttgattttactggaggtaaatgattacacctagattccattttctttggttgcactcaaaaataatgggtggactgctcacagaaattaaacaaagatgggctattagaaagctagattgaatttttaggaggcttaaacagaggaggaaaaatctagaaaaattacatttattcatgataactaatctagtatttgaataaattatttcccatgttcacttatgtgcagttaaatgtacttttggatgaaatatggttttagccgattaaatttaatttgttttcttttagttgtctgcttcaaccgattaatttgagatatcaacatgagtgttaacatgttaccaaattacagaggacaagtttgtgctaatcactgtccacataaatttttccatgattttatcttgcacaaaatattttagagaattaagatgacctttgtttgtatatgtgttcccacttcataattgcatctaatattattatagggattacattaaacttcttttagactgagaagatgatatttgagtttaatattaagtccatatgttatcacccaagattaactataggtttgtttagtgaaataattcttttagattatgctcatgggatctattatggaatgcaagaccaaaactccaaatgcacaaagaactcgagcctaggcatgcattatgtacatgtatgcttgatgacatttctagtctaatgttgggaatgaaaaggttttattttgttctcaaattttaatcatgcaatggtttaagttgatcatcacctaaattaaaacggaaatttttggctctcgaaatttggagaagttaacctctaactattttgacaagaaatcttaagtcctaaaatttcgggtatgttacacaggccgggggagaggaggcggctgcaacaccggggaaggcgacggcacggccggccggcgcacggtcgaggagggagaggcggtggaggcgcccggcgcggaggaaagagaagggcgacggcggggaggtggctagggaccacgggagaatgcgggagggggctaaaactggagaacggatcgagggggttccattttataggagaggagagggagccgggcacgggagagggcggaacggcgacgggaaacacggccggcggccatggaaagcggccggggaagacgcgggcgttcccggcgattgggggcacgattcaagggggaaattggggggaattgaagaggattcaatggggattaaaacccccgaatcaattttggaattagccaaatgaatcagcggatttgagggaggaacggcgctagggttcacgggagagggaggaggccggctgggggaggaagacgacgtcctggcgcgtgggccccacgcgggcgcgcggtcagcacgtgtgcaacgcacgtgcgcgggaggggagcggctcaggcaggggcgcggcgtgggccgggcagccggcccaggaggagaggaggggaggggtggcccggggagagagggaggaggagggagtgggccggggaaggagggagggcggcccaagagagagagagagggggaaggaaaaagagagggaggagggaaggacttcggccgcgggccggggggagagagggaggactttgggccagacttggcccaaaggaggaaggaggattatttttaggtttttctttttaataaactttgataattgtttttgttgcttaataattattttcggtgctctgaaaattcaagtaaaatttgagggctccttttagaccaaagagaatttaacaaaaattctccgggccacatttgaatttttcttgtacgtattttagtgtttgccaatttcttttcgaattttaaataaattctattattccttttagagaatgatttttaattcgggatgaatttatcaggacgtgacagctggtgctatgagataggtcatcggtcttcgttggtaggttgggcgcgacgattctgcatttgtcgagatcgttctcaataatggggtgtactcgaccacaacctactcgagtgctcaattgttcctgaaaaatattttctagaaggcaagaaatatagcagagaatatcgagtatgtactcaaaaaactgcataaatcttctagtattatcaggatataacgagcagatgtaaatatcaggcattacgtgaaccgtaaacaagcttgatttgtacaaaataaaatagagcgagcccccggcattaaaccgtagtcggtttaacatcagggacactcgcacaacagatattgtacaaaaagcatgctctaggtaaacataattgatctgacaatatctgaaaataggtacggtaaattgtatataaaatattgcgtacctttgtagatatatgccggatatatctacggaataagtagatcaattaaattaattattccactaattaccttaattttccttggccggtcaatgcacagaccgtagctctgtacataccaatatgcatccgtatgcataggcatgtatgtgtacagcgtacaggggtgctggtcacggtagagtgcatccgatgcatgcgaggtgaagtcgggatctcgtcggaagacatactccggtcgggttagatcttcccacagccgaagttatcgagcagcttgttgttggagaatccatctcttaaacccatctcgtcgaaatcctgaagcaccaaaatccccctacctggcgcgcctctgtcaacgtttgatgtcgcgattccggtatttgcatagtatggggatcgttgatactaggatatacgcgagactgaggtaaaagagatggggacgaggatttttatacaggttcgggcctctgaattgtcaggtaataaccctacatcctgttggccgaagccggtattactcttattcaccataatcacaccagtacaatatgtgggatagcctatctaattgttgtcgacatggcggtctgaaggtctgactcgtagtcggcaacagggtagtcttcttcctcgaatccgtgcccggcaagatcagagatagcgctttcgtctctcctgacagtatccggagacaccgtatggggttagccgtgcttatccttgaagtcgatatccgacgtcttgtcttggcgtatgttggcttgtatgttgtggcttctgttgttccgtgttgtccgtgtcccctctcctcctagggggccttgtatttatatccataggtgtccccttgtccaaatagaactagggaaaccaatatggatatagtccgagtggtacttgtcgtttccatgtagaactctggttgtctttccttatccaaaactccctccatatctgaagtcagtttccgtataagacatggtatgtggtgggtcctgccgagatatagtcgactactattaggtatgtggtatccataaccctgacagtcgcccatgtaaccctagccgcgcgtgcgtgtgtgctgtggggaagcggcacgcgggcgtgtattggtaaataacagtggcagataagtcttccctctctaaatttatttttttattttcttctaaatctattcctcacagtgtgaatacaatagggctagacggccacttcgattttgaaaaagagggtcaaatgaacaaagttaaaaatatagggtcaaatttatagttagactttaaaatagagtgaaaaaaagcaattgtctctttgtcgttttccatatatatggtcgcaaacatttcagggctagcccagccttggctggccaatcaaagtttctacaattctctctcagttctatcttggtatatcagatcctcatcatcaagagatatttttcttaaccagcagaaaaaaattcgtccccatcttcgaatttggacgaaatacattgaaatgcttttaaatttagcattaataatatcttcaaatctgtccaaaaaacaacatcggtagtgtgcacttagaatcagtggagaatggacaagaggctagaaaacaacccaatggttagcattgatcataatgaagtgtcaagtatatatatggaagttagagttatatcagatataattgatttctatcatagtcttactagtcttacttatttttaatcttttcttatttctacctaagcatatattctacatatacaattgccctgaggcccaatacaacaaatccaatattcacaatatatgtcctcccattctattcaacacgaacctgagcctcatatgtcgacatgatagggttgatgaacatatatactacttcctccgttttataatgtaagaatgttataatgtcgacattatagcattccccatattcatattgatgttaatgaatctaaatagatatatatgtctagattcgttaacatcaatatgaatgtgaaaaatgctaaaatgacttacattgtgaaacggaaggagtattagacatgctttttaccctctctagtggtcgccaccctccccagccttttccttttttctttctcacttttgtaatctcttagccttcacggctattatacagtattttcctctcctttaatacaaacacaccatgctggggtttaaaaaaagacagtgatagagtattttgttgaacttagtcacccataattccagctacatttatcatcatagaaggaactttcatgcatatgctgccataagtcaataagtcaacgtttttatcgttttgtacaatggttcatcgatgctgacacctgacatcgataccggccggcaacaacaaactgattgcaactagaagggaaaatattagaaacaagaagctttagctttgttcacctacctactataccatcacgagctttaataccgggtagcaaaccttcccatatttatatatgcgatttcattcatataatatatactccctccgtattttaatgtatgacgccgttgactttttgacaaacgtttgacctttcgtcttattcaaaaaatttatgtaattataatttattttattgtgacttgatttatcatcaaatgttctctaagcatgacatacgtatttttatatttgcataaaattttttaataagacgagtggtcaaacgttggttaaaaagtcgacggcgttatatattaaaatatggagagagtataagccaatggatgcatggctttgtcatgtggatgagatttagctctccctcatctcacctcaggcccgtcaactcgtctcaggctactaaatagtagtgtagtaccttacacgaacttcacaaatctcacagccatctcctgtcctctttgtgcaaccgcatgagagcccagcaaatctcgtacagtatatggaatcaccaggagtgcgctgatcatcgtcttcctcacgatgggggatgccatggttagctgcacaaaaggcatctctccagtgaggtgagcctccctcacgacatacgtccacttgaacattttttttgttcttgtttaaaattatgtgtagcgattatacttgtgttcttgtatagcaattctacaaaactaaaggtactatttgattcaacaaaacctgcgaacagtatccaaaggggggcaaaattgaaggggaaaataaggggttgtatgcacgatgagtttttcttctttttgcacaatttacaattgtacgatgctttggtatagtaggagagcctagccgttcaaaagcatcttgcataaacagaaacttttaaacaaactacccttgctaaggctcatcagtacgctgatcaaatgtactcggtaagggatgcatggatattttcaagtggagctaatcatcatcttcacggttgctttgagaaccatatgactaagccttatcatcaagtatacagacaatcgacatgccttttaagaacttttttttgggtcatgcctgataacttctaccttacgtactacattatttgtgtaaggcacaatcacatggagttggtggcattatgctctcatgagaacattaaatttcatcaacttacatagtacggactatttacttccaagttgtgctccttgcatccttgattaatgggaacaactcagctcatggaatctcaaagtaaatggatcacattgccaactaatattagcaatatattactcctacatctcatgtcttgtcctgttcaatacacctaggcacttgacaattggtgacagttgcagttttccatgttgctaattactcccttagaggggtacatcagagtcaacacaatggaaggggaaaaactaaaaaagcatcggcgactttgtagacttgtatgcagtcttcatactttataatgtctcattgtacgttcttgatgtgatgcaagaccggtttctctctagtgtccagccatccctctgcttaatacagagttcatctctcttaacattgaaaaaaaatagagttcttctctcttcctagctcttctcttgatttgtccatgttgaccatgtcgccgaagatccatgatcaacgtggccatttctgttcttattgaagtttttttactgaagagatcttgttgttgggagttgggacttgggagggaccaatttttctgaacatatagcactctccttcagtccttctgcagcactctgaccaatggcatgataatttgtatccatatttccggttatttctcttattctctggttcatatggcgtaaccttaatttcttcttttccattgatgtgttttacttctaaccattggttgcaccagctttctattaatgaacttgcaattcacctgttcttttatttttcttctctttgcaggtgatctcaggttttatcttggtggtttcctgctgaaccttctgctatcgatccatcgaaaaatctagtgagttgatagttgcaggaaactgatgctatcaatccgttgaaaaatcaa

SEQ ID NO: 12548 - DNA, 22090 bp, Oryza sativa
  unsure (1)..(22090): unsure at all n locations
tctttgctgtagcttgtaacttattctctctctttttcccttaataaatctcggctggctcttcacgccagcccggcgaaaaaaaaaaaaagattggcacctgtagactgcatactctgcagcattggccatttcagaggtgtcctccctatgagccctctttgaaagtagtttccatgtgagatgtttttatttaccttgttctagttccagtagagatataaataaacttgtcctgattctactgacgatcatgaataatttgctatccactactacaaacgcatcaacataaagtttcttaaggaccttccaaagacaaaattaaatttaattgttttgagcactagtgtatctgtgtatgtaactctctagatgcagctcattttccattggactctagactcatctgcaaagtgcaagccattacacaaaagacgctgacgaagcgtattctcaaaacgacgtacaagagcatcgattaaactagcattagtgggccatgtcatccactaactatacttcacaacaacttattaagagaaactcttcagattaaaagaacttaagagaatgtttcatggatagttctgtaattaggagtactggagtactttaaatctccttttctcctataaaagtagtccgttttactcttttttaagtggaagactctcagatccaacatctcaaaggctcttcttatactgtactttgcttcatgctcttcttatactgtacttttgaatgctttctcctaaatttttgttacagtgagaatcaaaggttccatgcaatatattattatcaagactggaagctcctagagtgcatggatggccctactcaggttggaagacaaatatttccaacctgagccgaattatgtgatgcaatggctctgcaagatctcagacgctatttgcagcttaataaattatagagttcaatatttgattgcagttgaagctaaatactcaatccacactatacattgaaattttatccattctcaaaataggcactgaggcctgtttagatacattggcaaaattttcaccctgtcacatcgaatgtttggacacatgcatggagtattaaatataaaaaaataactaattatacaaattgcgtgtaaattacgagacgatttttttaagcctaattgctccatgatttaacaatatagtgctacagtaaatatttgctaacgacggattaattaggcttaataaattcgtatcgcagtttacagatagattctgtaatttgttttgttattaatctacgtttaatacttcgaatatgtatccgtatatccgatgtgacacgccaaaactttacacccatggatctaaacaccccgtgagtagaataggaaggtacctcaaattatggacttgatgaaccttgacatttccttgatctcttcagaaacaacagaataaggcatgaacacaagaagcaagaaaatgcaatgtaatgaagacttctcatgcaaatagtaatgatttctctcgtgcgcaatgtctgcaggataaaaatgtcaagcatcttacaacaaggacagcatttgctttcattcaggcagtacttccggtgctaaggccaaatcataagtaagaatggctctcaggaagtgaccttctaccaagaccatagatgtcagcacacagcagtaggtttggaagaggttctctcaagagggaatctttatgcagttgtcgcaagggctacaaccatgtttgcacctttgcctgtcatactgctcaccgaagtggccaagaagagtttgcctccggcattctgtctgcagggaaattcattcatcaagtcgttgcgatgcagcattttgaatcatacaataacattagttggaagaattaaatcatagagttaccttcagctcgcaatatgtttgcattttctttgcttgctccattgcaaccttgaagctctcactcttgaagttccctgaattcctcagcatgcatacaattcgaccgaggtcctttttctgatataacacaatgcaatgtgccggaagattgtctcttcctgctctccctgactcctgatagtagctttctatcgattttgacatggtgttgtggataacaaagcgctgcatgatgaaatatccaaatcaaagctttgcacctaccagcaaaagaatggaattatatcccaacattgactgaaatacataccacatcaggtttgtctattcccatgccaaatgctatggtcgcacaaatgactttgacctctccgctgtgccattttccttgtacattggatcgttgacgagcagccaagccagcgtggtaatgtgcgcattttatcttgtacttctccctcaagaacttggcagtgtcagcacattcatttttggacagacagtacacgataccagacatgttcatgaaacgctcttttaggagatcacccagctgcttctgtggagtttttgtcttgccaatcacctcataattcaggtttgttctgtcaaagctcctcttgagtaccgttgcattagggatcctcaaggtacttagtatgtcctgcagagtacatccaaattatagctactaatttccatccaagtagtagtgcaggaacaggatcagtgtgactagaaccttgcagacagatgcagtcgctgtagctgttaaagccataattggtactcgagggaagttctgtttgaggcatcccaggcctcggtaatctgggcggaagtcatgtccccattgactggtttaacatggaaatcggtaccattgtcaggaaaaaaagctgcttcttatacaactatcacaaacgtggagtttaaacattaccttacacaatgggcttcatcaatcacaaatctcgccagtaaaccctattgaaaaatgcagtttaacaacacttcctcggataaaataaaggttaaattaaaaaaacaaagtaacaattaaaaaaatgtaatatgagatttgtaccctctggtgtaaacctatgaggatcccaataaatgagctgtttccagccattctttcaggagtgacgtagaggagtttgaatgacggtttaccacttctgcaatgagatgagaatatgggatgagaagctaaagtaatgtgatatgtttaagaagcattatgcaagttacaacacaaaattctattagatatgctagagatctaatcaaatgtttacctaagctcttggattactgcagatgactgtgaaggtgtctgctgagagttcaaaaatgctgctggtatagcaaacttgaagtttaatgccacaatttgatcctcaataagtgacagtagagggcatacaacaaccgtaacacctgggtgcagtgttgcaggtagctgcaagacaagtaattccaggtggagtttctaagtctcgactcatgcgtactgaaaggtcaactctagatgaaaatgcagaatttacggacctgataacacaagctcttcccaccacctgttggcataagcacaaaggtgtccatgttgcttactgcagccctacaggcctcatactgcaggggcctaaagcttttgttgccaaagatgacaacgtttgcaaaattgatgtcatctaggctatacagctgctgataacttagagtttctctgtttgaagttgaagtggatgactcacatctattgtttcctctgttcaccttcaaaagaaaatatggagtttgaaacataaagatcaatgaatatgagattagcagcagaaaagcacatatttgaaagtggaaaagcatggaagtccaatattggtaaatcagggtaggtagcttatagattaattcgagattctattgtgcagtttagcgtttcgagatcataccttcttctgggtactgactgaacgatcacaatgggactccaacgtttcaaagtcatcatctgaggagaacccgaaggagtccagattgatgcgagtctgtcgagcagaggattctgcctgtctgaacaaaggagttctcacctcaacttctttatcatcaattacaccgtgcttcatcatgccattcaaattgccacaagcttcattctctatagcattgagatcatcccaatcatcattattgtttgttgcatcagccaatgcgccaaggaaatcgtctccacagttctccacggtaataaaaccttgtccgccctctcctgtaccagaacattcaattataatctagtgaccaaacaatcttacctttctagataatatcaaacaatctgaaaagtcagctaagcaccaaaatttttatagactgaaaagcaaaattacattgcagcaaaagcaagcgcttgatgtggactatggatactataatatgatataaaagaatatcataactccatagatagtgcatactttaaaggttgtaagaggtcccctataaagttaagaaacggaactaaaacccaccaaaatttagcacagatatatgtaacaagagactttctccagtacttggaaattaagacaaccgttgatcaattaaaatctaatggttagcacaaggtacctatgaaaagttacctaaaaaggtaggcgaaattttagcttagaggttggctgaaaggttagataggaaattttgtccatggtatcatattagatgctaaagacaaatcagtaaagttagttcagttcttctcgatgaatttgctgcttcggatcatggggcagttctctatggtgggtggcagccggacctattatgaagttcccaatttcgattatatggtatctgtgattgatagcagaacatagtgtcatataattttaagtttcagcagctcatgaatagaagctagggctggtgccagatggagtgagccattagagacaaggaagtgagccaccggcatgctctgccagggaagaatcatgcatttggaggtggaaagggaagaccgatcgtacatattgaaaaaaactatataattgatcaattatcctaaactgtgtaaaggacgataaaacttggtaattgatcaataattgcacaccatgtaactgatgataaaactatgtaatttaccaatagttgtccccacatacctacactaagattcccatttacaagtaggcaactcatcaaattggtttagttatacaacatgacttgctaaatataaatttgcaagaaatgtaattgtacctaaatgctatgtaactggctaataaagaacatataataccagaacaacgcgattgactgtcatggcgtttactgatgattctgaaataaagcaggattaaaatatctcttcctttcgcacaaatggattacaagagaatgattctgaaatgtcattttttttataacaaccatcagagggaagaagaaagtggatttgattcagtggtggcagaaggctctgtaggatgcagcgatgcaatggatgtgaaaaacagtaatgggagcagcagctagaaatgaaaattactgaattgcacctaaatgctatgctgtgtttactgatgactatgaaataaagcaggattgaatgtctcctcctttcgcacaaatagattacaagaaaacgattctgaaaagtcattctcttttataacaaccattagagggaagaagaaactggatttggtttagtggtggcagaagcctgagtaggtggcaacgatgcaatggatgaaaaatatagtgatgtcttgtgacctttactctaaaggtaaaaaacataaaattactgaatagtgatgggagcagctggaatttaaaattactgaattagcctgacaaactaatggctaaaatttgttgcattttttcagtcaaaagaagatccatagcatttcgagccttcgagggatcccaaaactaaaacaatccccaactcaaaaccccaattaactaccgagaaatcctcctgcattatcggtagaggaaaccgtcggcagcggaggctagaggaggaggggaacgaggtcgagcggcggttaccgtagaggcggacgatcctgtcgaggcagtcggcggcgaggtcgcgctcgaagccggagtcagcggccaggtcgagcagccgcttcttctccctctcgtaccccgccatctccggcgagcgcgccccacctccgccccgccgaatggaggaaaccctagcgccggtcgccggagagaggggcaaaaaaaaagcgcgggaaactgtcgcggtggtggcgcgcgcctccgcttctgagctttttggcgccgggagttgtggatctcgtgggccgtggaactctcttgggccgaaatttgggctgaaataagatttggcccaacatgacactcggtccagtatctgcacagcaaaagcccaacagtaaaactatggccctagagacggcccaaccactggaaacctgaaaaaaggtatttacttgatttcaaggggctgtttatatggtaaccaaaataaactttatcaaattttcgtaaaaatttataatattgataagttttgacatgatttcttatgtatttatcaaagtttggtaaaaataaataaatgtatgcatatctttagtaattttaccaaaaaaaaatgttatgatttgaaataatatcaatctgaacaaccccaaatataactagttattttaggcttatgcacaagaataaaaaaggatgaaaaaaactgtcgccagactgaaaagtacggaactgtgacgtttgattttattaagtacagtgcaatgttgcactattataaagaagctgcaagctagtactcgtaataaaccatttggtagtaaagttggagtaattgcatcaaacagggtacaagagtaaacatgatttatactacatgtactactgtacatttgattgtgtgcaaatcaaagtacgcagggtgcatgtaaggtttagatagctacttgaatgggtacactttgatctgtccgtttgattgagtaaaaccatggaagttgtgcgagtaggattcacaaaactcatgaaaaatgttcaattcttacgaattttcgtggttaccagcctacttagctgacaaactacgaggtaaaccagatttgaaataaatcaaagtaaatttttgaatttcaatgaaatttgaaatttacaagtttatcgacggttttcaataggtgaacggttatgtgaaccctaacaagcattcgaggaatcaaggctaaaccgctaagggcaagcacaatgtagttttatttgcttgttgccagcaataacatacagacatagtaattgttattattgttggtctgttaggcagagtttaacattgaaacaattgttttgatacttctgaaaaatataggttttatagtttttagtttatagtttatttttttagattttatagctacatattcttataatttagatgaaaatttatacgatttgaagtgagtcggagatgttagaagaagctatgtttgaattcttctaaatagagccattatctctttctacgatgcttctcgcgggataatggcgattctggataccggattattgatactagagtaaggattttagatggatgtgacacatcctagtacaatgaatctggacaaaccatatgtacagattcattgtactaggatgtgccacatctacccaaaatctcttatattatggaacggagggagtatcatatttgtgtggtcgcactaacagaggtttgtgatgcttatgcttatatttatatgccaaaatttaaatttttgaccttaaatttggagctgattttagggttttctcatcaaagtttatttttcagtctttacttttaaatcgttgagaacacgtatataaaaattttattcataaattatttttttttgtaaatataccgtttggtttattccacgaataagcgaaatgatggggctggcaacagtgatcgagatgggctgagtgcaattgtgatcgcggcgaggggggggggggggagcaaatacggccacgcacgactccacacgttccgtgcgtacgagatgcagatgcacgcacggttgcagcaaagggaaggaggaagcaaacatactattcgaccgttccaatactgttttaacgagggcgctgacgtggccatgccttcgtgccgtcctactgtcccatagattattgatgcgcgtaccatcgagtggtaggcgtagagtagagatagtatcttttaactagagtacttgtatcctgtattccaaaataaattaaggctatgggtgtgtttagttcacgctaaaattaaaagtttggttgaaattggaatgatgtgatggaaagttgaaagtttgtgtgcgtaggaaagctttgatgcgatggaaaagttataagtttgaagaaaaagtttgtaactaaaagtggcctatgtttagatcgatgggtgaaaatttttagcgtgtcacatcggatatacggacatacatttaaaatattaaacatggattaataacaaaacaaattacataattcacatgtaaactgctagacgaatttattaagcctaattaatccatcattatcaaatgtttattatagcaccacattgtcagatcatggcgcaattaggtttaaaagatttgtctcgcaatttacatgcaaactgtgtaattacttttttttatctatatttaatactccgtacatgtgttaaaacgtttgatgtgacggggcaaaaaaaattgccggtggatctaaacaccccctaacttgtaaagattaaattttatttgaaataaaccaacttttatcctcttgcttaccatcggtccataaatcatgaattttattcactcaatatctctcaactactccctccatccgaaaacaaattaatattgtatgaatctgggatgatactatatcatattccctctatccccaaaaaaaaaccaatctaatattgaatgagatattttctagtacaacgaatagactctcttttatcaagattcattatattataaaatagcacattcaataatagattgttttcttttaatggaggaagtatgtcataataaattaacttattttggaacagggttagtgcccggctagcacacaattttcttattaatggaggatattttagacttttatttttccttttgagtactgcccgaatgccacgcaacattagagcaacgataataatatagcccacttcatactattagtgcacccacaatggttatctatagactctctacaagagatccatgtcagtatattttcctatatggaagatattaaatgaagagggagagcaaagctatctactaacttagagatagtctatagagaaaaacgaggcaatgtatgagagagctatagatacccatgtagacatactattgaggtggtttactattaatctagtctattgctgagatgtacatgttttatagatagcaccttactttaccattgcgggtgctcttagcttatactaaagttaacacatataatagattagctataaggttagctataattttcttcttctatctctatctctcacttatacatttaatgtatttgtcttggagtttgtgttaagctagctcttgcatgagagccaacactattatattttgtttacctctctcctctacataagtttatagtaggtttatagctcactattatacttgcccttatgggagatgtatagtaagcgcgcagccacgatgatgatgaccccatggaaagttatagcctactctatggagtacgtacctgtactgctgtacatagccacacagacagcgtacgtgcacgctctagctctagtaggctgggatgggagagtaggaggagcatggccggtgtactactggcaggcgactttactcacctatacaggtattctaccagtacgtagaatacaatactacggagtactgtatatctgtatctattcaattcactctcccctactcccccgtccctaaaaatccatcttataaaggtccctttaaattatatgaatgtaaaaacagagaaataaaaaaaataggattctgacaagaatacgggtgtcgaaatagaaaaaaatataggatcttgatagaaaagtaagtgtaaaatagatgattgcaaaacgcaggaaaaaactgaatgttcatttgattgaaccgcgggaagaacgcagaaaaaaacatgaatgtccatttgattgaacagcatgaaaaacgtaagaattggatgagagagatagactcaaagaaaagttaccaagaggttgaaactcttactaaatattctccaaaatctatatagaattgtccattccataggaatttcaaaggattggataagatttaatcctttgtttcaaagggcttcgtaggaaatttttctataggattaaaatcctccataattcctatgtttttcctccaaatcaaaagggtcttacaagtgtaaaacaatggattggaaaaatacgtaaatgactgtttgattggactacagaaaaaacataggaatcggacgagagaaatagactcaaagtaatttttcaagaggttgaacctcttgctaactttcctctaggattacccattcgggccctttgaatcataggaccgagaatacagaggaacagaaaaaaaacacatgattctgataggaatgcaattgtaaaatagagaattataaaacatagaaaaaacacatgagagatagactcaaggaaagttttccaagaggttagagtggatgttaaattttcttcgtttttcctctagaattgtaggaataggaaagtttaaacacataaaagatagactcaagggaagttttccaagaggtcagagtggatgttaaattttatttgttttttctctagaattgtaggaataggaaaattttttacgtttttccttttctcattcttatgaatcaaagacataaatagtgtaggattttattttttttatttttccttcatttaccctccaattcaaaggggatcttcgtatgtattttaaaggatatgatatgtttctaaggccgagtttagttccaaatttcttcctcaaactttcaacttttctatcacatcaaaactttattacacacataaacttttaatttttctatcacattgtttcaatttcaaccaaactttcaatcttagtgtgaactaaggccgtggttagttctccctctattcccaactttccatcacattatataacataaaaactttcatacacacataaattttcaacttttttttaaaactcccaactttcttcaaacttccaatttttttttttttgggaaaacacaccctaaacacaccctgagatggatggccgggcgggggcggcgcatcgcatccctcatgcatggaaacgaggtcgagcagcagctacagatgcacatagcagagctgccagagcagagggtggcgccgtgcagcgcagggcaacgcaacgcaaagcgcaactcttcctcctcctgacacaattcacgcactgctcctctactctactcgtagctcagtttagccacacccacacgctcctctttattacttcctccgtcccatgataagtgcagttttgcactattcatattcaatgtttgaccattcatcttatttaaaatttttttatgattagtatttttattgctattagataataaaatataaataatattttatgtgtgactaaatattttcaatttttttataaatttttcaaataagacagacgatcaaacgttgggtacggatatccacggctgcacttattttgggacggaggtagtatactgtgcgccgcatcacccgtccgatcccacccacggtcccctgtctgcggggcccaccgatcggttgggacccacctgtcggtggcggaccttcacgggggccccacctgtcatagacggcaacaccgcccctgtgctaacaactgtgcactcacggagctttacctcatcagtctcagctgagcaggacacgtggatggatcacatctactcccgctgtccagctccttaatttggcctgctacagtacagatccgccattaatgacgactctaatcacatcccaccatcgaataaacgtgctgttaaagtgttaattaagacgatgggtgagcttctgcaaacaatgctgctagtgtcgtcagtgagtagtacacacaacatatctcctcttctgatgctcggctgacgacgacaggagaggagaagaattgggaagcacacaccactgcactgctcctgccatctccaaaacgaagagagcagtgtatatgatgatgatctgaccatggatgtgactagcaacggctcggcaaggagaggaataaacgcgatacacgcagacaagcagcaccagctcacgtcttgaaatggatggaatgatagacaggtggacactgatctggacggatacacagagagagagagggatgcacacttgcattgcacatactgcagagagaagaaagccaatgtcgcctcaaccgcggagtttgcctcccgtgtcgggcacaccggtggttcctgttccgctccctgctccgccggattcggacttcggactcggcgaaagcgcgcactggtggtggtggctaaactgctccacttcaggtttggaatttggatgcttgacatgagcccaaaccgtcccatttcctattattgccactcctgcaacaaggctcaatctacctctgtgaatcactgctcaaacatacccctaggacctgtttggcgcagctcaatctacctctcctgcaaatgtgcaaatggagctcagccaaacagtttcagattcacttaaaatgaaagcgaagctgggtggagcgttctcacgaaataaactagagatgtagagctgggttttggctgctccacgactccacttcagacccaactcctgaagctaaattttggagttggagctctaccaaacaggacagaacaggttattaaataaaaagataggaaaaatcatttacaggttttcacaggatttcaaggaaaaaatgggttataaaatagcaggagtacagtgtagagaatttcctgttgtgtaaaatcaatacggcaatactagagatttcctccagataggacgatgcgacccggtcccacctgtcagagggatcgaataacacggcttttccagtagtacaccacaaaagaggacgatcctacaattacgcaatccaagagggttcagatctgatcaccgggacaattacattaccacctcaccccccgaaactcacccctaatcaccttagaacccctcaactccactaacacactgaaaccccaaaatttatgtaaaaccaaggggctgaatcgaaaaaaacccgagcagttaaaaactcccaccgtcccactcctcctcactcccaccacttcgctcgccgcaccaaaccaccacccccagccagccatggcggccgccgccgaccacgcagccaccgccattgccatccccggcgaccctctcgccgacagcgcctgctccaccccgttcgtcagcgcgccgtccagcccgacgcgggagcgggagcgggagcaccacttcgcttctccccacggcgcgccgtgcttcttcagcgcgccggcgagccccacccgcggcggcggcggcggcgggtgcctcggtgacttcgacttcgacttctcgtcgcggttcccgtctccctccgcggcggcgatgtcgtcagcggatgagctcttccacaacggccagatccgcgctgtccgtctctccgcgatgctcctccagcctcagcctctggctccgctcgtcgacggcgacggccacgcgtcgcatctggcggaggaggatgcggcggcggtggaggaggatggtgcggaggccgacgagcgtggccgcatccgcagccggtcggttcgacggaaggcgcggtcgatgtccccgttccgcacgcgctggagggcgccttctcccgcgccggagaccgccgaggaggtcgaggcagtcgccacgccggcggcgtctcgctcgtcgtcgtcctcgtcgacggcttcctccgcttcgtccacctcctcacgaggctcccgccggtgggcgttcttgaaggatctcctccaccggagcaagtcggacggcggcaagaaccaccaccacgacaccgcgccaccgcctcctccgccaaagaggagcccgtccccgtccccgtctccgtctccggctccggcggcggcgagcgcgagaggagggagaggggcagcaacggggaggaggagcaggaggagatcggcgcacgagaggctgtacgaggcgaggagggcggaggcggaggagatgcggcggcggacgtacctgccgtaccggcaggggctcctcctcttcggctgcatcggcctcggctcccgcggctacggcgccgtccacggcctcgcgcgggggctcaacgccgccgccgccgtctcatcgcggtcatgactcgtgacctccatggctgctcccgccattgatgccgttcttggagctcggatgcatgctgctctgcttgctcgtctgtgtagtggcaaatgcagtgtggaaaaacctgcaaaaattgcatagaaaatagtagtagctagtattagaagtttgcttttgccttaatactagtttcttgtatggattttggtgatgtaaacaaagcttgttcatctggtgatggtgatgaccactcccttaacaatggcaaaaaatgtgttcttttactacagtacttcagaactatacttgtattaactggaaatcgactgatcatcttatccttagtttgttcatttctaactgttggtgtccggacagagctagatctccgaacaaaatgtctgcgtttgcaatagtagtagtaataactattgctagtaacaatctccctttgttcactgtaaaattatccttcacagatctttggcttccatcacaatcttctccaaagccttttgtagtatcaaatgagttctttttgtaggaaccaataaagctaacaaaggtgagtttctaggggtaagatgtcgactctgaaaaccaaaccaaacagtacagagatcaagaacagcttttctcatgttattaagagatttttacatcaaaattattgctcaaacagaatcaaaactactaagaaaaaaagggctggattattctcttccgctggttttgcttaacagtgggggtaacatcatcttttattctcgattattatgtcatgcattcgagctgggacgacaggctcaagtacatctcacgtgacagatgacatgtcgtttatcttttgtgcctcgggctcagtaattttatcacggacagaacaacgagctgtgttaatctatgctaaactactgtttactttgcggtgattatttacctaaccaaggtaaccgaataaacggcctttcaccgtcctggcgcgacttgtccctaatcgagaccctattcttttagtactagcaataacaaaaggaactcacaaagtcacagttactagtaagtcactagctacaagtctaaacatcagtacaacactgcaaccaagctaatagcaccaggagcaaattccaaacagaaacaaaatttttatcaagtttgttttaccttaacttgttaggcctaaccaagataagtcacctctttcactttttgttggaagcatgcactttggatgcttgtaccataagttgttcagcgctgcatgcgtgtgctgcaaaaagtcacacgcttcgtgtcaagatctgtcaaacccaacgcaacaatggtgcatttctttactcttagtaacagattaaccgactaataaccatctgtactgtgttgattcttcattctagtactatcatactcctaccagtatttcaatccatttcaacgaaaaagagagaaagggaaagatttttgggagaggaagcaaccataccactttgaagttgagttgacaacatgataaaggtcacagttgcatggcaacttcatccggacagtcaccagcaacacgcagcaactgcactctccagcacaaggaaagctgaaggggaaaaagattacgaagtgagaattcaggcatgtggatgtgacaataccagcctcccatccatgtgtgttcctttccgaagcaagcatgtcaccgtacctcaaggcaaaccacaataaatatagtccgatgcagggatgaaacgaaaggcgccatgccttgctgtgttctttcgctgggagcatagtatgtcctggttcatgcaggggtagggccatcaaaatgccagctttgaaagggatgaaaatagagttttgtacagtagttggaagaatttaagaatgtagtaatgactatagtaactctgacagtcgacatggatctggaaattgattgtttgatcacttgtagaaatattacgatcataaatgaaattatttttaaaggtaactagaaaaagagacatcactgattatattctttaattcttagatggtgttcatttctatcgaagatgaagatgaagttggggtacggaaaacaagaaaaccattaatatataattaattaggttttaattattataaacttaaaaatagatttatataatattttaaaataatttctatatagaaaagaacggagccaggcccattctaacctgcagagacttaagactttcactaaccgtgtggactttgaggctttgactagaaaaggaagttcattttcatactctcacatataatgatggatggcatctccagataccttaaatcaaacttggtctgaggtaggagtacttgccagcaacctttcctccctgatatttattttccagagtcgcacagatatgcagctgtttcgcacatcacaggctcacagcactgcaaaaaaaagattcagggaaagcgtaaatgcctatcatcacgatcacactaaaataaggaatccataaagcctttaagattcttatggataaagcttgcaaagaaaagctttgctgacctccaatagcaaagacactcgtgcgccgagatgcaataaggtcgccaggacactgaaataaccatgaatagaaaatgccggtagtacttcatcattggagcgccacatcactaaacatttcattcccctcttttagaagcacataagaattataagttacattgaatgattgttcctagtttaatcgaccttataatacttgcgagaaattaagaatcgaagtgggacgaaaatatgcaccggtttaggatacagcagcatgcatatcttctgctggattcactatatggccgctgttgaaagaccatattgcttggggattatgcttgctcccctggaccactggcatttagcagcggggtcaactgctgttgcgcctcccaccggtgtcaccgccggcctacaccgcgcaaccggcgcgtcgatccccagacggagaagccaatgtggccccttcagtgtgtggcaacacgggggccatagagttcctgagaataaaaaagttgttagcaacttgaggggcctcatgggcagtagataaaacaagaaatgccagtgccttccccttacatgtttgtggggacctgaatgcatcaaaatgagagcagattagagagaatccaaaggtgggctgcatgtgaatgtgattgtgcaaacaaagagtatcacttattatacatctaaagaaaacaagagtatctctttatctccccgttggaagaaattaggaaggataacacatgggtcattggctcattgacactaatctgtacaggaatattcatgcattcttttgcatctattatctggtgatgccaaatttttgcagaagcaagatcattggataaattatctcatgcagaaacatataagacattttaaaagaagaattcaaaattttctaatatgtgcccaaccaagccttgcatgctgttctatctgatttcattcccagcaagaaactaagcaaacgtggagtagcttaacggcctgggttcgatccctggttcctcaccttccctctctcttaaatacattgatactaagtccctccttagtatcccacaagaaaatcagcaaacatgctattactgtccgtcgtattagcattacaaagaattgatctttctagattgaagtaactgaggctcaactcttgaagcaagttcaagtcagcttgataagtatagaatatcctgacagatctttctgttgcttattttaattagagagaattataaatctaactagaacatcttacctcaagaacacacaattgtatgggattcaagttagacatagatccatatgtcagcaaaaccaatgcataaatatgcacaatgcaatcataagatatcaggtttgtcaaaataaatgcataaatatatactagctaaatgcaagagctttggatggaaggataaagatcaaaatggttcctttcccttttgcatcttccatgcctttttgnggtttttaagnngngatcgttccccccattnccctccagcagtaaaaaatgaagacaggacaaaaatcacaaggcccaacanggaaatttntnangnnnnnaaacagcatcctttttatttgttttcttttttnttgggaagccacagccaccatttttagaggagcccacaaaaggaatatgccaaggttggtgnnggggnnnntcaatatgagtataggtccctgtgttaaattttgtttccgtatgtttgctagcattctgtacgtgttacagcgtcggattaccttttatatgacgacagcatgctatagcctctctctagtagtctagttcctttcagtacccctttttgtgcccagcccaagtaataatgctaaaagagtgaacagcctgctgtctgcatagacaaccataaactgtaaattcagaactatgaaagttccctactctcgaaatgtcagaagtctctgatctttagacaatgttttatttttcaattccttagctgtagtaaaactaactgttggcacttggcagagcaatagttataacttgtgttaaaagaaaatgagtaacggatatgctactatttatagatattatgactataagtatttttaattttagataaaaagtaagtattcatttataataatgcatatacaagatgtcaggaactaaatgtgccaagcctctactaacatgtaataacgtaaattctgcaaggaagatatctgctacattagagagaaatgttctaaaaacacttctattactagatatatcacccacatgcatagattatatagataatattgttagtataatccttgttctagttagttatttggtttccttaggcagtaagctataggctgcagctgttactcggttgtcagacagctgctattagtggtagtagtcaattttgattttacctctagctggaacatagcagcagcagtattgtcggttcagcaaccgacctatccatgtactataaatatagctattgtgctaacataagtaagcttttcagctcattttcagtttcagtttcagctagactattgagtgtagttcagaagtgatcctaccaacaaatataggtgacaattaagctttgttggaagtttacaatatctgaactaatcgaggaatatgaatcgcgtgtgcggaactaataaccagaactatcgcaaaatttatagcaatcatgctatagctgaattttaattgcagaaaaggttagctttcccgtatgtcatattatcatgtgggaattgacatttgacatatacataagaaacgaatacatatctgttcatagttagagtaataataaactttactaatgtatgcacacacttcgttgttctgagggctagaggtgctcaaatatgcatgtacttagtacttaattcttattagtgtgctgttccttgtggtgcattataaaacaaaggagtaaaatcgttaaatcggtccaaagaatgcagaattcatgactctcatatccaattttccattggaagtttgaaaacttcactgtaactttcaggatgaccactagcaataggacttcccagaaaaatattttttgtcacaactatcttgttaactttgttgtcagttaatagtgtaatgagtaggacctccatagacccatgaaacattaaataacctatattgactatagtagaagttgaacattacatcttgttatttcaactactgtaactattaaggtatctagtgcatccataggccatagctcccaaattaatcatgaattatatccattaaggtatctagtgcatccataggccatagctcccaaattaatcatgaattatatccattactgggcattaagtccttagtaaagattattgagtaaagcttcctattcagttcaccattctaaaataaatgttaagggaatacaaaatgcataaagaccaggaactgttacctgaaatgaccagcctttgtagacttccacattttggccctctggggttgtgtacttccgcagttccacacagttcactgacaattatatcatgtatttgtgaactgaaactcggtttcttcgattaagctctgccctggagccttttgcacactcatcctcctcatcagtctcctcgcatcccctgcctcctcccatcgtcctgtttccgcataaagattggccaacaggacatagttccctgagttccatggttcaaggttaataagttctttcagtgccacctcagctatgctaatcccagaatgagcatggcatgcgcttagcagtgcaccccatatcgcagcattaggtctcattggcatcccttgaatcaatgcatatgcctcctcaagaaggccagatcttccaaataaatctaccatacaaccataatgctcaattactggctcaataccatgctctagctgcatgctctggaagatgtccctcccaacatccacagccccagcatgcgcacagcagccaagcacccccagaaatgtcacttcattgggcatctcaccgtgtgtcctcatctctcggtaaagctcaatgccctcaatcccatggccattcaatgaaaatcctgaaatcatggtgttccagctcaccacactccgctgtcgcattcccttgaatacctcccttgcactatgaacatcaccacacttgcaatacatatccatcactgcatttgcaacatgtactttcctgtctagcaacccactcttacgtgcatgctcatgtgcccatctccccaccccgacattccccaacctcccacagaccggcagcacagcagcaagggtcccatcatccggtgccacctccccctccctgaccatcctctcaaagcacaagaccgcaatgtcatccttcttgcaccaagcacaccccgcgatcataacattccaagaaaccacgctcctcctggagcgcctgtatctctgcatttcgtcgaacaggtggcgtgcggcaccaagatcatcagctcggaaacaggccgtgatgagtgtgttgtaggcgacggtgcacttgttcctctgcgtcatttcgtcaaacaggacgcgggcgtagtggagaggatatggcttgaggagcgcgagagagatggcgtgatgtgaaaggaaaccgaggcggagaagaagcgcgtggactgcggagaggagagaaagggacgatacgcaacctaggaggggcaggaacgagaggcggtcgggcgcgtggaggcggcggagagaggagaggagccggaacgcgagcggcggcgaggaggccgagagggccttgatggcggcgttgaggagaggcagcggaggcggcgcgtgaggcgggacgaggcggaggagcgggagagccggcggcggcggggaggagaggagcagcagcgcggcgagggagtggtggtgcggggacggcggcgacgacgggaggcagtgtcggacggcgaaggcgaggagctcgagcggccgccgccgcgcgggaggggagtggtgcaggaggtggaggaggcgccgctccgccgtgcgcgggtgccacccgtccggcgtcgtcaccgcggcggacagcgccggcggctcgccgtcgccggccatcgg

SEQ ID NO: 12549 - DNA, 561 bp, Oryza sativa
ggcgtcgacggccgccgcgatcggctggccgcttcccgcgcacgccacgtcggtgcatcccggctggtgcgcggcccgcgcggcgtaccgggcgacgccctgcagcggcgttgtgtacctgcacggcttcccggcgtagttcccgatcatcgccaccgttgcctcggcgtgcgggcccacgacggcgacggcgcggcgcgccgtcgccggcgacagcggcagcgcccgcccgtcgttcttgaggaggacgatcccctgccgcgccgcctccaccgcgagctcctggtgcgccgccgtgcacacgtgctgcgggcccaggtgcccgaacggctgcgccgccgggtcgccgtcgaacatcccgagccgcatctgcaccgtgacggtgttcgtcaccgcggcatcaatgtcgccatcgccgaccttcccctgcgcgacggcgccctcggtgtactgcgccaagaacgggccgcagtcgaggtcgagccccgcccggagcgtcgccgcgacggcgtcctccctggtccgcgtgtagtgctggtcgctgtagaacacatcaaccga

SEQ ID NO: 12550 - DNA, 576 bp, Oryza sativa
tagctggtaaagataagccaactcttccaagttccatccatcttgcattttagtattactactgccaccatagactggaaacccttctacatcattgagaaattccaatttgccaatcccttttggaacttgatatatcggtgaataattgaggccaaggcgccttaaattgcacagttgggtgatcgctgaaggaagactgtgcaaagcaacactcctctccaagttcaatatttgaagatttttcaggttgccaatggactctggaagacaagatacattggtaccatcaagatcaagcaaacgtagatggatcaaattcccgatgcaacctgggatgcttggtacaaatgaatcagtcaaatctaaaacacgaagataaggaaatctcttgaaaaatgaattatcaactctgagtgttttctcataagaagttttccatgtccttactttatattgcacctcgtccatgctaggtaacattaccatgttcttatctgtgacgactgaaacacgtcgaagtttagacacagtgttacctaccaatgattctgggtttccaacaaaacattcttc

SEQ ID NO: 12551 - DNA, 7202 bp, Oryza sativa
ccttctcgtcgcgcgtcgcctcctcgtctcgtgcagctgcctcgcctcgcaccgccagtcgccacccagccgcacctgcccctgcgccgccgctcacctcgccgccgtgcttgcctctccaccgccccgcctctccgccgccgcctcgccgctgcctcctccgccgcgctcgcagcctccgtcgtcgcctggagaagagagagagccccgccgctcgcctcttcgccgccccacctcgtccaccgccacctcgcctcgccgcggcctcctccgccgcgctcgctgtctctgcagtcgtccggagaagagagagagagagtgtgtgtgtgtgtgtgtgtgtgtgtgtgtgtgagagagagatagaagagatagaagagagagagaatgatacgtgggttccatattttttttataaaatagaatgctgactggactgccacgtgtacgtcacgtagaccaaaaccatcgcggattgggtcgaggggggtaattcgtccggtttacatagttggagttgaagaatgtccggttttgtagttcaggggagtaattcgaacgaccgcgatagttcggggagggtaattcgtattttttccttttaaaaaagtttacttttgagagtttcataaaaataaagacgcgtatattatggaaggatatattatcaaataattagaatgggtgagacttcaaacacaaatcgtctaacctagaaacgctcagggctcttccggctagctcacaagcgtttctcttcagcagaaataaagattaacgagaaaatataagttgggattgagatgagaaaatgagtgagaaattaaataagaactatcctagtcagatttgtatatatgatttatatagaaaagtgaactctcagaaggacggaggtaatacatatttttgaaagtttagtagaaaaccaaagttaacggaaaaataattgtaattgattgagatgagccaatgaggaaggaagtaaacagaaatgctcgatagggtaatagcaagtttatgagtctgatcttagaatttggatcagattagaacatgtccgttccttctatcaagcagtgatttttcttcagaagattttaacaacttgagtttgatccagtaaagatatactattaacaaaatctgcaccatttattgcatttacagttaccaacaacatgaacacacgcacaatgcatccagctacacgtcggtggcgtaaacgatctctctctttacacttcgcaagcaacaaactaaaataaaataattgaaacagatttacaaattaattaaatcatcaacacttcacgggacaatgagctaagcaatccgataggtagcacgacgacggcacgagccacgccttgacgacacgattcctctccccctcaccaaactcccaagcttggcaatggcaggtcgtcgtcttcctcctcagatcgtgctccaccaccttccatggcgaccacgtgtacaccacgtcctcctcctccgggtgcatcgccaagaacctcacctcgcctcctccatgcgcgaggtgttccaccttgacggcatgcttcggccgccattggtcgtcgtcgtcgagctcccagaccttgagaagctcgccgtcgcggaagatgtagtgcagccggccgccggagtgcgcgacgtgggcgtcgccgccgtccaccggctcggggaggtcgatcaccgccgccgtggatgagaagtcggcgaggtttagggagacgaggcagtcgggttcggaggcgaggatgtagaggatgccgtcgtggtagtgcatcgagccggagagcgagctcgccgggacgccgccgaactccgtgtcgcgcgccgtccacgcccacgtcgccgatgagaacacctccaccgccgcgccgcggtcgcgccacccggtgaagttgaccacgcggtagtccggcgaggtggacgggtcgaacgccagcacggacagcgtcgccgccttcgccggcgccgggagcgccgcccaccgcctcgtcaccgggtcgacgacgaagaactccggcgtgccgggcgatcgacagagcagcaagccattgcagccgtcgcataccacaacgccgccgcgttccggcaagaacccgaggtggcagtcctcgaggcggtgaccatcgttgccgtcggacgccgcgcacgcgaaccgcgggccacctccacctccgccgccggcggcgacagcgtcgtcgtcggggaagtacacggtggtcatgagcagcggcagcctgcggcggaggtagtcgtcggagacggcggcgcgccaatccttggagacgcaggcggagcgcgccacggatttgaacgggagcctgacgattatctccgaagaagatcgtcgccgatgagggcgatctcactgtcaattgaacaactcttcagaattgccatctcttactatctctctgttcgatctgtgtgtgttctgtaacgaattgaaaggattacttgatcagcagcaagtctctccgagtaaaatgcaactgggcgtgccaattttatactactacttcgtacttggttttctagattggggtataccggtgacgtgtccaggtcgaagcgctgcgtgtcctgccagcaagctgccacgtgtccctcagtagtagcccagctaaaaatgagacttgccgggtggaggagcatacctgtaaggcggtaaccgtcagatctcacgtcgcgccacgcgtatagcacacatgcatgcccaaatttggccggtttccaccagtcaaaagttataaaaagaattccgagaaaagaggggatagcgcccgcaatccagtccctgccgtcggttgttataggtcgtagcggtttattagtaataaaaaaagtttatgataagttaaaaaaaaagtttatgattatttttataccccctccgtttctaaatatttgacaccgttgactttttaacacatgtttgaccgttcgtcttatttaaaatcttttgtgaaaactatatgtatatatataagtatatttaataataaatcaaataatataaaaataattaataattacttaatttctttaataatatgaacggtcaaacatatttaaaaaagtcaactacgtcaaatatttagaaacagagggagtatatttttagccgcttagaaatctatatccatatttctatctctactattataaaaattgaagatgcttttactaaaatttggtccctcaagtttattagctaataaaccgttttcaattcctactcacctcgttgttcgtttcaaattcatgtgcgtgttcatcatcgcctgcgtgggagtcccgttcaaattttcggcgtcgttcgtgtatgacggggtcctctagggagtagggacgcggcatgcaggcacatgcaagccttcaactgcatgccatccagagatcaagccactcacacgttcaactgattttgcatgttcacaagttcgacttgcatgcatgcggctttgcacctattcaaaggtaaaaaaaaagttcaaaattgaaacaggccaaaagctaaaaatatatggatatttcatagtgtgtgtgaatatttcaggatggatccaaaattaaaaataactaaattactataaaatcataaaaaaacaactatatgaaaaagaaatatgcaacctaacaaacacaaataattttgattacaaatttagtactcgcagtacgtacaagatattataattttgttttaaattcgttcatttttgaaaatatagtagcagtcgtataagaaatttcttttaaaaaagttaacttacatgctaactttagatgatcgggctcctaattatagcttatgatttcatgggaaaaaaatatatatccaagcgaattcttataatgaatttcaccttaactaaaccatataacaataataaaattaaaataaccttcacctgttacagcgcacgggtattttttttctaagtcaatgtaaaagtttcttaaaagcaaatttaaaatttgagattttcttttcagcaaacgatggggcccggagagggtgtcgtggatgagcatgcaccgccgttgtgatcggcaatccaaaagctagtattggaatttggggagagagagacggcgcccctccaaaaattcattttagaaaaaaaaaaattgtaaacgtgttaaggattaaacacgaaaccttagaattatgggtggcggccggtgcaaacgtgggtttggatgaaggcagcaagggatcgaagcacgggaatcgtgggaagccatgtgcgttccggtgccgtgacatgacatgggtagtgcttgctacagcgagcagagcacgagctgccgctgacttggaacgcgaatgcgtccccaaatattcaacgggaaaaccctgcaattaagggagagggtaatgatcattacgtgcaccgatcctaacccactttaattaattaatttcttcccgctcctgacactggataatactactccctccaggctgataatacttgtcgttttggacaagggtgaaatctgtcttttaaatatggtgactacatgtgtagattagtcttaaaaagtattttaataagatcatatatttgttaacaattttatatatattataataaaaaataatggtcaaagttttttttttgataccgtgcccttgtccaaaacaccgatggtatggatggagtaagcatgactcctgtgatccctatccggtcagctatacttaattagcgcgttaatcgcatcgtgcaagcgacatactcccccctccctccggtttcattttaattgacgctttggacaataacatactctacaagatattcctttgaccttatttttctattataatatatacaataaataaatacatgtttatctttattatagtgttttgaaagacaaatctatatatgttttttctagtttttttaaacgaaatatttttaaagttattgatggttaaagttataaaagtttaacctcaaccttatccaaaacgtcaattaatatagaaccagagggagtatatagctcttgcctacaggttgattatatcattagggcatccacaatgtactccaaagtggtccataagcaatataatatttgattcagccacctagcaacattgtggaactagtccataggaaagaaataacaaaaactacccataagcatatgggatgcccatagagaataaaatatattatttgtctctatctcttctctcctgctaatactatttgttatccatatacattgagaatgttataatagttaaaattcatatatgtgggtctcatctctatggactacttttgccatatacattgttgttgcccttataagcgtaacaacttattaacgatgaaaaatgatttataaagtaagttttttttggtatattttgcagaataaactgaatactgtcatgggcttagattcttgggccgcttgtcaccatagaaatctcggggaaatctcggtttatgactagtgagggtgttcggagaataaaattccgaacctccagggatcggtgcattgcttaaaatctatagcaaagagtagtactagtcctactcaatgacgacgtgattatacgcaccgaatgtctgaattccattttgtggagctcccttatgaatgtatttgctctcattgaatctagtcacattctgaatctcttttcctttttccagtgtctgatcagtctttagtgcaaggatctgaagcattctgcaacaaagttgagaaaatgcatttgttctgatcaatcgtagagagatctttgttcttgtttgctttcttcatctgacgagtgtttctgaacatcttatgccgaccatatattagagctctttaatttgtttcatgttcagtacgttctttgttctgaattttttttcccccggtgtctgatcaatagcaggagactagatagctctttgttcttgtttgttttcttctcctgaccagtgttttctgcacattatggcacagtatggtgctgtatgttgattatatacaggttgagtgcaacctgcatatagccgtatgcagttatgccgattgggcgatatccaagaacgagctaatcaccaatatcttcaggagtcaggactagcaaatggtaaagcagcaattttagccattagccaaacggagcctcaagccgtcaccaaccgttggattaaaaacgtgcagctgttgtacatacaggccgcggcccaccgatcagcccagcttactaaagcccatccaggactgacagcccaaaaaagcctcacggcctttgcttggtctgacttcgtcagacacgagattggcaaaaacgagaggtcgccatcgcgtcgaacgtagaatggcccacatcgtcttcctccgcgcctccgccgccgacctcaccgccggcaagccgccgctggcgggcgtcccggcgtccgcgccgctctccgcggcggccgcggccatcccggcgtcgtccgaggccgccgtggccgtctggcgcgtcgacggcgcctcccaccaccaccaccaccgggcgcccaccgcggcggccaccgtcgtcggcctgctcagctccatcgacgtcgtcgccttcctcgccaaccaccccggcggcgccgccgccgcgttcatgacccccgccggcgacgtcgtgccccacgaacacgccctcgtgcgccaggtccagcccgacacgaggtcaccatcaattcatgatctagatatcctgcattgcaatgcatccatgagataattgcgactatggccttgtttagttacacggttcaaaagttttagcgtgtcatatcaaatatacggacatatatttggagtattaaatatagactaataacaaaacaatagatttcgtctgtaaactacgagacaaatttattgagtctaattaatccatcattagcaaatattccctctgtttctaaatatttgacgccgttgactttttaaaacatgtttgaccgttcgtcttattcaaaaattttaagtaattgttaatactttttctatcatttaattcattattaaatatacttttatatatacatataattttacatatttcacaaaagtttttgaataagatgaatggtcaaacatatgctaaaaagtcaacattgtcaaatatttagaaatggagggagggggatggattctaatagctcgagtgg

SEQ ID NO: 12552 - DNA, 705 bp, Oryza sativa
tcctgcagcccattaattagctacttaatcactactagtgaatatatgccagctatattttgttttgatttattcaggtcttgccctttttttagtgaaatcgacggaagaaggagatgacgtcgttgtagacaaggtccttggcgcagacgccgatgacgaagtcggcgtgggcgagctggggaaggtactgcacggtgagccggtcgccggcgtggccgccgcggcggaggtcgtcgaggaggagggcgacgtcggcggggtcggacagcgagtcccggccgccgtagctgaggaagatggggaaccacgccgggatcgccgccatgtcgtacgccggcgggtcggcccccttgggaccccccgtacctggccacgttcgcgtcggcatcacgtagtcgtacttggtcagaaccccgtctctcaccgctgcatccagataattaatatcaaattatcatcaaattaacatgattggggttttgttaattagagggtataagatgactgatgagactagaatttgattggtttactttgagcgagatggatcaaggtttttgtggacgttggctggggctcgtacttgatgaagatgtcggctgctgaattgttcagacaatagttttttttttcccctttggaaaccccaaatttttttgcatgggagttagcatggagtgaaatgtaatgtagagcaaatta

SEQ ID NO: 12553 - DNA, 768 bp, Oryza sativa
gacattgccccacttcattcggaagggcttctaatctatccggatcgatgaccttctgcgaaattccattcatgaatgcacatatctttgttattgttgcccggacattgtctggaaggataccccttattacaactggtagcagttgtgtcatcaacacgtgacagtcatgagactttaggtttgtgaacttcttctccttcgtgcttattattcgcttgatattcgtggagtatccagacggtacctttatgctctccaagcattcaaacatactttccttctctgccttgctaagagtgtagctggctggactcaagtaatggcttcctttctcctttggttccgggtgaaggtcgccgcgttgttccatatgcttcagatcattacgtgcttccagtgtatctttcgactttccgtatacacctaggaagccaagaaggtttacgcaaaggttcttagtgaggtgcatcacgtcgattgcgtggcgtacgtccaagaattcccaatatggtaactcccaaaatatagagttctttttccacatcgccgcgtgaccatcttcgctctctatatgctggcttccaggcccctttccgaacactactttaagatctttaaccatagcaaacactgttttcccgctgcgatgtttaggcttcgtacggtggtcggccttatgttcgaagtgcttgcctttctttcgtaccgggtggtttgctgcaaggaatcgacgatgacccatgtatacaaccttcctacagtggt

SEQ ID NO: 12554 - DNA, 1524 bp, Oryza sativa
cacatcgtaacgggccaagtgctatggccgctgctcatctctccaaaaggattcatgccatccgtactcaaaccaaaccgtatgtttcgtgcgtcctttccaaattctttaaattttctgtcgatgtttcgccactgcgaaccatcggcggggtgtctcagcatcccgtcctgttgacgctcttcagcgtgccatcgtaacattctagcattccccttgttcctgaacaaatgccttagccgtggtattatagggaaataccacatcaccttagcaggaattctcttctttgttagctgcccgtcaacttctcctggatcgtcccgtctaatcttgtatcgtagtgctttgcaaacagggcatgcttctaggttctcatactcctcaccgcgatataggatacaatcgttcggacatgcgtgaatcttatgaacttccagtcctaacgggcagactatcttcttagcctcgtacgttgtctcgggcaatttgtttccccccggaagaatgttcttgacgagtttcaataaatcgccaaatgtcttgtcactaaccccattttttgccttccattgcaacaactccagagtggtatccaactttttgtgcccctgctcgcaacctgggtacaacgaagttctgtggtcctccaacatcttgtccaatttatgggcctccttttcactttcgcagtcttccctggcgtcctgcaacatctgaccaagatcatccgcaacgtcgttaccatcagcagctatttcctcctcgcccgtttgatttccttcaaatccaacatactgagcaaagtccggaatattgtcgtcttccacttcatcttcttccatttcaacaccttgctctccgtgggatgtccaacaattatagcttggcatgaaccccgactcaaataagtggaaatgaatagtcctagatgcagaatacttcttctgattcttacacttattgcatggacaacaaataaaacccctttgcctgttagcttcggccactctcaaaaaatagtgcacgccgtcaataaactctttggaccgccggtcagcgtatatccattgccgatccatctacatgagtcaaaaaaaccgtacacaaataattattcttacaataatgacagtcatacaataattataagatatctttattcatacaaaaatcataaaatattacaccaaataattcttaaaaactatttgtaaagttttaaactaattttaatgtgttttacttcttttaattttcattttagtttgttttctattatttaagattaactttcactagagttttccttctcaactattttataaaaccttgtttagcaaatgaactaaatttctatatattctttcttccccacacacattttctctctcatcaacttacaactaaattttggagacaaaaaaagtgtgcaaaacataggtgcaaatgtagtatgacaaaaaaaacattggaggatgaagttgtaaaccttttaggcacctccgatttgtatgtaatcac

SEQ ID NO: 12555 - DNA, 669 bp, Oryza sativa
tggctttaatgtgtttgagtgacgtcttatcagcccttctttcaacatcctatgaagcgtgctttttggtatacccgcagctgatgcaaatgaccgtaatgtgccccttagttgcaggggggcattagcaacatctgacaagtcaatttcattcttcttgcgaccagaattagttttctttctagaacttacattgactggaattccctgtgcacggcactgctttgctcttcgccaaatatcttgcactctaccccttttgatattgaacatttcagcaacttcagttgttgctttttttcttagtcttccattgatagttttcttaaccaatgcatcatatatctcttgcctttgtatgttggtaagatttttgtttggatgttcatcttcctcatctgaatcatccaactcctcttgttcaaaaacaatttccacatcaccagcatacacaccgtactcctgcatgtctacaacaacaattacaaggtgagtcgtctgtaccaatttagatggtggatattttattatcatggatcaacatggttgtaaacttatggctgattttagatttcagaaggacatagaaacattgacacaatttactttatgtgctgaaatgtcaaattgacagtccataatttgcaactaatgcatccaatgttatgg

SEQ ID NO: 12556 - DNA, 1355 bp, Oryza sativa
ctcgcggcaacgtacgttgacgtgttcgttctcgctctcgttcgttcgatcgttctcgttctcgttcacgttgtcgcggcaacgtacgttgacgtgttcgttctcgctctcgtttgttcgatcgttctcgttcgttaacggcggtgtggcggcatcggggcggcggttggcgcggcggcgtggcggcggcggcggcggcgtggcgacggcggtggtggcgtggcgttgcggggccgtggcggcggcggcgtggcgtggcgtggcggcggcggcgtggcgttggcatgcggcggcggcgttgcgcagcggcgaaggcggcggcgtggcgcgtcgtcgtcgtggcgtggcgtctcgtggcgggcggcgcgacggagagagatcgagatcggagagatcgagatgcatgaagggagatctggcggcggcggctctcaccccagagatgcggcggcagcggaggaggtggaggcggcggcgaggacgacgagctcgagacgacggcgagatacggcggcatcggcgcggggatttgccctaggcagtggcggcgaaggagagaggccgagagagatcgatcggccgaaaacgtctaagtgttggtgaagaagacgagggcgcaccgggaatatatatacccccggatctttacgcccggttgttctcaacaaccgggactaaagatatctttagtcccggttgttctcaacaaccgggagtaaatatcttttcccgctatttcgaaattctttttaaacccggttagggttaagaaccgggactaaagattatagcactgcatatgattttcgcttacatatctgtttataaaatagaagttaatgcattaacattatttaaagtacaaagattaatgacaattacttcgaaaaattatttttgtctgtaataaattaagtggataaatcgtaataagcaaatataattaataaaaattcaaataatcatatatacttagcatatatatgaatgatattattatattggtaaaaactctaattaagatatgtatgtacatactgcatgatttaaaattaataaaaattgtaatcatcatatgtacttagcgtaggaattatattaaattaaatgctaaaaactctaattaacatatgtaaatgccacatgcatgatttaaaccttttaaaaattcgaatagtcatatataagtagcatatgaaagatagtaaattaaattgtgaaaaactctaatatatgaatgatagttttaaaaatatattaaatttaatacttttaaaaattctccagtcaattataattagcatatgaatgatagtaaattaaatgttaaaaactctaattaacatatgaaattg

SEQ ID NO: 12557 - DNA, 1989 bp, Oryza sativa
cgggagtaaatatcttttcccgctatttcgaaattctttttaaacccggttagggttaagaaccgggactaaagattatagcactgcatatgattttcgcttacatatctgtttataaaatagaagttaatgcattaacattatttaaagtacaaagattaatgacaattacttcgaaaaattatttttgtctgtaataaattaagtggataaatcgtaataagcaaatataattaataaaaattcaaataatcatatatacttagcatatatatgaatgatattattatattggtaaaaactctaattaagatatgtatgtacatactgcatgatttaaaattaataaaaattgtaatcatcatatgtacttagcgtaggaattatattaaattaaatgctaaaaactctaattaacatatgtaaatgccacatgcatgatttaaaccttttaaaaattcgaatagtcatatataagtagcatatgaaagatagtaaattaaattgtgaaaaactctaatatatgaatgatagttttaaaaatatattaaatttaatacttttaaaaattctccagtcaattataattagcatatgaatgatagtaaattaaatgttaaaaactctaattaacatatgaaattgccacttgcgtgatttaaaacttttaaaaatcctctagtcaattataattatcatatgaatgctagtaaattaaatgttaaaaactctaattaacatacatatgaaattgccacctgtgtgatttaaaacttttaaaaattgtaagtatcacatataactagcatatacatgatttaaacttgttgaaacctctaataatcgtgcgtaattaacatatgccatacatcaattgatttatatggataatcaatacatccaaaatagtttacatcgtgtacacaataattacggcacgtactttctcctcactattgttccctccttgtgatcgctgcgtgagtaaggggtgtcttcatttgataggaggatgctagggtcaatcgtcaccgtgaaagggggttgcccatccaactgatcgtaatcctcgtcggtcttgtcctcaactccgacgatttttattttgcctgggagaaccacttgacgcttaggctcatcaggccctctgcccttctttcctttgctagacatgtccttcacgaaaaagacttgcgttacatcattggcaaggacaaaaggttcgtccgagtatccaaccttgttaaggtcaacagttgtcatcccactgtcatcaatcattacgcctccaccagtcaacctaacccattggcaccggaacagaggaaccttgagaggaccatagtcaagttcccatatgtcctcgatggcaccgtaatacgtggcagttgttccatcgtgtcccatggcatcgacacgaacagcgctgttgtggttcgtgctcttcatgtcttgggctctcgtgtagaatgtgtacccattgatctcatatccctggaatgtcgcgatcgacccagacggtcccctcgccaggaaggcaagttgttggttgatcgactcgttacccatgagatgttgtcgtagccacgcggggaaagtatcaatgtgatgccgtgtaatccatacatcggacttaccgatgttcctggcgtgaactagagccaagtgctcctcgatgtaaggagctaccaatgaagtgtgttgcagaacagtgaaatgggctttacggaataaattgttgtctaccgtcgttattgctttccttccgagagttccctttccccgtagtctcccttcatggcgtgattcaggtaccccgattgggcgaaggtcttcgataaattctacgcaaaattcgatgacctcctctgttccataacccttggcgatgcttgcctctggacgagcacggttacgaacatacttcttcagaacgcccatgtacctctcgaaaggaaacatgttgtgtaggtacataggcccgagaat

SEQ ID NO: 12558 - DNA, 501 bp, Oryza sativa
actatagggcgaattcgagctcggtacccagcaccagatcagggcacatggttgcttacgtgagaccgaatcaagagcaacctcacggtggcccttctccatggtattgtgcaagtgatacaaacatcagacaagtatctctagaagaagttctcaagtgcgaggcctcccttttcttctacgagaggattggaggctaacgtccaaggaagtaaattggttagattagcaaacattctttggatggacaaagatccattcagtagacgtcatgatcaagtccaattttgttgctttggctgagtcattgtaggactgcaaatagatcgcattcataatctcctttttgttcatgaggaacgtacttcttttcctggaataagaatgaaggaataggacatgtgccatttgtaaatgagcaggactgtactaatgattgataatgctttacaataggtctaaaatacagaacgatattacttgatatatcttgagctttag

SEQ ID NO: 12559 - DNA, 1090 bp, Oryza sativa
ctcggcctgctgtttgttgccccagaggaggacaacatggagacgatcgtcgcgcaggatgcgcttgtaatcacgtggaactcgtcgccagacaccgcagatcttgcccgtggcattctgatagacactgagagtgcccgccaaggtggtctccagttgatgctcctccaggattacacccgcatcatcaacgaattgaatggcacgcggacgaccgattcgcgatgaggtgtagaaggagtagtatagattcttcttgtggaacaagaaacgggcggtggccaccacattctgcggattgtaggtggtgtacatggacttcatttcctcacccttgaggaaataggaggtgcggcccgttagcaacgcagcgtaatctataaatagggatcaaatgaaaggtggagataatccaggtgttagataaatacaatagttctctcgttaattaaatgtaggagctggtaatgggattacaatttcccgcaagatttggcggattctattggaatctgggtgggtgtccggtacttttgtactaacgtttcatgttgcgctcttcctcttcattgggcacgggcacatccaaggctacatccgtatctgaaagatggagggaatacaaatagagaataagatgatgctgggcgataaggtcgaccttaaatggatttaatacagcaacaaatgcttcagcaaaaaaccacccgaaccgccgccagccattcaccatccatccagccagccatccagccagccatccagccagccaaccaactatccatccacaatttgtggacacaattccggcattcaaccaaaattccagttgaatgggtgaatggtgaatggctgaatggacgaatgccaggggatcatcatgaatggcaatgcaactatcaggtagagatcccacctccgaactaagaccttccatttccacctctcgcttccacccaggtggcattcattaatcgtgcataaattgagggcaggtagaaggtagagtttctcgaacgggaagtctaacctacatctaactagggaagtgctttgtatttgaggatgtgcggactctggggttctgaat

SEQ ID NO: 12560 - DNA, 601 bp, Oryza sativa
aagctgcaccatcgcagctgccacagtgtgcatagaggcccaacacaggttggcctttgaacggctgtacggaaaaggttctttcccatgcaaagctaaagtgcctaaagaactgaagaaggcctgctaccgtcaagggatttggagcagcgaggaaggggcctggactcccgacgttcttttaatgataatggagaaaggcggtatcctcacgcaacgagtaccgaataacatccagcttgcaattgatggatttttttggctagagagaaatgtagcttttggaaaacttgagtttatgcgcctgctgtatgcctatggtcctcttctcagcaccctttggacagatgatggttatgcacaaacgtttggagaccgtgtctacagagggctacaaaaggatccagattcgggggaccatcattgcgttgtctgttttgcataccgggttgacagcaggacaaatgagctctacgttagaattatggacaattgtgcagatgatggacctatcagatgggtattatttgatgtgttcgatagcttctacgttccactgataaaaaaatcctatagagcctcatgaactacggagaaagaa

SEQ ID NO: 12561 - DNA, 666 bp, Oryza sativa
agcggtgtggtgttactcttgtagaatgctcgcaggtcggctagaaatggtcatgagctttctttgaacattgctctgaaagcgggaacgctttctcataaagagtaacagaacgaccgtgtagtgcgactgaagctcgcaataccataagccgtttttgctcacggatatcagaccagtcaacaagtacaatgggcatcgtattgcccgaacagataaagctagcatgccaacggtatacagcgagtcgctctttgtggaggtgacgattacctaacaatcggtcgattcgtttgatgttatgttttgttctcgctttggttggcaggttacggccaagttcggtaagagtgagagttttacagtcaagtaaggcgtggcaagccaacgttaagctgttgagtcgttttaagtgtaattcggggcagaattggtaaagagagtcgtgtaaaatatcgagttcgcacattttgttgtctgattattgatttttggcgaaaccatttgatcatatgacaagatgtgtatctaccttaacttaatgattttgataaaaatcattaggggattcatcagtgcttagcctaaatacaccaacatggccaatgtcacactcttattatccagattaccaaaatcatttcttgaattttatggcatgccagc

SEQ ID NO: 12562 - DNA, 604 bp, Oryza sativa
cagtgcaaaaccatcggtgaacacggccttcctgaaattctcctcgacggcaaagaaatcgatgcacttgttcttcagctccgggcagttgtacatctcggcgcaaaccaagatcgcggcgaccgaatccggcgtcatgttgtccagcaacctctgtccgcacatgatctttagcctgtccagcgcgtacctgtcggccatggcgagcaggtgcttgaagaacacgttcgtcgacgaggagccctgatggagtttgccggcgtctgcaggcaactcgtccgtgtagatgaatcggagcagagctctgaatatcgccggctcgattccctgcagcgtaatgcacgacgacgacggcgaggtggattcggacttgcagccaaagagctccgtcctgaacaccggcgaccgggcggcgagcacggcacggtgagcggcgaacctctcgccgccgccgccgacgacgacgaaggtgacatccgcaccatcctcgctgtccagcaggccgccgagatggaccccgatgttcggcggcggcagcggcaataagccgccgtcgagatggccgccggtgacccccggcgacggcagcggcacacggttgccg

SEQ ID NO: 12563 - DNA, 575 bp, Oryza sativa
ccgtgcgtattgggtaaaaccattttgcaatatataagtgtgttcacagaattcctttggataaaatttggagcaccttccttcagacatgcatggtgaataggaaattccaggaccgcaaggcccatggatcataaaagaagtaacagcttcaaatcctattggatcaagtgtaggatttggtagttgagctgaaatacgtaggtcaaccttttcagcatctagaggttcttcttttgaaagccaaatgattatatggacatgtggtagtccacgcttttgaaattctacagtgtagacaactgtacaaaagggttaactattatatggatttgatgaacaatatatgtatctaagaattttgattgaaagttgttttggaaattacctgcatgtatgggaccaaaaaaaatatttttttaatgtcatccattaacatattcagcttcattttgaacacacggtcaacgatatctggacgatcttgaagttggtgtccaggtgctagagcttgtagaatttttggccaagatgcatttgatgtgaatgtgacaaaaagatctgggcaaccatac

SEQ ID NO: 12564 - DNA, 555 bp, Oryza sativa
atattgaatttgtaatccacctccagaacccatattgaatttgttaacttctgcgagctccctttcaaatcatttcttgcagcatattcatcgatacaattccatgtttgctatgacttcaatgggggctaaaatcattgaatccatcaacgacggccatggaccatatgtcttcaaaattagtggatagatctgccacagagtaggctctttaataccttcacaaggtcgtcggccagaatatgctcagctatacatcttcgatacagaaaatgaaatctctaacataatcaacattgcttcttcttctcgcgactccttccatgccaatgaagaaattgttcgctctctaatagaaatgttcgatacacacaatcccattgtgaagttattccgaacagcaagagaaagattaagtgaaaatgaatctgatcattacaagatccgactatttggctcgacagatgcacatggagatatatacagtgcaccagttgcagcagaggttgtaggattagttgttggggatattggggtgactgatattggtcggga

SEQ ID NO: 12565 - DNA, 3728 bp, Oryza sativa
agtatgattaagaatgtcagccttttttgctgcatctgtttatgtttctgtttaattatgtttgtacgatttaatagcatgctgatgggaaaaaaaaagtaactctttcgaattcaacttgtgttgtgttacataactgaagaatttgttgtgttacataactgaagaatttgttgcaaacatgttcttgttgagtttatctgtatgcagtcccccccccccctctctcttgtaaatagtagattgctttacattcatttacaggaacagaacacctccagttgtgcatacctacttctgcatgcctatttcatcacaatgatcacattacctacgcatcctatatctgagatcctaatagctgaaacaattgtaactggttatttactctgttgatcaaattatggatcccatttcaatagttaatatatgcgcattattgtgtttctactctcactatgcaggacaccaaaactgaacaataaactacagaaacgtaccctcggatcaactccataagctgaggttgcatctcctcgtctcttagaacttcaatcctcgctgatattgactgaactgtgtgtattgacaccttcatccgagtatgtaaacttctcaatgctgcacgggtcttatcgacggaggaaggctcgtcgcctttcacatcctggttcctcaaatggttcagccttttctcatagtcaattcttaatcgttcgcctgcctacaagtgacaaaaacaaagcatgattcccactactcacttctattgatcttctggtattagttcctggtggagattgtacctttacttctttgtataatttcttctcccatgtatacagtctatctagagtggagtgatgacttccagacattgtactgcaggattcttcagagtaacagctgtttgtctcattgtcatagaggtcctctattgagcttgtgggagcaagaaggaagcgggaagacgatgaccgggatgatgcagaccgcaataatgcgactgggtttagcatctttgctgcattattaaattcattagtaagtcgagtgagttagatctgaaatagttttaagtaattccagtattggtttgtaaaattagtaccagaaagatcgtttgaggttgagtattgagctctacttgcctccaacatcactgagatttcctttgcagcatcgcagatccccaagaactgactgtcaatatccttcatggcttcagccagacttgctggtctgcggttcagatacactgtgaaaccaggtgtttcttctgcatttgctactttgttcctcatcagttctttcttatgcgccttgatctcaagttctactttgttacgcggttcacactgaactcctttggattcaaagccctttgtttcctgcttgccattgacctcagtcttcacagggcaagcacccccattagaaggcatacatctctcatctgaatgatcacattcatcgtcgccatcatcgtcatcgtcatcgtcatcatcgtcgtcatcatcagaatcatcattgtcatcgtcatccacttgttcctctttctggtgcacctgttcatgttgttgacactcatcatcttcttcttcaagttccgggattccttcctcctctcttacacgctgtaatcgtgccaattcatcgtcggtgaccacattgtcatagctactccgaggtcgcggatacgcaaagctgtccagcgatgagaatgggttccagaagaagtcccactgtgatgattcctgctcctgaggcgacggaggtgggtagcttggcctatcatacgacgcgtaataagaagtccttgttggctcctggggtgatgcagctggatagcttggcctgtcataggacatgtaataagagttcctcactggctcctggggtgatggaggtggataatttggcctgtcataaggtggtgtgtagtaagaagatggcctcattggcgaggattgcgctgcgaagaacctgtccatgccaccaaagttatctgtggggtaatgtgactcaatacggattgtttccacgggtctcggttgctcttcaactgataccgatgggtttggtcctgacctcaggtactttgagacatgaattgtcctcttctcatatgaaccataagggaggccaagcagctctggcttctgttgcttcaagggagaaatgaaggggtcaaatatgagctcatggtgatcatccccagcaacgaaccactggagcgccatcgagacgcgcctcaaggactcaatgtaggcaaagtgagacgacgcgaagcggttccgctgctccagcgcctgcttgatgaagtccctcctgtcccggcacatcttgacagcctcctcatcttctaacctggaagcagcacatcccatgtctccaaagcctttgtgtagtttcaactttcaagaacccgtcatgcttggatcagaacttctgagttcaacatgtggaaaaacattggagaaggaaaatgtaacaggtcagttctgacttgaagaaaccaggtatttgagtcatgtaacattgcagaaattacctaatactgtacaagaatcgacatttggtgatgagcacattccaagcaagaagatgacctgaatcaaccctgctgtctgacaagtttcccaaagttcagaagctgcagaaacaatgcagaatgattatatgcaatcaaatcatgcagcaaaagggagcttaggcataagctaatgaagtgcaacagcagtcatgaatgttgaaactggttgaatacaaccacaaaaactggccactcagaagccacaggcaacaactgcaagctactgaaaaccaaacagagcatgagatgcatctatttatctggaaacctgaaatatctttacaaagaaaggggagtgaaagctacaaggctacagaaagatgctcctttgcaggtgaaataccccactgcaaatacgctacactacacatttgttcggtagcaccagcattctttttctcccaaaagagggctgagaaggcaagagagtgaggaatattaatccttggccctactaccttcaacttgcagtaagtgaacggacttgacaactaaactaaattcagttcagtacacagtatggagtgtgagtgtgtgaggctagtgctatgaacacacaccaggggttgtactgcattggacttccaaagtcacactttttttcagggtaaaacagtacagacagaatcatctttactgtcttcaagttacagaagaaacgaatgatttagttctgaagatttaacagtaaaataagtgcaggattctaaatttcagaacagatggaccatgctagacactcttctgctgtataagcaaggaatcaggcagaagtaaaaaataataatcttgtgatgtaaaaactacaggccaaagacaaagctcaggtgatgattatgggtaataataagtaacagctcttgtctcatagtgcccccaaaagaaaaaaacaagtcttggacttagctccaagcctccaatttaatgtcaaattatcttgctacaacggacaaatcaaatggtagacaaacgcgacccgtgagcttacagacgaattctcactctaaaatattcagaatcgtggttctccttgcagaaaaaaatttaaaaaaacattcagaatccctgatgaaacagatgaccaaaatcttggagcaaatatatgaacaggcaatgtactgaataaaaccaa

SEQ ID NO: 12566 - DNA, 609 bp, Oryza sativa
ccacatgttcgacgtcgaggcgcgcgccgccgccgccgagatcttcgccgagcaccgccgcatccgcacgcagcttctcgccaccagccaccgctacagggcattcatcctctcctgcctcgtcaccatcaccgtcagccagctcggcgccctcgtcgtcgccctctcctccaaggacggcaagagcttcgccaactccggcgacctcctggtaacaccacacagccactccgccgccgccgcaggcgtagcaatcacgacacgatgcttataccctcgccgtctcgcaggtcggctcgtcggtgcagctcagcggcttcttcatgtgcctcttcggcgcggcgaggatcacgcacagagcgcaaaggatcgtgtccatcgcgagccagtggcacatgagcatggaggccgtggcgcaccacgccaagtcggcgccattgccggcggcgcccagctcgtcggccagcgacgtggacgcgccgcaccaacccgagctcgggacgacgacgacggcggcgtgcgcctacagaagcagacacgccctcggtaacaccagatgaaccccactcgcgccattttttttctgagaataaattcactcggtcgcgc

SEQ ID NO: 12567 - DNA, 547 bp, Oryza sativa
aaaacccaaggcgtatatgattctatatgggtagtagtggatcgactaaccaaggtagcacggttcattcccgtaaagaccacctatgaagggaccaaactagccgagctctacttcgctaggatcgtgagtctccatggcgttcccaagaaaatcgtatctgataggggaagccaattcacctctcacttttggaagaagctccaagaagagctgggtacccgattaaacttcagcaccgcgtatcacccgcagacagatggacagaccgagcgtctaaatcagatcctggaagatatgcttcgcgcatgtgtcctagatttcgggaagacctgggataagagtctcccctatgctgagttctcctacaataacagctatcaagccagcatacaaatggcaccttatgaagcgttgtatgggcgcaaatgccggacaccgcttttgtgggaccaagttggggaaagccaagtgttcgggactgacatcctgagagaagctgaagctaaagtcagaaccattcgggataatctaaaggtggcacagt

SEQ ID NO: 12568 - DNA, 783 bp, Oryza sativa
aggccggcggtgtagatgacgatgcccatcaacggtggtgtgaccaaccgaccgtataggcgaggacaccagtcggcggcgacggaggcaggccggtggtgaagtcgtagacgcccaacagcggcggcataataggccagccgtgtaggcggaggcaccagtcggcggcgacggaggcaggccggcggtgaagtcgtggacgcccatgaacggtggtgtgaccaaccaaccgtataggcgaggacaccagtcggcggcgacggaggaaggccggcggtgaagtcgtagacgcccaacagcggcggcataataggccagccgtgtaggcggaggcatcaatcggcggcgacggagtcaggccggcggtgaagacgtagacgcccaacagcagcggcataataggccagccgtgtaggcggaggcaccaatcggcggcgacggatacaggccggcggtgaagtcgtagacgcccaacagcggcggcataataggccagccgtgtaggcggaggcaccactcggcggcgacggaggcaggccggcggtgaagtcgtagacgcccaacagcggcggcataataggccagccgtgtaggcggaggcaccactcggcggcgacggaggcaggccggcggtgaagtcatagacgcccaatagcggcggcataataggccagccgtgtaggcgaaggcaccaatcggcggcgacggatgcaggccggtggtgaagacgtagacgcccaacagcagcggcataatatgccagccgtgtaggcggaggcacca

SEQ ID NO: 12569 - DNA, 5532 bp, Oryza sativa
tgttgggcgcctacgtcttcaccgaccggctcgcctacttcgccgccgactggtgtccacgcctgcacggctggcctattatgccgccgctgttgggcgcctacgtcttcaccgaccggctcgcctttgccgccgccgactggtgtttccgcctgcacggctggcctttatgccgccgttgttgggcgtctacgtcttcaccgaccggcttgccttcgccgctgccgattggtgcttccgcctgcacagctggcctattatgccgccgctgttgggcgcctacgtcttcaccgaccggctcgcctttgccgccgctgactggtgtttccgcctgcacggctggcctattatgccgccattgttgggcgcctacgtcttcaccgaccggctcgccttcgtcgccgccgaccggtgtcctcgcctgcacggctggcctattatgccgccgttgttgggcgcctacgtcttcaccgaccggctcgcctacttcgccgccgactggtgtccacgcctgcacggctggcctattatgccgccgctgttgggcgcctacgtcttcaccgaccggctcgcctttgccgccgccgactggtgtttccgcctgcacggctggcctttatgccgccgttgttgggcgtctacgtcttcaccgaccggcttgccttcgccgctgccgattggtgcttccgcctgcacagctggcctattatgccgccgctgttgggcgcctacgtcttcaccgaccggctcgcctttgccgccgccgactggtgtttccgcctgcacggctggcctattatgccgccattgttgggcgcctacgtcttcaccgaccggctcgccttcgtcgccgccgaccggtgtccacgcctgcacggctggcctattatgccgccgttgttgggcgcctacgtcttcaccgatcggctcgccttcgccgccgccgactggtgtttccgcctgcacggctggggcgcgtcttcaccgaccggcttgccttcgccgctaccgattggtgcttccgcctgcacggcagacttattatgctgccgttgttgggcgtctacgtcttcaccgaccggccgccgcatccgcagctgactggtgtcaccgcctgcacggctggcctgttataacgccaactgatgctaccttcttcacggctggctacatcgctgtcactactaataggcatcagtatcttcaacacaagctgcctacgtttgccatggctgccgactggtttcttcacttccatggctgcatgattctgccagtgttgattggccttatcttcttcaccgccggtcgtctcgtctgctgctgactagtgccctcacctcaacgtctggtttatacagctaccactactgatggacatcatcgtcttccgttgccgactggttatgccgccgccgactagtgcttttatcttcacaactgcgcgtcttcgctaccagtttgcttctgttgccgccgactcgtgttcacttcatcacggcgatgcaactttgtcatcatggtggagcgacttcatctttattatcttcggcactggcaaactctattgctgctacttcgcaagttttactacttcaccaaccacgacgtctttgtgaacctcgacatctcggcatgcaatgccatgatattttactacaacaagtgactctccaatattcaggatttctacttggacaccttcaacacatatcttcaatcaagcaatgactactcgacgacaagaagctataattctcgactctatgttcagttgtttcccaactaaccaaagagtcgggggctacacaaatataaggctcaaaatttgacaaattttatgtcaagctgaagaaatcaattaatcagccaatgagtcaactccaggagtcattatcttcatctttgcttcggaacagacattctacttcaacaacttcaaatatttcggtttagacgagttgggcaacaacatcaactctcctccaattatttgtcttcacggttggcctactacgcaactgccgatagaggatctcatcgttatcatcggctgctacatcgctattgactggatcaccgacatcgtcatcttcatcaacatcttgtcaagcctcatcaacatagccaactctgctgctgttgatgggaaacttcgtcatcatagtcggctatctctgttgccgctaatcatcattaccgttggatgcgtttgtcaccgccgattattttcttcatcttcatgattggtggatttcgccatcaccgttgatgcgcgtctacgtcttcatcgtcggtttgcttttgtcaccaccgactgttctttcgttgttgttgggcgcctacatcttcactgctagctgacctgactgttgccgactggtttcttcacctccatggttatgcaacttcattacatttgattggtggtatctttactaccattgacatcttccgttacttccgatgagcaatttcgtcttcatgttggtcatttcatctccatgccgactgcgtcagttattgccaatagacaattttgactatgacagaaggacaagctatatgctcaggggctcatcaactcaagcgtgaggattatatctccaatttggacttgttccggatacattccacatggattcatagtcatgagtctattttctatgttcaaagactggaccaattattattccccgtaaaggttatcaaccgaatacttgcgccagtcgggattcaattattatatttattttggagtatcccataagggataatcattcagatcagaagctattcatatgagctacacttggtctatattactcggaagatttattactcgggagcatgttatatgcgtcatcctttaaagggtgtcgaaggcatattttttggcctaggcctaatatgtctgcagcccatattttcaggtgtggcctgtcacgttcttttagggacttaggcactttttgcttaggccaaagtgcgcgtgatcaagtgcccaataccttaaaatccttttataccgcagttactcaactttttaggagttggtacaatgcatcttaaaaggtgtcaaacagtaaagctttatatagctgccccgctgactttttaatatagtcatggtgctgtttgggtttttaagcaattgattggatacaatatcgttgcttttcgccacgtaagtgtgcatttttattgaccaatattatggcttaggctgattatatattgtggtcattttctaggcggttggtaaatcctttatgagtttatttactcggattttacaccacatatgccatatatttccaggtgtggtgaaaccatgtgtcttctagggacttaagcacatctgttaaagcagtgtgcgcatggcgtatgcccaatactttggaaatttctttattcacaatatacaagcttctttatagctattttgctatatcactcatcatattttacaaagcagttggtatatcactcggatcatgttatttggaggattcacaccgcatatgctatatattgatatcaagtcacttggttgattacgattatcaaaaccactcggttggttggattatttattccttgactatatgcttggtttgttcacttaaccgcatagtcgagggctacacctattaggtgcatctagtcgatgcacctgactttatttttcagccctccacagtcttcagatttggtaaaagtactcgggagaccatggcaaagatgattgaagtactcggctttggagtaatctggttcgagagaagattatcttttcgactgtgaaggtctcaggggctactgtggagattatgggtaccccatacccacacggcatggttatccgactagttatagaggataacttatatgtatggaatatgtaacagatcatgacttgggtattacgtttccctgtatattatggaacggcctaaagtcctggtttgataagattgtaaagtagatttaggaaaccgataccatattggttaaggtttctatcttgtaaccctgccccccaacctatataaggagggcagggagcccctctaggggcatgagacaacctgatcgtcagatcaatacacactcggcggattcaaatccccaaacaggagtagggtattacctctcattgagagggcctgaacctgtctaaatcctttgtctccgcatccatccacttttaggtctcgtgcgctaccccgttttattattgccgaaatcatgtttcgacacaacggctgggctgcccctgcctggtgcgctcgattcgctcgacctgcactgcactatacgtacgtacgtactgcaccggaaatgtatacgtactcgatactcccatgtacagtatgtacgtggtgcacatcttgtatagttgtgggctctccttttgttctaaaatataatcatatcattttaggtaaatatcattttaggtaaatagctgatacagttcctggagtttcgctttagactcaatttagtcttttgggtttcaaatcgtctaaacaagtcctccaaattagttatttgggttaatatggtctttggaaccgcaaaaaatgccacgtgagcatgcaagtcatcatcgcatatagtggtatagatgaaatggccattctacccttatataccatatacttcatccatttcatattacaagactttctagcattactcacattcattgttaatgaatctagacatatatgtgtgcctatattcattaacatctatatgaatatgggtaatgctagaaagtcttataacctgaaacggatgtagtacaaatgaaagaaaaaaaagaagataaatggttcacatgtgtatgatcgtttcagaattgccacttacgattgctgcagccaagcactgatcgcgtaaattcctttgtcggccacctatccgcaacaatgctgggcctgggctggcatgttattttttttgtttgtcttttccttcttttctatatggtatataagggtagaatgatcatttcattcataccgctgcatgcgaggatgacttggtatgctcacatggtattttttgggtccaaggactatattaatggttaatttggaggacttgtttggacgatttgaaacatcgagaactaaactgagcccgaagcgaaactccagagactatattggctattcaccaaatcatttttagaatagcgtctagtcaaacattttaaactttgaatattatagtaaaaaaataaaaaaaatcaatcatgtaaaattggtattacaatatttatcattaaacaaactatcataatataactctttttatttaaaacatcttacttttagatatattattggtcaaactagcatttcaaagattatgtcaaaacaaatactcgctccgtcccaaaatataaacattttttaacttcgacacgatctttgggatgctactttgaccaacaaaatctataaaagtaatatgtattaaataaaaaaagttgcatattactccctccgtttcaaa

SEQ ID NO: 12570 - DNA, 10997 bp, Oryza sativa
gccgccaccggcaccggcggccggccaggtgtacggtacgtgaggtgtttggtgttttgtctccggcgacagccagccgccggccactgcgagcgtgacgcgtgtccatatcccacagcatctccgtacacatacggggtgacgtcatccacagctagcgcacccggtaccggtagtactaccgccgcgcgtacgtcgagccaaataaaaacgagaggtggtcccgtggatcggatccgggccgtcgatcgcgccatcgacggtgtcacgtggatcttccaatcctactactagtatagtacgtgtcgtgtctgcgtgctgctggatgttttcctactttcctttggtccaatcgctatccaattcagcatccagctagcagcttagcttttgcaacgacaaggtattatttcgtcaacttgtgtgcacgtttgtagctatagctttgggctcaatcgatcacgacgtactctactacactttacataaggtggccaaagagagtggtactgctacaccaaagtgcagctatagctattttttgctgctgttggccatgtttgtatgcagggatgatttcagtaggaaaaaaagttcacttcttgtagtagttcaacatagctagaaatgctctcacatttcgtagatggggcctagatgatgcttggagcctacatttcataggtagagaagagagaagattaaaaaaaagaaaaaagtatatattttttttgaaattttaaggtagagataattaagaaaagataaaactagagagaaaaagatgttttttaatttttttttcctatttgactgacatgtagattcttatgacacatactcactccgtccaaaaaaaaactaaacctaggagggggacaatgaatctggactaccctttgtccagattcgttgtccttaaactaggaaggatcaaattccctcctaggttgagttttttttggacggagagagtatgtgtcaccgtggcatgtcacatcagcgcacggagtgagatggagcctgtttgaacatgtatgatatccaagaaaagtttcgggatacggatatgcattttaagatttcatggatctaaacgtaaaagtttagaaacagttcatatacttcactcgagatcagattcatttggtgctacctaattaattaggctgagtagtgcagctgggcattatatatgatctctgcaccaagaaaagtactgggtagctacatatggggttatggtttgtccttaacgaattaattagttcgagaaaccgagtaactgatcagtgcgtacatctctgatatatgcaggttagttattaacctagtttcaattcattaaggacaaaccattcatgcaattacatttgctgggtttgtacactgtactcacatgcaacaagatatgccaagagctagggagtactacagtactcattagtgatcgctagctaggtagagaccatgcattcttgcatcaaaccaccattcttgcaattacatgcatgctcaatcatcaaaccatactaccaacaacccaacaagaaggacgaagagatgattaactaattaattgattaacccttttctgaaaggccggggtccagtcaccgatcatcagatgacacacacacacacacacacatatatactactacagtagctgtagcaactagcaaagcaagtggaacagagatgaatctttctgaaaagggtcattcgatcacctcgtcatctagctagcttagctacctcagctactgagtgactgaaagtgacgtcgtagccatcgatcgctcgctcgccggcgatcgacgacggcgagatctaccgtcggcgtccgtcgccaagcttgcggtggtcgtcgacgacgacgacggcgacggcgacgttgatggtggcacatgggcatcgaccgatcgatcgctttcacggcggcgccggcgactattcaacgcggaattgaaacataataatgcatcggagcagatgagatcagaacgagatcgcagcaatagcaacaatctgacggcgtccttgatggctctgttcccccgatcgatttgctcctcctttttggttttttttgcccaatcgttggatcgatcgatcgatcctcatcaatgacgatatgctcatgcatggaccacgacaagggcctagctaccctagctatagctatagctactgttttattgagcggaattcgcaatcagtaaaagctagcagcggagatagctcaatgcgataattggattgatttgtcaaagtgaggcagtacatgtaaacacggctctttacaatatccactcaattaatgggtcgatcgatttcttagaaatagaatctactccctccctctaaaaaagacaaaccctgaatttccatgctcaacgtttgactgtccatcttatatgaaattttttacaattagtattttcatgattaatactttatgcgtgacttatctttttaattttttataatttttttaaataagacggacgatcaaacattaaacacggaaatctagggtttgttttttttaacagagaaagtagataagtacataccacatactacctttattcgagaatataagagattttgcctacgtgattaattgcattagcaaaatcccttatgttttctgacaaagatagtagtacgaaaccaccatatccatctcgcgatctgtgctgccgctgtggaaaccgatcgatcgacaaagagtcgtttttataagtcgtgattgcaactgatgatcatgaatataggcaattagcaaaagctcatttatcggtttataaatgagagatcgacctgacgaactcaattaaagtagagagattaaattacgagctacggctcatcatcgatcatgcagtagctaagacggccaccagccgccggcgatcgtcgtcgtcgtcgcccggcgacattaactgctcccgggcgtctactgttcctgtgttgcgtggccgcatccaacaccatggatggatgggtgtttcgctggagggagggagggagagagctaggagtactaactccataaaaaagaaaaaaaatttatagcatcccaagataaatttagtgagaggtaaaaataaccaaaataaccctcatcaatggaaaatatagtaatgatgataggtaagtaaaggatatttaagggataaaacttctcattttatgtgttgaaacctgaaggtatgtagggtgatagaagttggttttccgcgggataaaatttaaactctataaggtcccatttgtttctccaacaaaagttggatgaagattaagatttttcgtgacatgcttttcaaactgctaaacggtgtgtttcgtgcgaaaactttccatatgaaagttgttctaaaatatcatattaatctattttttcaagtttataataattaaaaatcaattaatcgtacgttaataccatctcattttacgtaaaaaacttaatttcatcttcaggagaaaagaacaccacctaaattgagttttttttttatttagggagtagctagctagctaccaaggtagggctactgtgccgggaaaacgatgcttcactcggtcactttcgtgaccacgtcccagaacgccgcaagcacaagctaagctatgatccactagccaagcttcaattaatgttctgggttgttcagctagctgtcgaatgcgatgacgatttttacctcctttcgtaccaaaataactacgataaaaaatattattattttttcgtttaaatcgttctagaaaatacaatgcacacacctaatatgattagatattttgaggataaaggatttaaagaaaaaagatggttatgtcttatatttgatagggagggttgtatctacatactaagagattgggcgttttactgatatttgtattatactgaaaagagaaaatatctcaagtctaaattttacttgcttattattttttgaaaaaataattaaaatacttgaaatatgttaatattatcaaggtgcgcggcgtcacatatatgactttcactcatccaatataatcatttatagtagtatgtggtcaaaaagtgggacagccatagttaattaaaagtggtagttaaagaacgaaggaagtattaagggcctgtttagatcctccaaaatataaaagttttgcagttttggaccattttttggcaaaatgaatctaaacactagtagcaaaaaataggcaagttggcatttgtcatttgggagtacatagcagcaaatttggccaaaaaagcatagggccccgtgtatgagagaggcaccagcaattaatggtaaaactttaccatgcatctaaacgccaaccaacttgtaaaattacaatgccaaatcttttgccaccaaaacttttgccaaaaaaaatttgccgcatcaaattgatctaaacaggccctatgttgtattttattggaatccgtaccacacgtatactttcttagccttagaataaattcatttttggctcctttcgtttattctaaaataagtttatttttcagtaattattatatcggagttgataaaagtataaaggaaaatacattgagagtaaataaagtggaataattacattagtatttgataatgtgggtgtattctagtttcttttatttgtatggtttatgtggaattggctaaaaagtaaagttattttgagatgaagggagaactcaaaataaatataactaaagagcgtaggtgcacatatattcacttcgttgcaaattgatattccgtatgaaaaggagcatcccaaggtttttataggagcgaattttaaattaggttattatattgaatttatcccttttattcttaatgtgtgagttaaatttaggcttaatttctctctgattttatagactgtcatacatatgttgtatgaatatttgcaacttattcttaaaaaaacataactatttggataatgtttgaggaaacaagaggacatcctctttgagagtttacaagtgtgttttcccattgtaaaactgcccaaaacccctacattatgctgtaggactagtaggtgtgtttgggtacttaatttggtgtggtctaattaattacacgctctagggaagttaattgttatggtgagctagctagctcattaattgtctcgtaacaaatcaatgtgccattgttgaggaagaaaagcaaacagtacctgcagcaagcaaaaccgatcgatatgtgtcctggttttccacactgaccagtacacattttcagttgcctccttgcttgggaagaaattaactactgttcctactatctgacatatatatataaggacagctgatttttcaacaagtgtgaattcaccgcgcaatcaatagatgtgttctaatcctactacgggtgtgtttagttcatgctaaaattgaaaatttgattgaaattagaacaatgtgatggaaaagttggaagtttttgtgtgtagggaagttttgatgtgatgaaaaagttgtaagttgaaagtttgaagaaaaagtttggaagtaaacaaggcctaattaacatgataacatcggacttttcaggcaatcaggctacaggagcaggaagacatctgcaggtatacgtatgttgcttcccgtggatattattagtagctgaatcctatgaaaaaaatatgataagcgactaacattaggaacgatctcatggtagaggggcgggactagaatttaatttctcaaacctatagctggtgtactattatagtttacacataattgtatatttaattatcttcaagcttttgaagtgtacagtataattcaatgggtgtttaggctgtgtttagttcacactgaagtttaaaagtttagttgaaattggtacgatgtgatagaaaagttgtgtgtgtatgaaaggtttggtgttatggaaagttaaagtttagaaaaaaaaaactttaaaactaaacagggcctaattaggttcatgatcgagtaggactacttacggcgcccttaactgtcttattagctaggttaagctaattacgttccgttgtagcagataaagagaagaaatctctcgtgtgttatccacatcttatggagaggcgaacatgggaaacaaaaatcatggtggctcacatgatgacgcggatttcaggtcaagtatacgtactagtatcgatgacgttgtacgtgtacacacaatacaatatatcataagggtagagtttacgtacgtgtatttatataggtgagtgtgtacattgtgagtgtctgcgttgtactgtgtattttttttaaaaaaaattggtgtatgtcacattctcttttagtttttttttttaacggaggagaacaacgccgtaatacgcacctggtccattgtgtatagtacacgatcgacgacgtggcatgcagggaccgcgtgtgcgtgcgtacgtacgtcgcatgtggtggctggcgtccgtccgtgcgtgtctgtctcgaccgcccgcgcgcgcgtggtccacgtgcggtgcggacggcgcagcatcggtcggtcggtcgatcggtccgtccgtacacgtgtgggtggtggtggtgctggtccagtgaacgaaccagttgggctggacctggtggaccagatcgagcgcctgtcactttgtctggctctgccacgacacaacgtgtggagattatgggtaccccatacccacacggcatggttatccgactagttatagaggataacttatatgtatggaatatgtaacagatcatgacttgggtattacgtttccctgtatattatggaacggcctaaagtcctggtttgataagattgtagagtagatttaggaaaccgataccatattggttaaggtttctatcttgtaaccctgccccctaacctatataaggagggcagggagcccctctaggggcatgagacaacctgatcgtcagatcaatacacactcggcggattcaaatccccaaacaggagtagggtattacctctcattgagagggcctgaacctgtctaaatcctttgtctccgcatccatccacttttaggtctcgtgcgctaccccgttttattattgccgaaatcatgtttcgacagttggcgcgccaggtaggggttgcgtcgagtttcctatcaacgagcgcgatggaatcaatttcatgagtcgccgacttcgttttcgctttgggagttttcacttcctttccgtcgaccacttcttcaagctcctcttctctgacttgatccaaatcagtcagggggaaactcaatctgatttttatcattatttatcatattgatttttaatctcagattaacctcttgctattttttgttgttgttcgcatataattacgcggcactattgaggcgattgatgctggtcatggactcgaggcgtctcagctttccggtcgatcggccgcgagtccactctgccggcttgtcttcgccaccgccattgctgataacaacaacgacttcaccaccggcctgcctccgtcgccgccgattggtgtctccgcctacacggctggcctattatgccgccgctgttgggcgtctacgacttcaccgccggcctgcctccgtcgccgccgactggtgtctccgcctacacggctggcctattatgccgccgctgttgggcgtctacgacttcaccgccggcctgcctccgtcgccgccgagtggtgcctccgcctacacggctggcctattatgccgccgctgttgggcgtctacgacttcaccgccggcctgcctccgtcgccgccgagtggtgcctccgcctacacggctggcctattatgccgctgctgttgggcgtctacgtcttcaccaccggcctgcctccgtcgccgccgattggtgccttcgcctacacggctggcctattatgccgccgctgttgggcgtctatgacttcaccaccggcctgcctccgtcgccgccgactggtgtcctcgcctatacggtcggttggtcacaccaccgttgatgggcatcgtcatctacaccgccggcctgcctccgtcgccgccgactggtgtcccagcctatacggtcggttggtcacaccaccgttgatgggcatcgtcatctacactgccggcctgcctccgtcgccgccgactggtgtcatcgcctatacggttggtcggtcacaccaccgttcatgggcgtccatgtcttcaccgaccggctggccttcgccgccgccgactggtgtttctgcctgcacggctggcttattatgccgccgctgttgggcctctactacttcaccaccggcctgcctacgtcgccgccgactggtgtcatcgcctatacggttggtcggtcacaccaccgttcatgggcgtccatgtcttcaccgaccggctggccttcgccgccgccgactggtgtttccgcctgcacggctggcctattatgccgccgctgttgggcgtctacgacttcaccaccggcctgcctccgtcgccgccgactggtgtcctcgcctatacggtcggttggtcacaccaccgttgatgggcatcgtcatctacaccgccggcctgcctccgtcgccgccgactggtgtccccgcctatacggtcggttggtcacaccaccgttcatgggcgtccacgtcttcaccgaccggctgaccttcgccgactggtgtttccgcctgcacggctggcctattatgccgccgttgttggatgtctacatcttcaccgttggctcaccttcgttgccgtcgactggtgtttccgcttacacggctggcctattatgccgccgttagtgggcatcttcgctttcaccgtcgaccgccttcgtcgccgccgactggtgtcttcattgttattgatggacgactttgttcccacattggccacttctgccatcaccaaggggaatattacaaagctaagtcatcatttattttattctttatatgatatttttccttttcctctgcctcactacaccaattgatcttccattgagtagtgagtcgggggctacagatgttatatcatatttttcataatatttatcttgattgcttgcgacataatctgagtacaaaagtacctatcgagttatggagttctatcttcctatgctttccgtttggtttgccaatggatggttgcctttgggccgattcctagcacccgggggctcgttggatggaccgagtaacgcaaggcgctaagtattattcggaataaatcaaaagcatagagataagataatttattttctactcttaataattgcaaaagtacccgagtagtaaactccgatccgtgaaactttgttccattaatgacgaactcatgtcactcatatgcatgtttgggaagtgcttaggccgactcccagtgcttggtggccatgactagtcgggcagagtgtttaaacgtaatgagtcatctgctcggggaaatcaaaattgacaagaggagaaatacatatttataaatattttaaaatacttgattttttctcgagtattatatttatatcagatactactcatcctatatgtttgttctgcaggatccagatccagatatgcataaaagggattcatggctttaagcttatctcttacgctctaggaatggatcagtcagaacatcaccaccggccgcctcgtccgccgccgactggtgttctcgcctgcacggttggcctattatgccgccgttgttgggcgtctacgtcttcaccgaccggcttgccttcgccgccgccgactggtgtttccgcctgcacggctggccttttatgccgccgttgttgggcgtctacgtcttcaccgaccgacttgccttcgccgccgccgactggtgtttccgcctgcacggctggcctttatgccgctgttgttgggcgtccacgtcttcaccgaccggcttgccttcgccgccgccgactggtgtttccgccagcacggctggcctattatgccgccgttgttgggcatctacgtcttcaccgaccggccgcctcgtccgccgccgactggtgttttcgcctgcacggctggtctttatgccgctgttgttgggcgtctacgtcttcaccgaccggcttgccttcgacgccgccgactggtgtttccgcctgcacggctggcctttatgccgccgttgttgggcatctacgtcttcaccgaccggcttgccttcgccgccgccgactggtgtttccgccagcacggctggcctattatgcagccgttgttgggcgtctacgtcttcaccgaccggccgcctcgtccgccgccgactggtgttttcgcctgcacggctggtctttatgccgccgttgttgggcgtctacgtcttcaccgaccggccgcctcgtccgccgccgactggtgcttccgcctgcacggctggcctttatgccgccgttgttgggcgtctacgtcttcaccgaccggctcgccttcgtcgccgccgactggtgtcctcgcctgcacggctggcctattatgccgccgttgttgggcgcctacgtcttcaccgaccggctcgccttcgtcgccgccgactggtgtccacgcctgcacggctggcctattatgccgccgctgttgggcgcctacgtcttcaccgaccggctcgcctttgccgccgccgactggtgtcctcgcctgcacggctggcctattatgccgccgttgttgggcgcctacgtcttcaccgaccggctcgcctacttcgccgccgactggtgtccacgcctgcacggctggcctattatgccgccgctgttgggcgcctacgtcttcaccgaccggctcgcctttgccgccgccgactggtgtttccgcctgcacggctggcctttatgccgccgttgttgggcgtctacgtcttcaccgaccggcttgccttcgccgctgccgattggtgcttccgcctgcacagctggcctattat

SEQ ID NO: 12571 - DNA, 627 bp, Oryza sativa
caacgttcacttcttaagccgtggctttatctcttcgataactgacggaaaactctgcccaagatgaaagtagtccttggttaccgctacctccatgaagttgtctttcgtcaccacgagatctatgcacctgttcttcagctccgggcagctgtgcatctcggcgcagcacagagtcgctatcaccgtctccactgacacgctctcccacagcttctgggcgcacatcagcttcagcctctccagcgcgaacctgtccgccgtcgcgagcaaacgctgaagcagatcagttgtactcgtcgacgaagagccttcgatctgcagaacgtccgtgtacacgaagtgtagcagagctctgaacgtcgacggctcgatgtcacgcagcgtgacgcacggcatggtggcctacggcatggacccgaggagcttcgccctgaacaccggcgagcgcgcggcgagcacgggccggtgcgcgtggaacgtctcggcggcgacggcgcttgccaccatggcggcgagctggcttgccaggttggacgggggcacggcgacatggtcgtcgccgtcgtcgtcggtgcgcagaactacgagcccacatatgaatgtgaacataccggcgagtgattc

SEQ ID NO: 12572 - DNA, 569 bp, Oryza sativa
tgtttaagggtacctaccgaagaagctaatctcgaacagatagaagtccaagaggatctgacctatgttgagaaaccaatccgtattttggaaacagatgagagaagaaccaggaatcgagttatccgcttttgcaaagtccaatggagtaatcactcggaagaagaatcaacttgggaacgagaagatgaattgaagtcagctcatccgcatctgttcgccagttcttccgaatctcgaggacgagattctgtttaaggggggtaggtttgtcacaccctgaaaattcaaaatatataaattgttgtttaaatggaatttttagaatttattgtaaaagcctagaagagaagatctaattttaattaataaattccaatataaaatggggccagataaaatttcattaaatactttgcttaattctataattcctagatttttctgggatttatttgagctaaggaagtatttttaataaatggaattgcatttaagaaataatttaaattgaaaaagggttttaaaaagtcttttttggctttgggccgaaagtcggccaaaaccct

SEQ ID NO: 12573 - DNA, 907 bp, Oryza sativa
ttgcaagatgtttgcaagcacatgttaaaagttacacctttcgaaaccatcctgcagagacctgtggacgttctccaccgcaaaaagatgtcagcggcctggttcccatacactgccatcgagaggttgtggtgtcagctagaagagatgcaaaatgctggccacagcgtggatcagtgcgacaggctcaagaagttgctacatggatctctgattagtcacctgcagcaagttagtactacatctaatggcttcccctttcaattctggatttgttttctagatgtctcctgttgaccacaatctgtttgtttatgggcttccaggttgtggttgattcagatgatgtgctttcatcgcttggaggagggaaaggaatggggagccaaagcaattgagttttttttttcttttgttccttagtgagcgagcaactgagatcttgtgagccgtggattagtgtcagcttactgttgtactgtcatgtgtatgtaatagttgtatggctaatgcctgtgagccatgttcatcacctgtttctgtagacaagggcaattttccatttgtaagtccttttaacacttatgtgaaaaatgcctcgctcctttgaagagtaccaggctaccagcagacacataaagtttcctcgtgcccttttgggtttgtttgatatcgccgttctcggagctcagcgtctggagttatgagggattattttgtacggtaaattatttgataggatgttttctgaaaatttccgtcacagcgttcttatccctcgtccaatccagacagccaaaggcggtcggagactcggtgtcgtcttctcctatcaccctgggaatgactcaattacactcaaaagaatggtcctttttgcaaatctgatgtatgaaaaaaattgtga

SEQ ID NO: 12574 - DNA, 5890 bp, Oryza sativa
taagctaattaaagaaaaataaagattagctgatgatatcatggccatccaaatctataagagccagcagcaaatttgacaggataagatcctcttcacctgcaactcatcagcaagaacatgttctgcttagcttctacaggtatcagataagcaaccaatgtgtatgtcggcatggcctgcaaaattactaatctcacatataaagtcagagcagtcactgcagatgagaattttctttactctgaatttgagtggttgcaagagaattcagatgcagttgagtgcactgcagtgcagctgcgaggttcacccgtttgcagaggtcatttcagaacatgtagctcagcatatgcctgtaacaagctgttgggctgtgacctgacgactccagtccagtggtgaaggagagatactacaaaagttgcaattccttttcaatttttttctgccggctggatgatcgtgtcggcagctaagcttgaacaagctagcttaactgtaatcataaacttttgacaattccctctgaattttttacttctcctccctctattcttaaaatataaaaaagatattaggttcgtctgagtcaaactattctaagcgcaactaaatttttattagaaaaaataacatatatctcatcaaagaaatagactgtaaatatatatttcatagtggaccaaatgataacaattgatatcgtaaatattattgtttttttataaatttaatttaatttaaaataatttggcttacgacaaacatacgatctgtaggacggataataatgcagccaattgtttactgtatagatatttatagcctatctctcagctcactcatataatggttaactctttaatataatagtccacatgtctgtttcacatgtctgtttcacagattttcttggtttctatgtctaaaccggttctaaacttacagcctgcttctcatctctatcctctcctctctcatccatctcagcattttgccttctcatagattatacttgctctaaacagtaactttcttcaccctggctttttagcaaaaagatattattactagtagctgatactgcaactttttttttactactgttgtaacgttgagactgtgacaagtgtcccaaatctagcagtaaaggctgcatgcatattggattctcctgacttttgaagaccctcatgatactgtattttgaatactttgaaagctcaaagtgagaaaaagaaaaggtgaaattaaggagtgaagagtagggaaaaatcatgagtctttctttacattgatgtattgtgatggtggcacttattgacatttgcatgacactatgacagtaaaagttttgtactgaagtagtactagaagtagcttgaagctgaaaaaatgaagtggagtactcaaagatgtgactgaagctgaaaatgcagggactgtcggcatcatgcatgtcatgccggcgtgatagttccttcaaagcttatgcttatatttataaattaacttttgaattgtaaaatttaattttggaattggttttataggttttcattgtagtttatttaaaaacttttgaatcgctaaagatatatttcctgcattccaaattgatttacatatttcataagtacatcaagaccaagaaaaaataataactctctcctactatatttactctagcaacaaactcgatgtatgcaccatactcattatttcctagcaaatagcaaataaatatattgcatgtgggttataaatacttgtgtgcatagatacatgcatcaatgtctatttactccaatgcacagataacgaatagacttaatgtatgcaccatccccattatttcctagccaatagcaaataaagatattgcatatgggttataaatacttgtgtgcatggatgcatgcatcaatgtccatttactccaagcacagataacgaatagacttaatgaatgaacacaaatatgtatatcgtttaggaataaccttaaaaatatatatgtagatcaatttgaaatggagggagtagtatacagtataaaatttctactcataagttatttaaaaactgttgataagcgattcacataagtataaacaaaagcttaacaataaggtcgtagtcaaacaacctaagctgtcataattatatttctggtttagcaactctgtgtagattaactccctccgtatatgatgtgaccatggctactatggatacaaccattgctcacatcatggatcaacaagaagacatcaagatcaagtcctccaaaagctggaattcgattcggccacctgctacattgctgacttcaaacggccgccaaattttcatacgagctccgttttgggtccatgagtacttgatggaaagccctccaagtcctcttttcaacggatccagtcttgttctcagattccatcttagtcgacggcaatcgcagaaacaagatgttgcgtcacctgtaatgggcctatgggcttgtaacttcgtctgggaccccggcccaagtggggcccatgtggggtgcgccccaacctggtggagaacgaccctacggcaccattggtcatcctcccacatccttaaatagctaggtaccccttcagggtttctcgggttttgatgatagagatagctacttgctaccggctcgcagcgcgcgtgttggctaaaccgctcgtcttcctgtaatcagaacccccaccatattgtgttttgatagtgaaattttcatctttatctagcaatttcagtgcttgttctacttgttcttgcttgttcttcgattgcttgcaggacgagtgccctcgtggccgggttgacgcgcaccacaagttcgcggcgaccattggagacagtgtatcggttgctaaggcgcagcgtctttggacggttgtagtcgggccgtgaacgtcgtctttatccaatcgagttatcccctacctctcatcgaaagatcgggccacaaaccctagcgggttcgcatcaggtggtatcagagctttcgttgctcggtgagtttttatctacccataaccagaaaatagcccgacaaaaagaaattgtatcatttacctagccatattgtgccattgcatagttcttttcagtttttgctttgttgaattttgtgttgcatcgtcacgtcatcttgctggtcttaacgtctagttcgtttagagtttcgagttctggtcacgttttgtaccacagtcgtcgctgccaccgtgtctctgttgttgtcgggacctacgaaaacggaatcggctcgctgccacggttctatttttgtagttttcagaagtttctgtcggttagttttggagttattgtgttgcatctagagtttgccgatccttgtgtgtgtttgtttttgccgtgcatgtgcgcgtgaggaagaaggaaggagaagatgcgcatgaggaagatggaaggagaagattagactagattagattgctttcgtttctatttgggggccacgcagaaaaggaataggtttccttctttcagaaattctcaccgagtcccaccaccttccatgcggcattccccccttgagtccgactcccctctcctttcggttcaatctacaccgtgccatcccttacaccttggtgaatttttgtttggtgtccgtttcaagatccgttcagaaaaacagaatcagtataaattcagcattccatttttgtataatttttaattttggtttgaacttttacatttgagtccctataaattttatatttacgtttgagtccctgtaaccttacattaaggtccttgagtcagtttttgttaaaaaaaatcaagaaaaaagtgagagaaaaaaaaggcagaaaggtgcataaaaaaaagaaaagaaaaaaaagatgcaccaaaaaaacagaaaagaaaaggaaagaaaaaaaagaaaagaagaaagaagaaagaaagaaaagagaaaatactgttatgtttgagctgaacttcatatatcagagttgtgcatgagttgttcctagtgctatcttgtggtatcgtttgtgtctaggctcgcgtctctagtacgttctagcctaggaccagcacggtacttgactttgaacaattattcaactttgcattatctgatttgagcatttgctattcctttgctacatatttaagcctacctagagctccacagatttgattgcagccgtacagcaagtatttgccaaggcatcgatacatccaacctccattggggtgcttggttgagtcggtgtatgtcaccattccgcttgcattggtaagatcttgtaagagcttggttaaaagcttgagtgtgtgtgatttttgagctgccactacctagtagttaataggaacgcgcatatttttgtgtatgtttcttatttgctactaaccatggcaggattgcgcatggggaaacgagatggtcatgctcaacgtcaacatcttcaccatcaacgagatatagcgacttcttcacgcatcacatatgaggtacatgatagtgatcttgcaagggtagaatctaaattgcctggttttgatggtaagtatgattccgccgcttatgttaattgggagctagcagtagaaaaacaatttgatgagtatgatttttctaatgctcaaatgattaaggctgctagtaataagtgtaccggttctgcatctttttggtggcatactgtgggaaataagcttgaaacttgggatgaatgcaaaatactgatgagaaaaatatttgtgttttcatactatagacgtgctttccttgagaaatttgaacatctaaaacaaggtgacaaaactgttagggagtactttcatgattttaaaatttgtattacttatagtgatttacaagaatctaatgagaacacaatgactagatttttcagagggcttaattccaatattcaggctgggcttattaacgtgacatataatcatataggcaacttgttcatgcttgcttgcagtgttgagagcaatattttaataaacccaagggagaaacaatctatgcttgtgcctcctattactgacattttgcagggagctcagaacattcaccatgaggagaagagcaatatgctcgagatgtcatctccatcactcacgaaggaagaagagaagactgatgcacctacattatctgaagagggcataaaaggtaaattaaatggtgctgatattactcaaggtgagtgtgcttctaatgagtcacatttgtccactatccatgctaatctagaacaaattttggtggaaactacttctgatttgcctttgtcacaagttgatttacttactattccttgtgataaagaagagttgtgtgataatgcttcacttatatccctaacacaactagtgaatgaacatgctatttctagtgtttctttgtgtgccaattttaagcatgttgttcacattgctaatgaagtacaggaacgtgaattgctatcttctttaaatattttgggctatgttcagtttgatgatttttgtgagctcaataatttgaagaagaaattatttgctaagtttgatttgccttgtccaactagtgctatttttcatatatttggcgaatctgatgatagaggactatatttggtgcatagagtttacatatgttcagatttagaatctcctatacatgtggataaaacatgcaagctagagagaaatgttattgctaacaaaattatttcgagtttgccttgttttgatttgatgaaacaggttattttgaatggactgtgtgaagagcaccatatggaaaaaccgaggacggttttcagtgaagaaggggagaatgatgtgaacatggctactatggatacagggctgcaggaat

SEQ ID NO: 12575 - DNA, 705 bp, Oryza sativa
tgcgttcttaaaacttaattcatttgacaaccaaagatgtagcatatatttagttggatgcttcacagctcatttggacgactgggatcttcttactaaatatgtctgtacaggtatcatttggttctgaattgagtaatcgtgcaccaacctttgatatggacctgtctgattttatggatggtgacaaaccaatatcctatgataaggccaaagaatatttctctcaggacccatcccaaaagtaagaaagatcgtttgttttactctataaaaatcataacttgtcatgcatattcattcttggttctggttcagatgggctgcatatgttgctggaacaatccttgtgttgatgaccgagctaggtgtggtcttcacagacagcatgagcattctggtaagctttgatcctttctgttttcaatcagaatgcagtaatatatgtaaaattccacctctttgtccagtttgtcacctttctcatattggggagataaagagatattcagaactcaaaaggaatattgtttattagtcacaaaaagaaaacagcatctttcacactttctccttccacattctaatcaatcaagtgtttccttccacattctaatcaatcaagtgttctaactcgaatgtttgtattggtcattcatgataattttatttgaatcctcaggtttcttcatcagttcctgaagg

SEQ ID NO: 12576 - DNA, 514 bp, Oryza sativa
ccgagaacgaatatggttgattgcaaaccggtaaatacacctctgtcaactacagaaaaattgtctttgcatgaaggtgatcaattaggacctaatgatgctactcagtatagaagtatagcaggagctttgcagtatttgactttgactagaccagatatatcctttgctgttaataaggtttgtcaatttcttcagacacctaaaattgttcactgggcagcagtcaaaagaattttgagatatttgaaatacacagcaagtctgggtataaattttgatagatcagtatctcacttgttagtgcctttacagatgcaaattgggctaggtgtcttgatgaccggcggtccactggagggtttgctgtttatcttggctccaatcttgtgtcatggagtgcaaggaaacaagctacagtctccaggtccagtacagaagcagaatataaggctttagcaaatgctacaactgaggtaatgtggattcagacattgttggatgaactcgatgt

SEQ ID NO: 12577 - DNA, 1319 bp, Oryza sativa
tggtccttcatagtgtatgccaggttttatgactttggcaaaatttcagatatgaagctgtttacgcgagagatattccagagatcataaccggggatgcatttttggagaagtatggagatcataatgatgcagtaacaactgttgacccaaaacgatcttactgtgtgaaggctcctactagacatcctatatacgagaacttccgagttgaggtttgatatcataaaaccagaatatctacacctctcgattcataatggctgttgatgagatccctgcatgttgttgtctgatgttctactgcttttgctgctttatcctcgttgtttgtatttttaaactttaaaataattctttgagatgtttgcaaatcagaaaactatcttgagagcgcatggttttcagaaccagctttattttttctccataaagaatagcttattcctttcactgatatttttgacacttgttatgcttctcacgtgtaggccttcaaagcattgctaacagcagccaaaacagttgagcaactttcggcccttggagaattgatgtatcaggtatctgtattacaaatgaaagccagcactgtacatgttgattcacaaaattagcagtcagtggcactgcattgacccttttgttttctggcagtgccactacagctacaatgcttgtgggcttggttctgatggaaccgacaggctttgtaatatggtacaagaagtcagcacaggaagacctcacaggatggtggtcctagttatttgggtgcaaagataactggtggaggatctgggggctcggtttgtgtcattgggaaaaattgcttgaaaagcagtgaagagatttttgaggtattttcgacatcgttttttattgtcagttgtacacaatggatgaccataactacaaagatccaagataaaccctccaagagagttgtgattcaccataatgtttgcattttcatggtattgcatgctaacaaaatatcatttgttttcagattcagaagagatacaaagctgctaccgggtacctaccaattgttttcgagggctcatctccaggtgcaggcaagtttggatacctgaagattcgacggcgatccacatagccatcaatcagcctaactgaagatttggctgtattttaggtccacacaaacatttgtcaggaacctgaatattacctgttcatatggaacacatatcacatcatcccattatgtagtagtaataagctctctagttcatgcaataattctagtgattagtgcacctctggtgcagacttccattgtgtaagtgcag

SEQ ID NO: 12578 - DNA, 2241 bp, Oryza sativa
gtagactaataacaaaacaagttacagattccacctgtaaactgcgagacaaatttattaagcctaattaatttgtcattagcaaatgtttactgtagcatcacattatcaaatcatggcgtaattaggctcaaaagattcgtctcccaatttacatgtaaactgtgcaattgattttttttcgtccatatttaatgctccatatatgtgtcaaacatttaatgtgacggaattttttgaagtttgaagggaactaaaccctgccactgttaaaaaaaacaatattctactagtatttttttttctccaatagaagaactgatatttttttttgacgcacttgaaaaacaccagctgctttgctagctgagcaaccagaggccagagcagcagcagcagcagcagcagaacgagagccgccgcgccgcgtgcgtttcgtttttttgctttcccactcccgagacgccgcagagcgcacctcgctcttcgtgctgctgctgctcgcctcgccgccgccgccgccgccgccggagtagccgagcttgtgtgcgtggttcatctggcaagagctagcgccgaaccccgcggcgccggcgcggcggtcgtgccatgcgtggaggaggaggaggaggaggactctgaagtgaactgccatggcgagcatgaagcagcagcagacgccggcgagctccgcggtgaccgcggcggcggcggcctcctcctccgccaccgccgccgtggccgcatgcgaaggtatactgcttttttttttctcttctcctcgctcgtctggtggcggtggctgacgcggcggctgcggcggtgcaggggagcggaaggcggcggcgatcaactcggagctgtggcacgcgtgcgccggcccgctcgtgtcgctgccgccggtgggcagcctcgtcgtctacttcccgcaaggccacagcgagcaggtcatcatcatctctctctctctctctctcctcttcttccatcatcgacctagtttgatcgaagacttcttcagttcttgctgtttaatctctgctgtattttggatgctctctcctctcctctagtataatgttaatctgatgctgctgctcatggcaaggttgaaaatttgtggtcttttttgtgcgttttgaggtgaaactctcagatttctgtgggttgttcaatgggaattttttttcttttggttaattacagaaaagaacttttctttatttctttctgtatgtactgttgcagtgattgatacagtgcaacgatccttctcagagcaaatgttttacttacaccccaaataaacttttggctttggatatttgatctcctatggaagataatttttttataacaaaagagttgaagagtatttctcacatgatgcattgttcactgctaatgtatgtgaggattttacttgctagcagagacatctctgcttgtatgtagctactaataactgtacttgttcattaccaaagtggttgggagcattgggcctacgaggcttcccttttctgttgccctactagtatggtgagtactgtttcgatgttaatgtggtttggtctccatgaagcatcttatgggatttggatttcttgcatccatgaccctgagatggatcatttctagtccaaccgattgtaataaataaatactcctacttgttttgagaaattttgtcaaatggtaaggtatggtgctctgattgaaaaaataaataattaattattaggtcaatagacagtcttgggaggactaatcctgcaattattcgtgcatttctttttagaaagatgagaaaaaaggtcctttttcatgaatgatatttggttgcgctgcacatgatggtaattgtacttatgcgagtttatctaaaaaaagttcactcatgaaccgcactttctggactggacactacgaaacttcatttttttattgaaattttgttgacaggtgtacaaaagtaacatagtatgtttgaaaggttgtactttcttaaatttttatgagatggttatcgagtgctagtttacagagtagtgcagtagtacttttctttttccacttccatgttcttgagcacaaaaccttttttttcagtttgaaaaaagtggatgttgatccacatatactggctacttggttcagctgactgcatttttcattgtttcagatattaagaaatgctttctccatgctattggaaacagcagaatatctacttaatct

SEQ ID NO: 12579 - DNA, 3216 bp, Oryza sativa
agagtgcagtaacgacctataaatttggcagtaacggcccatatttttcgcagtaacatgtcgtgttactatatcgtgtaactgcagttctgcgataatgttactaccgaatcatagtaacaatgtatgattttctacagtaacataacgggtttgtgttcacaaaatttgaacagatatataagaaagaaaacaataatctcaaatcacaaagtgtcataacgtgaattggttaggaaaatttgttatgaactatgagatcatgggttctagtcttgaattcaccaatttatttttagtttttctaaaaaaaagaaaagaatagaaggaaaaaataagagaaggagggagaagaaaaaaaagaagggacggagagatcgggagagagttatagtcttgaattcaccaatttatttttagtttttctaaaaaaaagaaaagaatagaaggaaaaaataagaggagggagaagaaaaaaaagaagggacggagagatcgggagagagatcgagaggaaggaggcccgccgggagtgggtggggccatgggggatcatgggttctagtcttgaattcaacaatttttttttattttttctaaaaaaaagaaaagaatatgagaaaaaaaataagaggagggagaagaaaaaaaaaaggaaggagagatcaggagagagatcgagaggaaggaggcctaccgggagtgggtggggccgtggagaataggaggaaaaaataagaggagggagaagaaaaaaaaaggagggagggagagagagagagattgagaggaaggaggcccgccgggcgtgggtggggccgtggggtcgccgggaacgggagggagccgggagggggaacgcgcaccaggaagcgaagggagggggcgcgcgtggggactggggagagggaagggagccgggagggggaggacgcgtgtggaggagggagtgggtgggctgggcaagaccgggagttgagggagagggatcgcttccctctcctcctagcgatcacccgtccctcccccctaatattcctttttcatatctcttttctacttttctattacatcataaattttaaaaaaatagtaaaagaaaattagaaaaaaaaatataatactctcattcatgtacatatactttgtaccatacactttgcacgcataaactttatgtataaaaatattttatatataaaatatttgaatccgaatttgaatttaaatcgggtatataaaattttgacttataaacattcgctctataaattttagatggataaattttagatgtgtaaactttagatgtataaacttactaaaaagatgaaaaagatgaaaagaaaaaaaacgaacgctagcagtcgcccgttagccatctcgccatcgagacctacattgctagctaatctggccccacccgtcatagaatcgtcggtctctgtcccctcctgtcatagactcgtcggtcctcgcttctccttgctcgtcagttgtcttcatcctcctcctgccgcctgaccgcctgtcggctgctcttccttcaccccatccccatggcggcagcggcttcggcttcccaccgcgtgttcgtctacgggacgctgatggtggaggaggtggtgcgcgtactcatcggccgcgcgccatcgtcctcccaagcaatcctccccaaccagttcgtccacgagaagggatcggaagggaagatcacctgcgacgcgcccgcgcgcggcggcggagggaggaggaggactgttgacgaaaaaatcaaacacaccggcctgggagatctgcttaactcctgtgcaggtccaaagattgatgagatgcgggcgtgccaatcagtttgattctgcaagtgacaagatatacaaataatagatcaaacagccgatcagctgacaagccgatggagtagttccagtcgatagccgataatagccgatgccggtaccagccgatagcgatagggtttaagcaatcggctatatgtccaatgtagataatgatataaagacaatcggctgatgataatataatatagcaatataacccagtaaaaaccaatcgattaacaatatgatatagtagaacaaatattgatccgaaggttaaagcatacatcggctggaggtccaatgtcataaaatccataagattagattaaacagtgaaacctttgttgccatcggctaaatccaacttatatgtatatgcaatccttacaagccgatgcaacgtccagataacttatcggctagcatcccgataaaacattagcatgaacctatcggcttaacaagacttatattatcaacaacaatctagtaggtcgaatctaaccgatgcagcccgagattgtatatgataatctaatactcgatgagccgatagatctatctaatgtgatggatataacaaatctatttataacgacattgtgattgtagagatatatcggctaagacaggagatcagacctaaccgagacagtcccaactaaactgatgcgtctctaaacacaatgcaattagaggtagaattgagatatcaagtaggcaaatatatcaaccaaaccagagcgatccaagagatcgaatcgatgcagccttgaacaacaccaacgtagccgacagattcaccagggcccgacagagcgtaggacttacccctttgctggagattgaaagccgatgcagcctacgtcaggtgcccaaattcctctggaagataagtaaaaacgttagggaaaagggtggcgatgcaccgagggtagttttattgatcgatagattgatagattacaatgaccccaggtgtaaatatttatacccatatagagatactagtccttgttggacaagaaagaaactaaaaaggaaaagataaagtccttatcggacactaaacacactttcctaaagataaaaggaaacttacaaactatgcctaattaatagataaactgtcatgtcgcatctttttttgaactcggactcttgtagataagctttgtttgattgatccgactccaccaagaatatgacatcgtggcgacttaactcttatcggctgattctagaactttgaagccaatattaactctaagccgatgataactttgggcttaccaaatttcattgttaacaaggacgcacgggatgggacagaaaggcaacggcgaggacacggggcgcgggggggtggtgg

SEQ ID NO: 12580 - DNA, 881 bp, Oryza sativa
caatatttaaagattcttcaattctgcatttgactatcattttagtttgtttctgtaactttgcttgcatctcctcttgataccattgaaggtaggggttcctcctgcatgtattgtggaatgatatattgacatatacctggaaaactctgaatacatgcatgttctatagaccttcctacaattatttttagatagatgaataaatattatgtctccttgtaagttactaagttattgattgatttgatatatttaaaacataaagaaagtttcttttggcatatgcgattgacattgagatggtccaaattaccagatgcccattcgagaggcttgtcatgttgctattcagagaagtaatcctatgaagcagaagctatggaagcatacacaagctaggcaactagcaaatggcagagcagtgccgttgttacaaattgtatgttatttatcactaactctctaagcatcttcgcttaccttttcttatccttattatgcgttcttaaaacttaattcatttgacaaccaaagatgtagcatatatttagttggatgcttcacagctcatttggacgactgggatcttcttactaaatatgtctgtacaggtatcatttggttctgaattgagtaatcgtgcaccaacctttgatatggacctgtctgattttatggatggtgacaaaccaatatcctatgataaggccaaagaatatttctctcaggacccatcccaaaagtaagaaagatcgtttgttttactctataaaaatcataacttgtcatgcatattcattcttggttctggttcagatgggctgcatatgttgctggaaccaatccttgtgttgatgaccgagctaggtgtggtcttc

SEQ ID NO: 12581 - DNA, 10319 bp, Oryza sativa
tacatacttaaaagaaaggatgtatttaagttgttgcttgcactaattgctgtatcttttcttgttcttgaatagtgcattttccattaaagtatttttctatctttaggtcaaccatctaggatatgggttggtgatgctgatgatgatcaagagttgatttttttggctgttctgcgtcaaggcactgtggtatgtcaagaaaaatgtctcaccactaaatttacttggtcatctggaatgcactgatttttcatgctatgccttttcacttgtcagttgactgacttataaaacacgataacagaacctataaaattatgtctgttaaaaatggatacatgctttttgtgggataacatgggggtgaaccatttcacttgtcagctgactgacttataaaacacaatgacagagcctataaaactatgtctgttaaaaatggatacatgctttttgtggagtaacatgggggcgaagttggtacatattatatgcctaatatgggtcatctagagtccaaaataaggaaaacattgcttcatgagtgatgtgttacaccttgtgtggcaaaacattggatcttaagagcaaagggaagtttgatttattaatgtcactggtagagcaagtggagttggacaaataggcgatggtgattgtggcctgaattttgcagtttgtcctggctcatgggtgatttttggaacggaaacaagaaaatggggtggatggaatacagagttgtagagttaacgatctgctaacagattattatttgtgaactcagacattgtatcaatgatgaaacatggtttttctgttgataagacagggatttcctggtcactgattatgtcatcacaatatgctaggtgctaataataatttattgttgtctttgcaataaggtttatttcctgtttccttattaaaattttccttttggtaatcccaccaatccatcccaacagtttccatttgtagatagtagatagcccgttcatcttagtcttctgtttctagatgcagcctcatataggaaactggggcattgaccttaggcttaaaccttagatatcagattttttccgatgttcatgctcatgttaaccattgtgttaattctttttacctattgttgattactccctccgtcccaaaatagatgccgctgttggattcaaaatttgtcccaaaaagcttgtcattttggagtaccttttgtcacatcaatcacctccaattcaaaattttctccatcatacccccaactacctaccatacattacttaatagagggcacctatattaatttttcctaaaccataatctttgccaaataacctagaacgacaactatattgggacggaggtagtatttgttacatgacatggtatgattgaagctgttattctttcagcattgtttttctaagtagctgattaatttacctttttacactgtgcagactggagcttgtgattgcgtttctgtatatggttttagttttggtgctggtgaaaggttcttgttttctcctgaaccttcatttttttctatacctttggtggaggtaaacaaagtcattaccgtattgcattatgatcccttatatttatatatatatggcctttttgggtttctgttctcagaagagacaattttgagtgcctgtagcaacttggtccagtgactatgctacccgctcgtagaggagcaaatatattcaacctactgatgtagagtattttgttttttctcagggaaagcttatcgacttgaaaataagcatggacaagctttggatacttaaggaagttggatcaatgctatatgaaatagtgcagtatgattgtgatacgtaagtatgctgcactgcactgttcccttatgaattgtgaaatgccgctgaccaaatagttttctgctctgactttatgactttttcatcagtgaaccagcacacagtttgtaaaactcaagcctgtatttttttttgcacttataaagattcccattaagtcgtagaaactaaaagttaggtttataattctatattgccaaaaccttgatttcttttataggtcaaacctgcttttgtttcttagccaattttaagtgcccacccttctctctctctctctctctctcaatatgtataaatcctaaacccagaagctaaactgtattaggtcactttatgagtgttcaaatatttacctaaatgtaaataactgcagtgagataatgcattcatatgtgctacaagaagtttctgtcagtgaccagttgtttcaaagctctgagaatacattggatgatttggtctggacagctgattcaatattctcatccaagaaggtaactgtaatttccttgaggttccattgttctaaattgacatgtcatgtacaccttgatgttattattcatagttctagaatgatatgtcaaatattgttatgtacagataaggtcacctattgatctatatgacttctggttcaacttgaattataaggttattgcttcacattgctgttaggtttcttgtcctctgaatggattaaactcctgacgtgtgtttgattcttaaaaatgattactatttagactacaatattcgtaaaccctataattgtcattgatacgactttttagagttagtttatcatttttgctcaattgctgcgggatatatcctttagctatatagatctcatataattattttagttctttgttggctgtgtgaagcttctcaatgttcttcagctatgtagacttcttttgtatctgtaggagcagacattcggttttatttcatctatgtttttgcggaggctacttcaaccaggagtgaatcacagttctgctctacgtgaaaccttgttggagcacaagagatttctatccgattcttatttccaatcacttacaactagtggactacggaaagaaatattatccaccatagaacaagaggtggtttcccttttctttttactcatttctttgtttctatcaggcttcatgatttctagttctagcatgtggcttgactgaattttcatatatctcattcttttagggaagttcacagactgcaagttcgactgcttatcattggaaaaagttttctgcacggtatctccacaattggtgctggaacaataggccatatgggttacttcttgatactaacagagaagtttttggtttaataagaaagggttcattttctctcttccgttgtttggagggcatggagcagtttatttatggtttgttacctttttctagtatttaataattatattaaaattattttcaactatcattatgagctattcggtaacgcctatgagcattatacatcaggttcctctgatgacctgcgcaatcttgatatccttggggtgaacccatcggataatatatctcagtctgaaatcctcattgaagttctaaggtgcatggatcatataagccatctgctggggagatctgctgctgcaatatatcatgaatccctcatcagttctgttatatcacctgatgaaattgtttctcagatcttaaagattctgggcactggtttcagtcctcagtctccctcagccctcattacattatttggaacagatgcttatgcagaaagaaggcagaccgctcacaagagtcagaggaagttttctgttgaaatgttactatcttttcgtaaattgcaatcaaagtcgacatcctggtcagcagtatttgatgtgattgagaacttcatgaagtatttgaacacaaacgtgaccatccaagagtatgagctgaagagagtttgcaatgtgaatactgcgttattggttcaagctacttcacaggtagcaagaacaatgttcgagtccacttttgatctatatctgttcctcaattatctggtctccattggtgggcaggtatgccatatttttgtattttgatatttctgtctgatgtgcatgtgtttacttaactcggccactgtgctacctctgatacgtactgctatatagttcaatattatatttcttttagggaagttcacagactgctagttcgactgccatgctattactcaaacttgctccggttggtcagaactggctaggacatctgcaaatactgattaagatgttaaagtgttcttgacttgcatcaattggaagatagtagacatataaccataagatccttgtcagacctttgtgttgtttgtggtgttaaactgtaattcaatgcttcttcatagatacacactattcttgactggtaaacgtctttcttttatctgtttcattaataagaacaatgtccaaatcaggtctccttgtcacaaaatgatattgccagaataaaactgaagttgttcccagtgattcaagatatactgggacagtggattgtcctccactttgtaggaatttcacctactacaccaccaactattgaggatttcagctatcagctttcttctctccagctaggtcagaacttacagtacattttgttgctctcttacttttacttttgttctttgatatgtattctcttgaatggggacccttcctctacagtatgtttcccgctgtattatgacaaggcaacgagtccatacagataaaaactgatatgccaatgttgggaataattaactatttgccactcttacgagtggttctaaaggatttgccactggacccacatgttggtatgctgtattcaataatggcttaaatggaaagtgggtgcacatgatacttgtctcattagagactaaaatcactagatcaattcatcttcaattgcttaattgctaatgtatcatgttacccatttcatgggaatggcttgacttgacccctaagaaacaatctgtatctctaagttagtttgtttctaatatatggaatgtatctacatggaggaactcaactaaacaatgaaactaattattatttttatctcttattgccaagtaatagcatggcaggaggcccatgggaacagtgcactgcggccacagggtactgttcacacgaaaattttctgcacttgccatgggtctgggtgcaccacaaatgattctaaaatctaaatgcaatgcacacctagcctcttatgatatatgggatcttatattcacacttggcttaatatttataatgccactttcttgtgcttttcttgataaagaaagaacacgtcctcattacttcattctcacaggaaaagctgatgacctgtctttgcacagaaagtttggctgctcttattttacattggcttgtttacttgattttccaaaatctgctgacggggatgttctctcaccctggtttcctaatccaactgagttggtcaacttggtaaggaggtttagtggctcaattatgagtgaaaatattgctggaaatgctgactgtttcttgagttccacaattaatctggcagcagttcttgttcgccatggtcaatatgaagctgctcaggtatctttcttgttggtgccccttaaattcattaaacgtttattgtttgatgtggttctaccattctatttacaataaatatgacaaccattatccttatttcttctgaaagagtcttctgggcattctcgacacacacatgaactatgtgaaagcatctcaagctgaccaggatacagatcttgcacgctcatcatgccttcatctcaatggattttgccttctggtgcttgcacgtgatgaagcaaacattgtcctgaaagaatccaaggttcatgaagctatccgatgcttcttcaggtaccaccttccacactatgcggagttgtgcactgtgatttactgcttaccagaggatattgagtctcatgaagtggtcttagtgttatagattatgtaacattgatatgttacagcaatctgaattacttgtgatgtttctagctgtattattgtataatgtgcaattcagcacttagtgagccatttctcagttttctgttaactaattattgaaaatatttgttattcgataatgctcactgccttactggttctcatagaaaagcctaagtgaccaggcattgagctgatctccagtttattttgctgcttgaattcagaaaaaaaaatgtttgatttatcttgcatcaaagtcagaaaatgtatatctgcatccttaatcgcaaattataaaaaatggctgcttcacacttctactttatgtgttatccaaggttgaacagtggacatatgattatttgcagttatggaagtttctgaaaatcctatttccctaattaatattcagtgcgtaaaggaaaggtcagtttcatttggctgcataagttatcagtatacaaatgcaatatgttagtagtaaattcggcatcacagaactagttttaccagtaaatccaatacatggtttgcaacatatgtactgatgtgagaaagaaatgaatgcggaattaggctgcatatctggtcctttagcaaacaatcaactacttgtgctatcagcttatcagcacagcagtatctttccacataaaatttcaatgatttcacctgatatgtgatattggggttcactgttctccaagcatttcaatgggatgagttcacattctctgcattataaattattccgaacttaggcaacagcaaagttttaagcatcacatcaaagcatatccgatggtcaggaactcaggaccaccttagattaataaaaaacataatcttttcttttggttgtgtggggtgtggtgggagtacaaagttcaaatagaaaattatggggaaaaggctaaaagccttgacaatccactaaaacaaaatgcttggatttgtgtacttgcctaaatttattctcttttatcaatctctttttctatattggtgattggctggctcattaatggtgttaatatgctaattactttgtaaaacagagctgcatctgggcaagaagctccaaaggctcttcagaagttctctgtggaaacagggtttcaaatctccggtgacatcattttcctagttctgcttgtattataattcacctctaccatttcctaattcttttttatttttccaggggaatgcagatcttttacagcatggaggcttcgttactatgagtgggcaatgcaaatttttgagcagcactccatgagtgaaggggcatgcgagtttgctcttggtgctcttgaacaaatagatagcatcgtcgatttagataatggaagtgaagctgaggatatccctgaaactacaactatgattaaagggcgactatgggctaatgtattcaagtacaaattggatttgaaaaattttcaagaggcgtattgcgcaataatctcaaatccagataatgatagcaagtatgtctgtttaagacgtttcatcatagttctttgtgagcttggcgagacaaaggtttgctctgtttatttactgtcttcactaaatgcattgaataatttactaatttaccagttgttttaccagatgtccatagacactcttaggctgtgttcttaactcaaagttcccaacctccactccctcgtttcccgcgcacacgcttcccaaactactaatggtgtgttttttgtaaagttttctatatgaaagttgcgtaaaaaatcatagtaatccatttttcaaggttttttttctaactaatacttaattaatcatgtgctaataagcaaccttgttttccatgcacggggggagagattcccaacctctcctcccgaacacagccttagtggtcatgacacctgtttacctaattaatctgtgggtcgttgcttggtaattgtcatgttcaagttcaaccacaattgattccgtttgcctaatgtttttacgctcttcacaaaaatagcatactatgtgtgatgttggtcggcaggctttgcactaatcattgccagttaaaaatcatataagtatgctattttgtgtattttgagttactcagttcacttcttttactgtgtgcgaaccatgttcactggatgattagagtttaaaggaccttgctatctgttgaattaggtaatttgcaatggcgagataccattcactggcttggtggaaaaagtggagcaagagctcttctggaaggttctctctctccccatcttttgaattacaaaaacttttatttgtgcaacctgtaatgcaatatattttatttaacaggctgagcgctcggatcttttgtctagaccaaatctttacaaggtcctttattcatttgaggcttataggaacaattggaggaaggctgctgcacatatgtataggtatttcgttagattgagtagagagggtaatgctggtggaacccggcaactttctcatacattgcaagagaggctgcatgctttgtctgctgctatcaatgcattgcagcttgttgatccctcattcgcttggcttgattctgtttgtgaagcggatgatcaaatctcaccaagtaaaaagccctgtaatcttttgatgaagaactgtatgttctgttactcaagcactgtttagctggacctttgtacatctcatttcgttattgactacttgtttgctgtttacagctgcttttggcacagattcagagctgtctaggttgaagttttgtgttgacattgaaattctcgaaaaggaatatacactaacagaagcactctatatgctcagcactgtaaattctagattcaacttttcaggtatatgtccccaaagtatcgtgcaaataatttaatattacttgagacttgaatatatatccaagctttggcaatcaatatctcgtgggactgcagataaccaatctattgaagcactgacggatattcttataaatgagaatatgtacgacatggtgttcaccattgtgctgaaatttcggaaggagtcaggaatgaaaaggtgaccagtttccctgtattgatagattcttgcttcttcgtgtcggcgcttctttgcattatctaacttttaatgtttcattttctcatggtagggagttggaacgtgtatttgcagcaattgcgcagcaatgctgccctaatagagtgggcaactcagggtgtgttaaactgtgtttttttggtccattctggttctctggaattgattttagtctaattggcatccactattctattgtagcaactattatatattaataataatggtgccctgccaaaaaaaataacaatgttgtattttatgaccttcttacaggaagaatttactgctgccatcttccgatgatgatgcctgtgatggcaatggtaacagtattgccatggctcatcaatcccaggggagttgccattgggagactcttgaaatatatttggtctgtgctctttgctttttcctatatttaatgtttctctgaaatgagcttcttttttacttaactttgttagagaatcttaaagtattgcatgatactccgactgttctgaaggagcttctctgtcaatttcataaactacaatttttaactctgttctgcaggagaaatacaaagatttgcatcctaggttgcctgtcattgttgcggaaacacttctttacacagaccctgagattgagctaccactttggctagtccagatgtttaaggtgatctcctgatgtatatattctaatagttacaccaactattatctgattgaccactgaccttccatttgtacctttagaccaccaaggctggtaacaggatgatttcatggggtatgtctggcacagaggcagaccctgctacattatttagattgtacataaattatggacggcacacagaagcggccaatttgctggtcgagtacttggaatcattcacatcatcggtaatagatcaacaaactcaaatatccaattgcaagatgtttgcaagcacatgttgacagttacacccttcgaaaccatcctgcagagacctgtggacgttctccaccgcaaaaagatgtcagcggcctggttcccatacactgccatcgagaggttgtggtgtcagctagaagagatgcaaaatgctggccacagcgtggatcagtgcgacaggctcaagaagttgctacatggatctctgattagtcacctgcagcaagttagtactacatctaatggcttcccctttcaattctggatttgttttctagatgtctcctgttgaccacaatctgtttgtttatgggcttccaggttgtggttgattcagatgatgtgctttcatcgcttggaggagggaaagg

SEQ ID NO: 12582 - DNA, 1143 bp, Oryza sativa
acgcaacggcccatggataaagctgaattacgaccgctagattgggtccaacaggcccatctaaaaaaggagcccaccaaatcaccaccgccccttcccttccggctcgatggccgccgcttcgccgccggcggcggcggcggaggtcgttgtatccctccactctgtcccagccaactaatagcgtaagagacaggagaatcgcggcgcggagcggcctctataggagcaggcagcgggcgcctcatcgtcctccgattccattccgccatggtcgacgacccccatcttcctcctcgcctgcggcaagcaaggaggtaagggatccgtcgttcaaatcaccccatgcaccgtggcagatctcgtgcaggagggacgaaccagcggcggtgctattgctgccagtttatctatttctgaatccgtccattaatttgactgatccccccactgcaggatgcatattggggattccaactcaaactacaagagcagggatttgaactgttctatgtgaaatttatgcaaaaattcgtatggaactctactgttccagacagtttggcattagctccggattgggattattcatcaattcgttattcctttcttgttcaattcctaaccaatcaatcagtcatacttgctgcttattttagcaagaagatcacagagctcccttggtttggagcacatgatgttgtggtcggctccagcaatctcctcgacttccgtgcccgggctcaacgtgatcaaataacgatgcagctccttgatgtcatcccccatgcctatcaggcacaccctcttcaccgaaccatagttggcactggtaagcagcttgtcatccttcatcatcggatcatcctggaactggctgccaggtgtcatcaataattttgccagggtcaaatcctacccaaaaaaaaaatcaaatgctagtctaatgagatttgagataccagttaccagctattaggacaatagcaatcttaattccaaattaaatgctaaactggaacttgcaagaaaccagagttcatgatgctagttgattgcctcagctggacttagtggataacacctctctgccaagaaatttgggcctagggttactgctgttcctggacctcgtttgttgtt

SEQ ID NO: 12583 - DNA, 550 bp, Oryza sativa
ccattgattttattgcactcatgcttgtacttgctatgatctccagaacacaagctttttattggaatgcttccaaaaaatgtaacggacaccgaattgactgatttattttccaaatatggaaatatcaaggatttacagattttaaggggttcacaacaaacaagtaaaggtgagatctggtgaataacctattttcctaaccatttagagctagaagcactggttgactctggaactttacaatacctaatgtttttgttaaattaactgtgttattgcagctggctgtgcattccttaaatatgaaacaaaggagcaagcagtggcagctattgaggctctaaatgggaagcacaaaatagaggtttgccagaaattagttagaatagcagaaaaattcttagtggttattgaaatgtactgcaattcacacatgaacatgatccatagctctacttagtcatgagtctgatacacataaacagtcaaagctaaagacactctctgctattgcatttatttgataccttgtgtctgcattatatta

SEQ ID NO: 12584 - DNA, 572 bp, Oryza sativa
caggtcctccaggagctaatctatttatctatcatatcccacaagattatggggaccaagacctttccaatgcattccagaggttcggtagagtactaagtgctaaggtttttgtagacaaagcaacgggttccagcaaatgctttggtaatctctctctctctctctctctctcacacacacacacacacacacacattttgcttatagtctgctaattgttttctaacgggtgcaggttttgtaagctacgattctcctgcttccgcacaggcagccattggtgtgatgaacggtttccaattaggcagtaaaaaactcaaagtacaactcaagagagacaactccaagcacagtaaacccttttgacgaaaactatgatgaccacgcgatcaggttcctggtacatatttgtcagataattgatcgttgaattgtttgctctggccgcagcattgggagcttcgtgtatcttctttgttcaattcacattcttgaacactgttacgtcgtgtaatttactgcagcctagtggtagaatttgtttcatcagacccttgtacatcagaagt

SEQ ID NO: 12585 - DNA, 516 bp, Oryza sativa
atatgtttgggccgtagagattgtcacggatcgggctatagagagcagcagtaattttgagttaacaaagcaagtttagagttttgatcctgtccaactaatcgccgggttaatcgggtctacacgcgtgacatgcgccgcaacgagattaccaaaaaccaaaacaagcaaagggcgggcggttcattcattcacagaagaagagggccatcactaggaaaaaatcatcatggtcgtcatggaggggagagacagtatagcctaatctaatcccagattgctagtgattagcacgtagatacatagaagcgatcgatcgaggacacatcgagaaaaaggtaaaagggagatcaattaatcgaagaagagagtttttgaaatatcgatcgatctagctatcatcatgtcgttcatccggaagaagtcgatggagttcttgaagagcttcgaggtgccggcgaagaacccgtcggaggaggcgcagcgccggtggcgggatgccgtcggcacactcgt

SEQ ID NO: 12586 - DNA, 12248 bp, Oryza sativa
cgaatccaagaatccccggctactacctccccgtcaaaggcatctccgtgtcatggagcgttcccgagacgccggcgtcgctgcccgccggcgcgctcgacctggacgcccgcactggccgcggcggcgtggtgctgagcacgacgacgccgtacacggtcatgcggcccgacgtgttccgcgcgttcgcggaggcgttcgacaccgccataatcaggaggagcaagtacacgtactccaacgtgacgcgccacccgcccgtgggacccttcaagctgtgctacaacggcgcgttcccgatgctgaagcggccggcgagcatggacattccgacgatccacctggagctggacggcgccacgggcacctggtcgtggttcaacgacaactacctggtgtttgcgccgggggcggcgttgtgcgtcggggttctcgagatgggtcccggcggcatgccggtggacggcgagccggcgatggtggtcggcgtgaagcagctggattggaacctgctggtgttcgatctggacaaaatgctgatgtggttcagtggggatctggcctttcgcttggcgggttgttcatattcttctcaaatcgggttataagatcgacctgatcagtgatcagtcactccgtcacggcctgaacgacgagttgtatgcttcagttcagaaactagtgttgaataagaatccgacagacttgatagtgcttcattatcgaagtgctacgaattgttttgctgggcatagtgatatcttggaaactaccattttacttaatcatgagtaaaaattttggggctgctatataccggtataccgttcggacagtataggcctataagcaatttagccggacaattccttccgttcaattagtatgtcagttatcgtgtctcaaaaggtgtgtcatgtcaccccatcgtttgtcattctgtccacgtgcatacgcaaaaaatcttcatgtgatagctaaactagttcagtatagcaagtagtagcctacctagctaccaggtgtcaaatctgatactaggtaggtatcacatctgataccgggtgagcatcaattctattatcaggtatcacgtctgataccgagtgggtgccatgcctcataacaggcatcacacatgtctgatatcgagtgggtgccatgcctcataacaagcatcgtgtgtgatatcggttggtatcaagtaccatataactggatggccaagtatcatatttgatacatggtgggatcggtcttgataaatgatacctggtggttatcaagtcctgatatctaaccggtatcatgtgtttctgccacgtatcaggtgatacttgcgaggtatcagatgatacctatcaggcatcatgcgattcttaccacgtggtgggtgatgcttgcgatgtatcaggtcctgatacctagccggtatcgggtgacacctatcaggtatcatgcgattctaccatgtatcaggtgatacttgtgatgtatcagatgatacctatcaggtatcatgtgattcttaccacgtggtgggtgatgcttgcgatgtatcaggtcctgatacttatcaggtatcatgcgattataccacgtatcaggtgatacttgcgaggtatcagatgatacctatgaggtatcatgcgattcttaccacgtggtcggtgatgcttgcgatgtatcaggtcctgatacctagccgatatcgggtgatacctatcaggtattatgcgattcttatcacgtggtgggtgatgcttgcgatgtatcacgtcctgatacctagccggtatcgggtgatatctatcaggtatcatgcgattctaccacgtatcagatgatacttgtgaggtatcagatggtacctatcatgtatcatgcgatttttaccacgtagagggtgatacttgcgaagtatcaggtcctgatacctaaccggtatcgggtgatacctatcaggtatcatgcgattctaccacgtatcaggtgatacctatcagatatcatgcgattcttatcacgtagaaggtgatacatacgaggtatcagacgatacctaccagatatcaggagccgggcactaaagcatcgtcgccgatggtcctaccgtccacgtcccgagccggagctcgtcgccggcggccacatcttccaccgtccgtgccatgtcggagctcgtcgccggcggccgcgtcctccatcatccacgccccacgccggagctcgtcgccgacggccgcatcctccaccgtcgatgccacgtcggagcttgtcactggtggccgcgtccttcgtcatccacatcccacgacggagctcgtcgccgacggtcgtgtccttcgtcatccatgtcccacgccggagctcgtcgccgatagcagcatcctccaccgtccacgccacgtcggagcttgtcacgggcggccgcttcctccgccgcctcgacgagctagccaagtacgtgctcgtcgtgctccacgccaacgacgcggcgagggcagcaccttcgcgctctacttcctcatctgtctttgcgtccgcgctgggctcctcctcccctgcgccggtgacggcgctgccggcaaggagctcgcggtcgcgcgcggggtagtgcgtcgacggtgcgggcatgggcgccgtagcgccgcggcccatgtcagccatgcgtacgtgctggagcggcactgtgccctgtacaggctgctgctgctgctcgggacgtgcatggtcaggtatcgttcctctttgaattagcaagggtcccgtccggacgggattccggtatgtagcattcccgaaaattttactgattttacttttggtgatgtggataaattttaaacgtccaattttaaatcaataaggtagttttaagttttctttacatatgtggtttctactacatattttccttgtatactaggaaatggatgttaaacttagcctaccctgtatatttcgtccaaaacgctacctattgagcgcctgatggataagaaaatattgagcatttgttccacatatcccgtgaccccctctctctcgtctctctcccacgcaagtcctcaacggcggactgagagacactactcatctcctttgtgtcgtcgagcaacgcccctgttggattggggggtgggggagggggcgtcctagcttcccgtgcagctcccggcaagatcctacggacattggcatgggcagaagcagcaagaacacaatggtccctacaagaatctggaagtagcgtgcctcctgtttgtcggcgacgatggggtgacgagggcttgggcagcagcagctacccgcctcggtggagtagaagggcactatgacatcttggtgtggatttgcaacagagaccaaaggagccaacgatcaccaaagaggaggaagaaaccagagttggaccaatacattttcatgattttttttgatgttccagccaatatatttggatgtttctgttataaaaccggcccgaaatcacatcggaaaccaaacgcggaagaaacgtcatagaagatccaaacacgatgacgacaccgaggcacgatatttgataacggagttcagccaaggcctacatctccggggcactgattacgggcgctcctccctgatccagcatatacaacgtatcagagttacaacgactcacggccggtcgatgccggcagccgctccctctcgctatgctaagtcgccatacggttacaacaggcacgcccctctatttatgagagaatctaggatagagtcgacttatactctagtcctacacctagtacaactccaagtcctaaactgtaaccgactacgtacacatattcgacacaaactctaacaaactccaccttggcgaatatgtcacgccaatccgaatctgttacttgctcgaaccttcgtgtaccaagacttgagttgatcctttttcgccgctcacgccgagctgccccgacaagcctccatcaggctcaccgtaaacaagagactcccgctatccttgtaatttcttcctcctgactccacctgcaacattgctccaccttctctcatatcaccacagtcatcttgccaagtgaattgaattcttcctagctgtcacatcatagactctccgaagaccatgttcaacttcatctaccgtcttaaatttgacttgatctaatccatggccagataaccgatgtcatcaccaaatagataaatcaaactcaccagacttgaagagaaccctttcttccttgtcgtcttatgaaccgagctaattaataaatccaacatccacgctttcccgcatccttagactgagttgtatgcttcagttcagaaccagtgttgaataagcttccggcagtcttgacagtgcttcattatcgaagtgctacgaattgttttactgggcatagagatatcatggaaagtggaaactaccattttactcaatcatgagtaaaaattttactaattttactattgtggataaattttagacgtccaattcttaatcgaatagtagttttcaagattttattacatatgtggtttccactacatattttccctgtatgtactactaggaaatggatgttaaactcggtctaccccgtatgtttcctcaaaaacgctacccatcgagcatccgatggataagaaaatactgggcattcgttccacatatcctgtgaccccttctctcatttctctcccacgcaagttctcaacggttgtcggagagatgctgctcatctccttcgtgtcgtcgagtcatggctgctgcgagcagcgcccctgttggattggggggggggggggcatccttcccgtgcagctcccggccagattctgcagacatcggcatgggcggaacctgtaggaagacagtgatccctacatgaatctgtaagtggcgcggctcatgttcgttggcgacgatggggtgacgaaggcttgggcagcagcagctacccgcctcagtggagtagaagggcattgcagcatcttggtgtggatttgcaacagagaccggaggagccaaccaccatcggagaggaggaagaaaccagatctagaccagtacattttcatgattttttatgttacagccaatatatttggatgtgtcttgggggttgaatctgtgatggatacttagatggtgtttcatatttctactttcgatttctttcatatttgtgatgtttcagcgggttgaagcttgacgtttcatccatgaaaacaaaatgtttcaatggtgtttcaactatgtttcacgatttttgtaggctgacaaattttctatttagtagtgaaacattttttttctagttgcagtgaaacatcgctcgatttttgcgctcactttgtagtcgccttcatgttttgtacttttgttgccccaaagcaaacatcctgctaggccagaaaagcttattttaggctccgtttgggaaactcaagattccgagaaactagtcggtgagaatttgtaaaaatcgggtttcttagccacttacccttgctgcactatataacgggagaaagtcgtcatataggatgtttctccatatttataaagtcctactctatataatctatctcttataatcgttcaatgtcagacaaccgtacgtgcccttgattagtgcttgctcggaccatgggtatgagatggtttcatcagggcataatccagcccaatgtttataacctaagactccagaaccgagccggattgtcttggatcgatccaaacgggcaattttcccttaccattgatctcgtgtgatgcgtaattgtgtactactgcagatagacatacagccagatccttaccagggttccctgacttaaaatccaaactgtgggtgctaatcaacagtgtacagtacagtactcgctcttatattcatttaaaaggccatcgtcaactccttgatatgcatgatggatcggtggcatcttgaccctacaaatattgaccaaaaactaattgaactactactcctgaagtagcagtacaaatacattcaactatgcccatttctgtcgccagccaatcaccttcccaatatatccatcagattttctgaatacacaacatgcctaacactccagccattgtgtcactggttctgttgctatcatgcttggtggcgaccggtgatcagcatgcaacaccagcagcgtacaagctacccctaatcgtccctctcatcagggacaccaacacctccctctacacgatcgccatcaagaaagacgatgcccctctcgtcgtcgacctcgccggcgctctcgtctggtcgacgtgccggtcgtcgacgcacgccacggtgtcgtgcctgtccggcgcgtgcggcgcggccaaccagcagcagccgcgtcgctgccggtacgtcgacggcggctggttctggtccggccgcgaggcggggtcgcgctgcgcctgcaccgcccacccgttcaacccggtcaccggtgagtgctccaccggcgatctcaccagtttcgccatgtcggctaataccaccagcagcggcaccaaactgctgtgcccggaggcgttcgccaccgtcggcgcgtgcgcgccagagcggctgcttggcgtcgctccccgccggcgccaccggcgtcccggggttctcccggcggccgctctcgctgccgtcgcagctcgccgcgcagcgcagcttcggcaacaagttcgccctgtgcctccccggattcgccgcgttcggcgacacgccggtgtacatcgggacggagagtctaggcatcgtcaactacacggaaagcctcccgtacaccccgctcctgacgaacccaagaaaccccggctactacctccccgtcaaaggcatcacggtgagctggtacgggcggaacgtcccggcgtccctgcaagccggcgcgctcgacatgtacgcccgcacgggccgcggcggcgtcgttctgagcaccacgacgccgtacgccgtcatgcggcccgacgtgttccgcgccttcgccgaggcgttcgacgccgccatacgaggaacggattacgccaaggtggtgcgcgtgccggcggtggagcccttcaagctgtgctacgacggcgcgttcccgttccggaagcggccgccgacgtgggacgttccgacgatcgacctggagctcgccggcgccacgggcatctggaggttgttcaccgagaactacatggtgcagacgccgcgcgggatgtgcgtggggatcctcgagatggaggccggcggcggcatgccggtggacggcgagccggcgatggtgctcgggctgaagcagctggacacgaaccttctggtgttcgacctcgacaagatgttgctgtggttcagcggggagctgtcctttcgcttgacgggctgtgtgtcgcccttttgagcctggttctgaacgtctgacgtcctgaaatggcggtgtttgtttgtttttcttttaaattttgaaatatggaggtgtttgtttcagttttgtacaaatgttgaacaaactctcggcagccttcatagagtttcactgcagcactaaaatgctgttttatcataaagatgtagaaacgaagaaggtgttgacacgtaaaattacagaaggttgctgcctctgtatatctttcgatcacaagaccagacaccagagcagcatcaagttacaaaataaaacactcagctgaataaggttttgcgattgttttttcacttatgactgaaaaaatggccatccgttgaaacggataagatgtttttaatcctttcttttggcccaacccacatgtggagccctccagaagatggtgccgtgcccatgcccttacgatgcttaaactgattctccccatcaaatttggccgagtctttctcgatctcctaaaattggtttagggcttttgatccactcgatcttctctttccgtttttctaaaattggagcgaacaaaactcatgataaaaacggtaaggaagcttgccggccggccatcatcggcgacagttaaatggtgattaaatcaggccaagccgaattgaaggagaaaatcataggaaaaatgatgagcgatgagtggggaatcgatttttgtaatccattggaggaggaaacacatggatagacaaattcgacgtggtgatagaggtagggttcggcctagcgaaggaaaaacacggtgaggaaagaaaaaccgaaaactagaagcccttactgcatgcgagaaaaaaaaggggaggaagaaaatggcaaaaaaaaactggacggaccattaaaaaactgtttgaaaaaaaatgtgagaggaaagcggcgactaaaaaaaatattctagtaggtatatatacattaaatcgactctaacagataacggaccacggaaacatcttcaatctttatctacttatattatatatgatatatgatatctgttaccttctaatgcagattttttttttcaaaaaagcacaatacaaacgcagacaataagaggaaggctactttttaactccacagcgaatagtttaattcagcctacagttaactctcacaacaaagaaacacagttgcatcaccactttgcacgctcgctgcttcctgggctgccgaataagcgatcgagccattttggacctatcttgggccaaattagagcaagtacagtagcaggctataaaccagctgtaaatatattttaagaagataaataaagagagaatggcagcggactacagatttgtagccagctatagcacggactctaagacgcagtgtgtgtatgacaggtgggaccagatattaatagtgtagtatgtaactattgtatgaatgagctattagattggctatagatgaattggatctagtagttggctatactattaaacttgctcttacggtcattccttttccgtagcattggcccaaactttgagcccattaaaaagtcttacatacactaaagcctagccgagaaatacggcagttactactcctggcccagtacgagcgtgccgccatacaacatgtgccttgggcccatgcctcgggcccaccccgaccaaactccaaaacccgagaccaccaccaccactccaaactccactcgctgaactagctctcacatctcacgcaaacacacgcatctacagctactacagtacgccgcgcgccatacaaatcgtcgagcaatccgcctcgctctcgccgcccgcacccacgctcacgcacgctcgcctcaccacccacagcgcacgcggccaccaatggcgagcgcccgcgcgcgcggcgggcgagccttcttcctcctcgtactcgtgctcgtcgtactcgcggcgcccgcggccgcgctgcggacgtcggccatctccgcggcgccggagtacccgcggctccccaccgggccgggccacggcggcgggaggcacgcggcgcccgcgcccgcggcggtcctcccgccggcgccggcgctctcgccggacataatgccgctgctcccgtccccggggcccgactccgacggctccgccgaggcgccgtccgacgtcatgcccaccatcccctccagcccgagcccgcccaaccccgacgcgctcttgccggactccgcgctcgccccgttcggctccgcgcccgccgtcgccgcccagtcccgcgcgccgccgccgtcgacgacgacggcggcggcggcggcgtgggcgctccccgtggccgtggggctagtggccatgtggttggtgtagtgggcgagtggtgcaagcgacagcagctgcagctgcagttgcagccttcgggttcagtcgtgcaggaaaaaaagttggccgttggttggtcggttggctttgtattcttggcagcaaaaattgtgaagaaattgttgcttcatttcactaaatttttttagctttcgatctcctgtaaatttttctgtcaagtttacgtaattgtttctggatgggggcggctacatgctatagttttttttttctttctgttttgtaattgttgttatgaggggattacttggttcattgctgtaataaaatcagagaggataatagtctgttcctatcacttctcactcactgaaacttcagttccaattccctgttcttgtttcatgttcatgttctgcaattctgcatcaacagttgatagttgatacacgagccaattgttcttggtttgatgggcccacaagccagtcacagtggcggtgactctgcttcaagcagtaataatggtatttatgattgttttggtgttcatgttaggagtatttgatgctgattaaaccattcggtgtacaggctagggaattatttattccttctctttccagaactgcgcataacctgaaaaaagtgtggctttatgaattaataaagaacaaggaaaaaatatctaaaagagaacataataattcaccagaaagtgcagtatgcaactggaacgccattcatcgaaattctatattctctctttcctgtttctttaggttgatgatcacctcatgattaccgtaaagcttctggcgttgccactctgccaagaaattagtaactttttaagacatgatcaaactgcaggcatgtgatcttgtagtttaattcatggtaagagaagctcacgtggtctctgaacaatgcatctactaccaaagaacatcgactgttgtttctggaaaccgtctaataaaaaattggaagctcctaatcagactatcagaggatgccgttggaccagcatacttgtcaaggaaatggtttttcttttgcaatttacagtattttaacaaatagtatttgttcttaataattactagcttcctttgctctctcggagaagtttacaagataactgcatgagctaaggttaaactaatcaaagaaaagtttgaagataaggatgagatatgctatgctatgcaaagctggtggtaccaaatcaaggatcagtagaaagaccagctgtgcattgttgtcctgacatatcatggacaaatgacaaagaacaaaaatgtcctactgttctacctattcccatatcactgttccactctcaacctggcaggtcaaaaaagttgtcacccaaagtaataagttcaaatgcgtgattattaccacatttccagaggtccatttgagtctctgaatcagaaacattcagacaacaactctcacaaaatgttctgaatttaaatcaacagagctgatatttagtagtataaaacggcaatgcacgaacatgtgaagtgagaaaggaagctggtgcatagctgcaaacacaaaaagggcatccaatgataggaaaaggacatccgtgagtttgagcatgatcaagatgggatcagtcgaccatgtcttcttagccctgacctgcccagtctcttcacgtgtagtgtccatttgccattcgcctctgttactgtttaccttatgattaatctgccaataagcatctaaactaaatcactcctccggtaattgttaatggagttacagtgtcacgtactatccggctcagcatccaacgcagatgcacagtgaagtttactgctcgatgtcgaggtaaaaacaagactgaacatttgacaagacttttgggtatgagggaagctgagcagaggttcccaagaacaacaaaagagcacgaccggtgtctgaagatgctggaatggtgaaaatggtgatgtgaaagaagcatgtgagcgcgagtgtgtgtctatgagagaagattcgtgtagtgagaagaggccaatggatggagtgttagtattattaagcgaggcttgtcacgtgaatgtcctagctgctcctcatccagagatgggagggatggttggaagaatctccattgtttgcgccgtgtcgtcttggacgtcaggattggatgctgtcctgccaaactttaggggaagagagaagggagtagattaacaacatcattgagggatgaagttagtgtgcttagggggtgtttgggagagaggggctaaactcttaaaaccataagtctctagaggagagacttactccctccgtcccataatagatggtgtttttgactttttatttgtaacgtttgaccatttattttatttgaaaaattagtgcaaatataaaaaaagataagtcatatgtaaaatacttttgataataaagcaattgacaaccaaaataaataataattccaaaattttttgaataggacgaatgatcaaccattgataaata

SEQ ID NO: 12587 - DNA, 520 bp, Oryza sativa
ttacaagggtatacgaagggtaagcactagactaactttacttgcagcatgctagacagcatttttaatttaagagttacttagttaggcagtcaccttattgaacacacatcataaatagaggacataggactgttcaagacaagacaataagttaattctctgcttaccctatttcatttcagttcgtatatagtgcaccaaatccaggtcaggctgcagctgctgctgcaccaattgcagtttttactggtgttactgcaatatcatttgccgcttttcctctcagcaagactttttcaatcgctatcctgcaagcattagcatgtggcgcaataggagccgtaatcgttaacagagtgatccaaaaacagcttggtgacctactgtcctcagaagcagaaaagatagcatctgctgataaggcaaatgctcagcaagttggatttctttcggacatagctggaccaacaggagctcaattgcagattgtatatggtgtatttggatacatgcaggt

SEQ ID NO: 12588 - DNA, 536 bp, Oryza sativa
actatagggcgaattcgagctcggtaccccttctccagcctcgccatctcctgcccgatccccgtcgggaggtacgacagcacgttgtagctcacgtccagctccaccagcgacctgtacgtttggatcattttgtgatgatcaccattagcgagaattgaagtttctttaactggatctggatgccattggggagaagaagaagatgatgatgatgcgtgctttggccttggctggttgattctacctgcattttgagatgctgtcggggagagacctcagcttgttgcccgagacgtcgaggatcttgaggctggtgaggaggcctatggagtccgggagggagaccaacgcgttggaagcgaggcgaagctcttccaggtgttcgagcccgcctatggcatctgggacattctgcaaattcaatgaaaatagctagtactaacagatggaaagaaaataaaactgaactttacagtgttttctagctttgtgggactgtagcctgtaaaccagaaattcttgaatggaccaca

SEQ ID NO: 12589 - DNA, 1314 bp, Oryza sativa
accaaatcatcaccacaagagagctcgatgtacgtacaaataaattcaaaatttcattacgtagcgatttcttgtttaattactaatcaatttcatacattcatatagtttattcgcatgagggataacctgaccacacacaaggaatttatcgcggcggttcaagaacaactcatgggattcatcaacaaagaaatccttgatcccaagggtgaattctactacgacggaaacacaattcaccggtccttagcttctgagctagcagcgagtactactacgtcgaaatcgtagctagctaggacatataatggattgtaattaatacatgactacatatgtttctatatggatgtgtacacattttctataatgtaaatatattttgttcatatatatatctatatacatatgcatttgcataacatatatatgtataaatacatatatatatatatgtatgcatatatatgtattgaaacatatatatgcatggtttatatatatatatatatatatatatatatatataaaccatgcagcaacaggggcatgcaaaaaaaaaaggtcagctctatctttagtcccggttggtgttaccaaccgggactaaagatcgatctttactcccggttatttcacccgggactaaagatagcgatctttagtcccggattggtactcccggtttggaaaccgggactaaagggggttatgaaccgggactacaaagggtttcttcaccagtaagacttgggacgcctggccagggatcgtagcagagtaacggagatcgcaaggaaccccgtacatgttgtctccgtcacggtatcccatctcctccagtgcccctataagcttcgcaaggcaccattctctgcagatcaagcacacacaaaaaaaaaaacagcagcagcagcagctatgtatagtgtccactaggaattaatatagtgagaacaacattagtgtacgtaggcaggattgttttaataataagtactctctccgtttcagattataagacgaagtcaaactgtttttagtttgactatgtttgtagacaaatatattaatatttataatactaaattagtttcatcaaatcaataattgaatatattttcataataaatttgtcttgactatttttttcaagtcaaaacgtcttataacctgaaacggagagagtaataattgctacagacaaatagtacatcgcctgtagtttggtggtcttctattccttgtcttatatttgtaatcctttgataaatttgatcgtaaatattttgtcttgtgatagtttcgtca

SEQ ID NO: 12590 - DNA, 1970 bp, Oryza sativa
catcgagctctcttgtggtgatgatttggtctgcaaggtagtggcaatactcgcacacgtaatagccgcacaagttagttccctgcttttgctttgcgcactacaaataaatgacaaacaacgagagatctaattaatatacacttgtatgtatttgaatcggagaaatataaatgtagagcatgtgtactcacaggaaatttgaacttccgcctaagtctttctctccatttgccgcggaccaaatgacggaaccgataccaagccctacatggagtttaaagctatgattcgtagtagcaattaacataacaagattttcttaattaacaaaggaacttatgacggtacctgtctataagttcgaaaaccttgtcaaacgtagactcttttttatccattgagtcatatacgttgacggtgcaggcctccaggtcgatgagtaaaagcacccagtggaatctgcaatgtgcgtgggatgcattacatatgaaacacttagcaagttcgtacgggaaatgaaatttggtatgtaggaagacagtaaaattaaactaactctgtgttgtatggcaacagtatgaacgtcttgtaatgctgcgccttcaggagatggacgagattgtcttctgtttcttgtggatattggtcgagcattgcgacgtttactttccgagggtcgatgaatccagtatcgaaaaccctccgccgtcgggccctttgaatctccattctacaacgataaaagggagtatattattttctatggtctacttatatacaaggacctaattaattaaaggagacgtatagtaagaaatctaactgaacgatatacttacaaaatccagcaactcataatagagacgtcgagggcgtccagctggtatagttcgtagattcccctgaaattgatccagagaatgtcatctccttgcaagaagtccgtgtccctgatcctcactccgatcatctctctaccggtggcgctcatctccatgtacagctgatggaacttgtacatttgtgtgggtagggactgcagcagctcaggcttgacaagcggtttaccgagttcgtacatgtatttcacttccgccttttcgattggtgcgactcctagcaattgatccgtagttagaccggtgtcagtaataaattgttctatcgtcatttctttaccggtcaccaacggctcgatctcctggtttggttgctctccaagctgagggactggtttggactttccagaagatgctttcttcagcgttcgctcatagtccgatagcttgatggcctccttgacagatgcagacatacccctgaagaagttcctgacactggggtctataggaatcttcttttctggacttcgaggcttgaattgtctcttgacttctgatgcaacgtaagcgtcaagctcctcttgcgtgcaatcgtaccccgggtccttgatcttggcggcatcaactttcgccttctttgttgcccttgtgtgggcaagcggtggagctggggggccccttgactttgaaggtgccggaagaggagcttgcgggggagtaggtgtaggagcacgaggaggagtcggtgcaggatcctgaggagtcgatgctggagcctgaggtggagacggtgctggcggagcatgagaaggagacggtgcaggatcctgaggaggagatggcggagccggaggagatggtgcacgagacgccgcttgtcgcccagggaggatgatgtaccgcctgcgccatagaataatggcatggcatgtgtctcgtagatgcgtctcaccgtctcctccagggtaatccagctcgaggtcctcgtacgcgccttcgaccaactcaacttcgaccttggagtatcctgctggaatcggcctgcagtggtaagtacctgaagggtctgttgggatggccatgcccgacgccaccttcatgttgtgagagattatttattagtaa

SEQ ID NO: 12591 - DNA, 529 bp, Oryza sativa
tcgtagacgcccaacagcggcggcataataggccagccgtgtaggcggaggatccactcggcggcgacggaggcaggccggcggtgaagtcgtagacgcccaacagcggcggcataataggccagccgtgtaggcggaggcaccactcggcggcgacggaggcaagccggcggtgaaatcgtagacgcccaacagcggcggcataataggccagccgtgtagacggaggcaccaatcggcggcgacggaggcaggccggcggtgaagacgtagacgcccaacagcagcggcataataggccagccgtgtaggcggaggcaccactcggcggcgacggaggcaggccggcggtgaagtcgtagacgcccaacagcagcggcataataggccagccgtgtaggcggaggcaccagtcggcggtgacggaggcaggccggtggtgaagacgtatacgcccaacaacggtggtgtgaccaaccaaacatataggcggagacaccagtcggcggcgacggaggcaggccggcgg

SEQ ID NO: 12592 - DNA, 533 bp, Oryza sativa
agaatcaagacatacttccttctctgtctcaaaaagttcaccctcggtcttcttggcctttgccttcttgtcccgggcaaagtacttgtcatcaaacttatccaccttaacaccagagatgtcaaccttcgtggatgtggcaatgacgtaggcctggttcacacggcggatgggcactccattgatcttaaaaggtcctgaaggagaacaataagaatttaggccaaaatccagtgctttgattgtaaaaatctgaacccaaccaattcattgattgtaatcagagcttaaccaatttcctggcttaggtcagatcccatcaaaatgaaattaacttgattaaaacaaagtgagactattacattctactaaaaacatcaaaatatgccagagggtgagtggcaaaaatatacaattccctttttgcattcagtgtgcatgttatatggaatttccattacaaaaaacagcacaatccattttacatctttgtattacagatgcaaatttcagctcaatctatatcaatgagg

SEQ ID NO: 12593 - DNA, 622 bp, Oryza sativa
cccgaagctgttgctcccatcaagccggcggagaaggtgggcacgaacaccgggtagccgaacgcggcgtccgccggcacgcaccgcgcacaccccgtcagccccctcacgtacatgtcccacgccctccccactccccagtgccctcgccggcgccctccacatccagctcagcctgctccccctgctcatagatggttgcttggtttgggttgggttgaagacgatggattttggttggagacatggagctctcaccggtgaagggtatggctgcctcttatacaaaacaatggggggagcagccaaagcaagtggatgggctggtcggctggagatcgttgaggtggccaccggcgagcggttgtcccgctggcctcgcgcgccgccgctccgaccaccgtcgccccactccacccgccgtcccagtccacctgctttgccttgcctctgctctgctccctccaaactccaaattaacagagagaggctctccgctttggaaattttggaggggatggagctccatcaccatggaagcagcaacgtctgaggttaggtacctaccttcgtctccccccttccctccatgttaatctctagtattagtcaatgcgcataa

SEQ ID NO: 12594 - DNA, 5553 bp, Oryza sativa
catgagaaggcgcaaaaattctagttagagttatgtgagcacacttaagttcatgttggcaacaacagaccagtactgcagaggtatacactacaatagagagactatgcaaagccaaaaagtgaagtggtaaatccatgtttctaaaaaaatgtaactgaagtttagatgattggtatgttaaatggtgacatgatgctattactttacatattctagacacattttttctattaaaaaaatgtgtctaaaaattgtaaggtcatcatgtaggcagttaacataccaattatctaaacacctatcaaacacagggcatcttgatggcttcaatgtttcagacttctcaacctatctgaccgcactaagtcagtctcatcaaagccaagctgtctggcgcctaacgtctatattacgcaagtatgcatcgtacttatattgaacatatggataaaaatattgcatggtcatgtcggtcaactcagactatttgacatttcacacatatttatgatgctactcggttgagaaaagaggccattaccacataaaagtaccttgtttgcaaatatacggcaagcaattggacgtgggcaatcctgtccatccaaagcttaataagctcaccagcccttgctctgcaacaaatgtttaggggtagatttcaaattaaataaatattcaaatcaaatactcactttaaaacccttcaaaaacaactatatgaccaaaaggcaattagttcttatcacgcgtcaaatgatggaaaaaggagaatagatgtagatcttttttatttaaatgtgcttatgtgcattgagctatacggatctaggcagataaaaatatgttttatatatatactcactttacactgtcagtagtcggcataagtttaccaatagattttgcaatttgtcggtcatatctgctgaactcctgcacaataaaaacaataatagtcaaatacaagcttaccacaattctcatccatatggcaaaagaactgaaaccagcagggtgaccatcattcatcatcaatgttaaaacaacaaatttgcagcaaattgtacaaatgcagttggaagaccttgctggaatgaatgttcgctggcacttgatcaagtaatgcacgcctccgcaattctgcttccagtgcagaatgatcagcaaagactttgatccctgttatgaatgagcaatcaacattaatatcacagtccttataaaatcaagctacgatagtcagccagtgaccagtgtagttaggaaattaacaccaaggctagaaattattcttgatacaaaaatggaatgtctgatgcagcgcatgaatgtgaaagcagaaccacagttttccctcgtgttatttatgtctgtatgcttttaagcgttgaaactgtgtatcccttcaagttttgcatggttcctggatcccactacaatggattttaattatatttcaaatattgctgttaggagtaggttgtctcagtaccacaacctttgtgctaattaaggaaacatggtaaagttctaggggctgaacatgggttttgcatagttgaagatcagttaggggtgattatccttctgacatgttataatacttttacatgatatatatggcccttcatgagcctaagcccacagtctaaataagtaaatatacaagaaaaatgagaaggttaatccttaaatttacgttttagattaatatccaccatttgatgttcataagcattaagctgtgataatggctgcctgacttagtatgaaaactagtttttaagaaatatgtatatagacacaacctgattctactaagcatatcaatcagcagatcttcagaatagctccataaaacattgcgatataaacttataatggttctgtaaaagcaagaaatacctggtaattcagatttaatttcactcttgtttgccctcattgttcctgcaacgttgttctgagaattttggctggatttggaaacctcagctgctgctttctgagcttctgctgcttcctttgcagcagcctcagctgctgctttctgtgcttccactgctaactttgcagctgccttctgtctggcctgcatcatagttcatgaaatttctggtaaactggttatgcatttaagcgactaccagtgaagtaaagaaaattaggtttctgaactacgtaggttgtaaagaagttcagtgaagaagtaacatgaataacaaggtattagatataactgaactagatggaactcaatggactaagtattatgataaataccagagccaaaagaaataacaatgaattaagtctcacatattgacatatatcaaaagaaatatatcagtttatgttaacaaaaacacaccaagtgaccagcacatctaggcaaacaaacctctgcttcttgtttggctctttcctgccttattttttcgtccttcatggcttgctcctttcttttagcttcttcaagagcagcatcatctcttattctacgttccacaatttgcgatttctgttcatgatccctttggaccatagacaaatgtttatcaagtacttctgcactgcaaaaaggcaacaattataacaaggtacagaatccaacaaaagatcatcagaaaatccaagtataacttataacgaaagatcatcagagtatatgtcctttatcctgtgagaactactacaaaggaaaacaaatacaaacgctaacatgcaaagtttctgaaaaaatatttacagtgctaatgattgaactggaacataaagttactacacaaagaagtacaaaaactatataattgtgtcacagatagttaattccttatataacacaaatagagcatttaaaaaatagtcaacccttagtctcagtcgctaatcatttgaccaaacaccacaggtataagtatggaatatttgtacgttaaacccacacgatttaatcagttgtgaatagaatatataaattgctgcaaaatgtaaagagctgaaaccttgggcttggaatttctcattgatcatttaagtagcaaatttaaccaaataacgatgaggataatagcaaatggtggaggaaacattaaggatcttagtattagtccacaatcacccaataaacctttatattggaatttgggcatataggagatgattgttttctcttcaaaactatgtgcactagaaataatccatgataaactgtgtagctactagcaaggtccgtcagccttcatgaatatataccttttccactcaggagtaataaactatattggaatgaaaaacttagcactttgtaagccctctttacaataaaataaattgagttatgacaaataaaaatggcataactttacaaagcaaccaccaataaaaattcagtcttgacaaactagtacaagaatatcttgatatgtgccacagaaaatcctccagtaacaaaagagaacaaactagtacagaagttaaccctagtcccagaaaattgcatcaccaaagaccttgtaaaacatacagtttcctcaaaatttgaaaaatcaacagtaatcatgaaatgtagatttaaaaagacacaggagaaacaattcaacaacaaaaacatacatttttctctggaagtggacatctagccttctgtctatctcttttcttgattctgcgtatttctgtagtcgagcaaatgcagaaactgttcgctggatttcactttggtggcatacctccaatgcagatagtttacttctgacttcctcctgaagaaaaaaaatcatatgaagaaaatgaacaaaaaggattcagcagatttaataaatccatcatggtaaaaaataaaggcatgcaacatcagccaaaaagataattagtactatgatacccaatacttagaaatttagtcatatgacatccctgttggctttctatgttaaacttcttggatcacaatatccaatttgaagtaaatgcagtattgtatttgaaaaatcttcttcaagtagcaactaacagaagtgatgtattgtttttcttgaaatttcatcatgtcattatccaaccatatcagtgtggcactacactaaccttaaagggaacaaacaaaagcttcattcaggaattcatatacagtataaccttagaaagatgaaagataatggaagcatccacatgcctggatagcttaaaatacctacataaaggtgaggaaaaagatataaagttgatccgtaaagtgtaacctaatgccatggtaaccctaaactagaatgaggattaatggtaatgaaaataattcaatggtctattgccaacacatcaaagaaaaatcagcccataagtactgcattcagtaagaaagatataacagtatagattgatgaatacacacttgaactttcagatgatgctcacgttccagctcaagcagaatgctcttctctaggctccgtttctccatcaggtgatatggtgcaatcctgccatccatttcatcctctgattcttcagcatcactaggaagaaaacaaaagaaggggatatctcacacaatacgccattcatttaaacttaattgcagataatgtaccgtacttcaaagcaaataaattgcaattgcagtggccaaatttcagcatcaaatcttcacctggattcaagatcattgcatgagaaccttgctccagtggccttggccacaagagcccgggactccccatcactgtcgtaatcgtcctcatccgtgtcatcttcctcttcaacccgcatcacaaaggccttctccctcacgctgccactgctagccctaaatgaaccaaaaaaaaatcatatagaagcaatgtagagggaaacgattgcagcttatcggcgaaaccataagcaaggagcgcaagggattggagaatagagataccactccggcggctgcttgaggggcgtgggctgcccggtgcggcaagtggcctcgagcgcgtcgagctcggtgaggacgtcgccgagggtccagctcgggcgggggtcgagggccctagggcaccgcagctccacgcgcgcgaagcccctgcgaggaggaggaggaagacgtagagatcagcctgcctgccattaacgaacaccaagcggtgacgagcggaaacggcgatggggggctcacatggcggccgtcgaccggcgaggtccgccccggagcggattggagccgcgccggcgcagcaaaaccccctaagttgcgggaggcggcggcggcggtggcggagaggcggtggacgctagttgggtctcccggctccagtcccacctccagccgctaatggagccgtgcagacaagacgcggtctcccttgctgccgcgcccggttggcttcctcgccgtcgccgctgcgccctgccctcccgtgccgcggtgccgctccgcctcagactggccgccgccgccggagcgcgaggccgggatgcgccgccgccggacgtagaggagagatgggccttgggccgaacactggttccggaggtttcgcttgcttattttggaagtacggttttctg

SEQ ID NO: 12595 - DNA, 987 bp, Oryza sativa
gctcaaattgcatacacctaattccaataggcaattaagcaacctcattataaatggcacataaagaacaatcacttggacgcaccaatttgttaaccaacagataattaatattagttccccaaagaaaaagaagataatgaaattgatatatatgtaagcatcagaactagcatcaagataggtttgtcaagcaagcaaaccacatcacagatgatgctaggctgatagcttatataatctgaagcaagaaatgtactacatccgtacatgtgtaactctacaattccatgtggcatcaagctcaatagatgaacaattgaacacatgacagtagatggcactgcatagccaaattagttgcaaacagatgtatctttgtcgtgaatatcacaaagtatgcaaattcacttgaagagaaaagtgccatactacaatttcacatgagcaacccctaaaactcaacgcgtaataacaactacagagcatttcgcaaagagtaaacaaggaaaattctcacggtggatatgctccatccagtttacttcaagatcgtattgatgacgccggcaccgacggtctttccaccctcacggatggcaaacctcattccctgctcacaagcgacgggctggatgagctccacaaccatcttgacacggtcaccaggcatgcacatcttcgcctcctcgtccttgtcgttcataatctttgtgacattccccgtcacatcggtagtccgcatgtagaactgagggcggtaaccagggaaaaacggtgagtgccgtccaccctcgtccttcttcaggacatacacaaccgcatcaaacttggtgtgtggcgtgatggaagcaggcttcgcaagcaccatgcctctctcgatatcatccttctgcatacctcggagaagcaggccgacattgtccccagccatcgcatcatccatggtcttctggaacatctcaacaccagtcaccgtgcagttgc

SEQ ID NO: 12596 - DNA, 1675 bp, Oryza sativa
aaggtcagccaaaggggcctcgttggcgctattgacgtcttcatactaatcgatggggtcgggcaatgacgcattggtgcagaggaggcatggttgagctgatgtcatgtgatgccatggagggaagagaaaaagaacaggagggttatggtttggagggatttacacgaatcttaaagcaacccgatgatctaaaatctacaagattgtaggggctcccaaaatttaactccaattaatcttggattagggccgaaacaattgatgatacttgttcatgctgatgttgctgaaacaatgtttctttgtagaaatgaatttacatcttatgttgcttgcttcatagagtagtgcgaaagagatgcgcacgatctcgcttcaatctgatcgcattgttgtccttggaaacaagacaacgctactagaacagggaaccaactcatttacctggcgaagtatgcaaggcgacaattaatggaggggatacactgaccaggattgggcatgcagaaatatgtgttcagagcacttcgggagatgctagcctttatggccatccagttcccaggctcccagctttgcgattggatcaggggagtgcaaatgcagtcatgtcgggccctggggtagagaggagcctgaagaacttgcatcactggctcactggctcactgcatcacaacacaatacaacgaccgcgaacatagttacacaatccacaagtactcagcaaatatgcaaaagccggatatggtgtaacactattgccttacgccagtaatctacgaagacttcattgttcccacaagagagattactagtttggcaacaagcgaacaacagattatataagacagcacatgtccagagtaacatttacttcgaataaattacaggctcgccctcaatacaggcgtacaacaaattgcatcgcatctaatctatagtattcgtacatggcatttatacattaatattggtggcttaaaaagggagaccttgggggcgcaatccaagacatttcttcagggcgattctggccttctctgccatcatataaccgtgcaggttgctccatttggacagtatgaaatgtcttgctgcacacatagagcattatctggcaacagccattgctaaccgcggtgacaaacttggccagtgtgcagtgccacatcgccatgctgatctggtgtctgatcctcacgtgaacaactctttagatagaagctgttgcgcaaggtactggccttctggttcctcaaggtaaaccttgtcagtcagataattctgtagattacttgcagcctcagcctgaattcgtgagccttgttccttcaaagcgggtaagaagcaccgcaatattacatctagaagtttcatgaactgtgatccgtatttcttgtgaagtgcaaaaccagcaacctgaacagaaacagaatccaagttggctacaacaaacctgctacaagcacacacgcataggagggatgggggtcttgaagcatatttttaccttgaggaaagcatgaagggcacaagcagttgctgtggtggccgggagagtattaaggaacatggcaagccatttccacccctcagctaagccatgtggatgccgcacgcccctaatttcggtctgtagaaaaaaattgcgggtgtatttcaattctaa

SEQ ID NO: 12597 - DNA, 1738 bp, Oryza sativa
tcccttatattaggggacgaagggagtagcatatatgaaataattatttcttttcccaattcctacctcctcttcagctgcttccagtcctccttgtacccagaataaattttggaaaccagcaccatagagttgctcacaagcggccaatgatctgaccgaattacgggcaaaagtgaacacaactaataaaattacacatccatgaagggcaacacaagaatgcattactgaattgactttctcaaaaggtaaacaacgcgataaagtattgatatgcaattatgcatatcaaattcagcattgataagatagtgaattacctcagtcccttctggcaaactactatgatatctgtatctttagaaaacttctcctcaacttgttgtacaaagttcctagcaatttgatctacgatcagtcaatcttactgttctgaaaatagcagatgaaagttctaaattcagtagatgttgagcgtacttgttaactgtcattgttgagctgccactccaccagccacctagggaagtcatgggagttcgatcatttggatgtcccgaattgtaggaggggtgatgtaagagttgaaaaataaattcacaggctcacagaggatagaacactaacataaaacagaaagctacacatgccttggttcaagtaattgtgtttcatgaactactactgtggttagtatgatggtaatctaaaagacgtatgtaaactggtcaaacagcccagagaaaatcatcattgcattatccattctagagtgtacacatggaaaacattccatgttacaatctcctgtgcttagtttaatgatgaacaatgagaacaaggtttgtaaagaaagcattcaagaacaagagattgacagtcaggtttgcatatggtgaccctgtttagcatacccatcacatagttggtgaatttcttgccggcgccacccaaatcaaacgatgtatccacatcaaatacaggaatccaggtagagcctttcacccaggcctaaaatgcgccaattcaaatacaatcaaggacaacgaataacagtcccatttcgcaataatctaacacccctttactttaagagtcttgacaggcagcgagacacaaccttttgacgctcaatcgaggggcctaacatcaaggaggacctagtcagtgagcttgaatgtatagccagcttccctgggtgtaagagtacttgatcttgtgctccataatcttcaggcagagcatcattcccacacacacatgaacagcagaagatcagcatttcaatagccatagatcacgcaagatgatactgaattgaaaccccaatgtgggggaaatcgtaagaagaatttgcaggcagggagggttagggtaaggtgaagggacacaccagagtctcccatcgcctccgggcggcggccatctccttggccagcttcacctcctcgtcctcgccctcctgctcccctcccacggccgctcccatcctcaccactccactccacctctgcacccaagaaaccactcacacagttgcagtcaccgctcagtggaaatgagagcaaaggagaaggggaggaaagccaagaaaggaaaatggccgcacctttgaaggaaggagacgagggcggaggcgcctggagcggcaggaagaggaccacgccgcggccggggtggcggcgccggcgccggatacgcggcgcgcgaggccgagaggtgacggtggcggggc

SEQ ID NO: 12598 - DNA, 10999 bp, Oryza sativa
ctacccgagcctcggctccggtggcggtggcggtggcttccgcgactcgcctacctcgaccgactccgaccgatggtcccgtgccgctcctctgcctccgcacaatggcgagcgtgagcggccacgcctagtgcttgatccgcccaagcgggatgcctcggctacccctacgccgcctcctgccgaggcggcacgcagccggccaagcccatttggcgccgcgaggccccgcgaggacattcttgctgaaaaagggctggactggaggaagatggagacagagattgatcataagactagccgcccaaccagctcacagtctagtaggccaggaagtgcgcattcgtctcttcctgggagccctggatcacagacatcagctgtgggtagtgaaggtgtgccgagggctcggccgaaggttaatccttttggggatgcgaagccaagagaggtagttcttcaggagaaaggcaaggattggagaaagattgatcttgagttggagcatcgtcgaattgataggtatgccataaatggatttgcctctttataacaaagtttaccttttatagtatgcacaactgtgcaattagcatttgtctttgaatgcaatactgatcaaaacaattgaatctttgggcctgtgaccttaacaattatagagtgtgtttagccatgacctttggctgctttatgcttgtgagttgtggtggtgcttaagtgaaatagctttttgcagaagcatttcggcagcaccttgcaatagttcaagtcagccagacattagttctaattcagctatgcactcttaagtagtttctatgcttctttaagcaaattaattttgcacagtgtttacgaaataagcgtggcattttttttttgtgcttgctggttatttcaatggttatataacaatgagcagttgtatgaattgaacggatataccttttttctttttttgctttgctttgagagattatgagaactgcatttacagcaataactagttatggtcttatggatagtaactataatgggaaacttgtattttttttcattaccttttccatttaaatgtcttcttattagtccatatactcccattgtaagaacctgggaggaaaaacttttattcctaatgaaaactggttgggacctgtgcatgcatttcctatttatatattaaccttttaaaggacatggtcaaattacaaaaaccataaagattccaagtatatgtaaatattaatattcaactgttagttatgccatctttttatattgcatatacaataccacactgtgctatttcgtcacatttggttgattaattggaatgcacgtaacaaactttaactcaatagtttatggaaatttcacttttagtagtttttttttggtgcgtgaatgtatagggtttgttcaacagtattctgttcaattattatggtaatctatactctattactaccatcgtgcattttactttaaaaatatagattcaatgatttatagttattgatgaagatgacaattgcttctggctttctgcaacgttttcctttcttactactttcacactatagcaaattgctcttgcttgcgtaactctgcgttttgaaatgtgtagtggtgttagtttattgaattacctcattggtcacccacttgctcatgcttgacactttgaatggttatggttgttacttgtcagaagcctgacagtttttaacctgtttgtgtcatgcatcaacaatcttgagtgaaatctctgtacaatggaaaagctatcgaccgtcaatagatatgttaaataaaataaatttcatctatgttcttgtgtatgttaattcctccagcattatctctaccttgttgtgtttttcacgaattttcaaatttactttcgaaatgttccagatctgtgtgaccaataattgttacctgccaggtgctgagattactgtggaactgaaattgtaatttctgaaccacccaagccctgatttgtaacaatacttgaactgtctttggtcctaatatgctatcatgtaggataatttatcacctctaccagatatatgtaactactaggaaagactagcaagatcatcggtaaactttttgaaccagcttttctttttgtggaaatttgtagcatgataatagaatattctggtggttcctggttatcaaatactttgactgttcatgcatgtttgcctttctttttaaccaatgccaatattctggtcgttgaagcatgcatgttcctatagtttgtcgtttcaactttcatatggtttgggcctttggggaatgattttcttcctgtctttatgctcagttcctggttcctacagtcaattgctttagcccttgccttgtggtttggacctatttacgtccctcgttccaataaccaatcaataattgctggtcatgcccaattgcaaaattaatcaattttacatttcaatagttatattgtgtagttttgatgttttaaaaatcgctggtcctactgaaatttactcgtgtaattttattgttttaaacatttgttcatggacttgaatgttgcagaccggagacaaacgaagagaaggatttgaaagaacagattaacctgcttagggtggatttgaaagaaactgaagcaaacataagtgacgaggataaaaaaggtttatcagaaaagttatcccagatggaaagggaactggagcgtcttacagttgagttggacaacaaggttcgatttgggcaaagacctggttctggatctggcaaggttactgcacatttaagtaattcaccagacgaatcacagattacagagtcaatggaacaaccacgttcccgtagcagcatagaccaaaatcctaaaccagcagaagaaaggtgggggtttcagggcaacagggacagaggctcatttggtggtaacagaaatacagacaggtttgtttgttcctactgtccatgatgcttattagcataaatccaactgaacgcgattaacattgatcacagtaactttgtcctgtattactagacatatctgtcaagtttagatcatttattaattttcagcagatggtagatgtgaactctttgtctacctgcttttcaggtcgttaacagggcagagatggtgaactcttctgccatccatggttttggccttttgagcacttctatcctcggacagatctttttttttcttcttttcctattttaaacaatgaacaaataagttgtcgcgttcttgttgctgcttgactcccattttgtttgccttggaagagtggaggggataatggaatacctcgcaggctcgctcaagggcccaagctattgtcacctccatggtgatgcttctgtttccttttatttttcctcttaattcccctttgcccctctcttccatgtcaaaacagtttgttaccaaactttaatacactaactattgttcttgctatttgcacaattatgtttcaacctccacatttaggcattgctgctatccattgttacatggaattctttattaggccagtgttcacatctgcctgtgcttgtgatttgttctgctgtttgtgtgtgccgtatgaacatataaaaaatatcgggttaaaatttccgttgcggttgtcattgttattttgccttctcatactacgtgtgaagctgaataatttagtgggaggttagctcattgctgtccctattaagtacccagaaaaactataatgtttagtcctcttggcctttcactacgctggaaggagtacaaattacaaacattaggaagcgtacacctgtttacaaagttgactatgagatggcaaatatatgttaggcaattagttagcttcctatcatgtttgctgcaaagttgtaaactgaacactccaacgagataattcccctggtaattggaagctctctggcaagaatgcatttgatttgatgctatgtttgggagtgggaccaattcatcaatttttgtttttcattttggatttgaatgcaaagataactttagaagctttcttgttccttttggcatccgctgctcacctgaccaagtgcacacaatgtacatgctgcccaatatactgtacatcaccataccagaaaaaagacaaactttgagttacagcaaccaatttattttcatattcgttgcacgtgaccaaacaaaaataagaaacaaaaggtacatataatttttataaaaaaggtaaaaacaaacacaaaattatatccgaggagaacatcactgtatacatttataacagcaagctaaagtacgcatttccttttttttttccgataacggaattcagtccactgaagctgcgaacttgcgtttgcagcaagacgatctacttgtccttcttgcgcttctcgacgacgaagaagaaggcgagcgcggcgatggagaaggtggagaagacgccggcggcgaccttgagggaggcgtggatgccggtgatcccggcgacgtcgaaggcggcgtccggcgagctctgcccgtaggccacctccgtgccggacgcgtccaccgcgtaggcgcgcacgaagtaggacgccgtcgggatgtcgcgcgccaccacgtagtcgaacctgccggcgccggcggcgtacggctgcacggtgaccttgaactggcacgccttgtccttgtgcaggtcgtcggaggccttgcgccacccgcggtccgtccggctcgccggcgcgtagcacagcttcaccttcacgctcttgaacgccgcgtcggcgcccgccggctccgacgtgttcagcgaccacgtcaccgtcaccgtgttctcgccggcgtgcacgactgctcaccaccggaataattttcccttgattagtgattagtaatagtagtactcttttcgtttcaggatataaaacgttttaactttgatcaaagttaaaagtttgacttagtttatagaaaaaattagtaaaatttttaacccaagacaaatttattataaaaatatattcaattattgatttgatgaaactaatttagtattaaaaatattactatatttatctataaacttagttaaacatatatttgtctataaatttagttaaacttgaaacagtttaactatgacggaagtcaaaacgtcttataacatgaaacggagagagtagtagccaaagtacatgtgacacttttaatctgattattttaacagccaaattcaacgaagcctaacgtgcacttatcatgattttttttaaaaaagaaaaagataaacgaaagtgagctaacaaaaaaaaaagattttgtagtacggccatgagaaaatgaagtgaacttgaaatgagaaaaaaaaatcttattattattattctttaaaataaaagaatagcataggccggcctggctatcactaggataggagtttcttagggacatattcttctcccttgctgttcatcccttttcggatgcatcgatcacaggcgacaaatcagacaaatcatcattcggagtttcagttgcgcaaatgggtatcggaacatattcttaaggctgattttacatcaaactttaggcgaaaaatactttttttttataatcgctagctaggtagccatgaagagcattttcggttcataatgctgcatgctaatcaagagcaatcttgggtggttcaaacacggtttcaaaatgcaacagtaaactgcctggttgtcggtcttgtcgagctggttcgaatttagaaaccgctggataaaccggccaagttcaaaaaaaaaatcaaaccaaataacttttggcaaaatgttaactgctcgatcagtaactgaatggtcaaacggtttttgtaagaaagaagcaagaaggtcatcatcatcagctactagttgttatataccttcaccgtgcttgggcgagacgccgacgacgagcgctttgggcagcttggagaggaacacctgcgtcttcgccgcggcggcggccgccggccggggcacgccggcgccgagcaagacgagcaccaacgagagagcagcaacgccggctagcctcgccattgctgacaaaccaaaccgactgattctggatatcaacccaaggacggagacggagacgaagaccaagaaatgaatctgctgctgctgctgatgctgagatcgatcgatcgatcgatcggtgaatttataggcgggagagcgaggctacgagctcggagagttgaccagctacttcgttggattcaagaggcaacttaattgttgtaatgatcaagttgattaagtttagtggggtcggggatatccaaagtcagaggctttgacgacgtgtgagaagagaagagaagagagagatcatgcggttttgggggtaattaagcttttggaggggtcccaagggttcaggcaaccggtgagaagcggcaaccgcgaatgatcttgagtgcctcggttgttgttaattaaattgtgagcatgacgttcatggtaggttcatttggcattaagataataacattggagttattaacgttgagaaggcgttcttaatggaggaaaatttgatgatataccagtgttttggcaaaaaaaaataaatttagatgttttcatatggaaaaaaactcaaaaagagtccatttcactcatccaaactattttaggttcattgagcattaagatatcacattggaattattaatattgagaaggcgttcttaatggatgaaaatttgatgatatactagtgttttggcaaaaaataaatttagatgtttttcatatgaaaaaaaaatcatttcgctcctccaaactattttgccacagcatttaacctcctaacaattcctcagcttagtttacaccctgaactattgaaaacagttcaacttactctctaataatattcctcaagtactgctgtactcctacttccgaagagatgacatgcatgagcgcaagagcaggacagccatccgtcgatcgaactcgaacacgaccaagtctgcactgtgttgatcatatcagctcagctcagctagctggtggccagctccgtctcttgattgcctagtgctgcaattatatcgacccagttctagctagctttgctcaagttgtccaagcagatcgatgctttgaaacaacagcctgccgaaaataggcaatcgattcttacttaccacgatgagagtaattatcctatgaaatggcatatgatcattgaaacttggtagcagtttcgccacgacacaccgcaaaaatcctttttttaaaagtactacctttaatttaaaatatctgacgatgttgattttgaacataacagctgaaagtttattttattttaaatttatcattaaatatactttaagtataataaattttaaagtttcactaaattttgacaaatgatcaaacgcatataactatataagttaacggtacgtacatttaaaatgagtacagtacaatggacatcggctcacacaacacaaccacacccatatcatcacaaacagctctatttttttccttctaacttttacatgatactcactctgtttcacaatataagtcattctagcatttcccatattcatatcgatgctaacgaatctaaacatatatatcaatctagattcaaacatcaatatgaatgtgaaaaatattagaatgacttacattgtgaaacggaggaagtactttcggcagaggactaggagtgaggtaggagtgaggtgggagaggtggggaatcgtgtgagatgccctagtgccctaggacacatttcctctcatatctgatatgttggtctagttgattaaagccaatgtttaaccccagctagttggtaacgataatgtattgagatccaatgcagttgtcactatgactgcacaatagcaactgcacacaatttgagcccacacaatttgagcccttcttgatccaatggtccaaatctattgatacagtaaaaatcaaaattttactatttgtcagagcaaatcgctgcagtatttagatgcgtctggaattctgaatcatgtgttttaaatctggtggtgctcgtgtgactgcttaacttgtggccacactagccactgcacctcaagcggatcaacggctattcatcttaaaataagtttatttttcacctattccacacatagtaattcaaaactaaaaagactataatactcatactttatcaaatctcaatacaactatttccactttatctactctcaatacaattatttcgtacttccacaaatttcaatgcaatgattattctacaaatgaacttattttgatacaaataaaatgagctaaaaatgaacttactaggagacgtaggaagtatgctattagttcttataaaacaattaatttatgatataccagttagacatgagccctagctatatttctatttaaataatagaggggaaaatgttattaataggaaaacgagtaaatttcggaaaagcacaactattttcgttaaaactactagtttgcgacaacttcacctggttttcttacaaagtggaatggaacaatagttgatgattttctgcaactttttttttgtcttattggttttggcctatatgtcagacatacatataaatatataatacttatactgttgcaagttgggtccacatgtcagacactcataccagttaaagttgtggggttttggtaaaattgttcacaatcgttgtagttttgttagatgtcctgctatagttacagctaactgataagctaactgataatttgcagttttacgaaatccactctaggaaatactactccctccgtttcaaaatgtttgacaccgttgacttttcagtacgtgtttgatcattcgtcttattcaaaaaatttaagtaattatttattctttttatatcatttgattcattgttaaatatactttcatgtacacatatagttttacatattttacaattttttttaataagacgaacggttaaacatgtgttaaaaagtcaacggtgagtattagggtatgcagagtccaggagcaaacggtcaaatttctcatttttagaacgcccagcagatggggtcaaatttatcatcaaggagtactactcaattgttgcaaaacccagtgtcatatatatgatcatcctcggtgtatctggtaatgttgcttgatggcatgatagcaacagcatgccggcattgacatggtaaaaacaaaaataactaataattaaaagaggacacacacttcatgtggggtcatgtggctcttaacaccggttaagagttacaagaaacatcattttgtttgacttgcctctatcgattagtgtgaaaatacagagaagacgtttggcttatcaactggcgtttagatgtcatgagactatgagagtgataggaggagagtggcaggtcaggaagaatgatcgacaccgggacagatcatacttaattatataatgtcgacatgattgttgagggaatgatacgtttttaggccttgtttggggcaaattcttgtgctggctgtcattgactaggagttgtgttcttcgccctggaatttaatctttcttgggtattgcttccttatcatttgatcacctatcttattaaaaattacaattatcatttactccctccgtctcaaaatataagcatttttagtatagtgacaagtcaaacatttttaacttttaccattaatagcaaaaaaataaaaaagattaatcatgtaaaattgatgttactagatttatcattaaacaaactatcataatatcataatatgtaactctttttatttaaaacatcttacttttatagatattgttagtcaaagtagcatattagagaccgtgttagggtctaaaaatgctatattttaggaactaccatttgtaaagaactaccattaatttccttgaaacttgatagcaatgatccaggcctgtttgggaacaataaatttgaccaaattgtatacgaaagaaagagattcctacggaaattctacctcccaaacgagatgaaacctagtaacctacaggctacagccataaattcaaaacatggaaagcttgatttttcccccatacatgtacaatgggcttacattacggagccgcaacaactcacagccggaggtgctcgaaaagcttggacgtcacaagagcagtttgctcatagaccgatattcgttagcgagattgcagttcttgaagcagagggccaatcctttgagcgccaagaaataatgcgtcgacaagcacgagtgctccaacctgttgttccaggaaggaacatataaaagcatttccattggagaaaagaattgatgtgtgcctctcttgaattcagagaattaccaaacggcctgtgaagatcagacggtagcccagcccttctttcacagcctgcgctcgttgctgatccgtccagctgaaatgaagtcgttgtcagtacacaaagcttaaagatttgtaatcagatggagtgctctggagtatggaggagcgatagtgcatgcttctgtggaagtctgaaacatatttctaataagaaaatcccattataatgctcatctgcctgtgtagacacaatctgaagttttaagttgttggcgagttctagcttgcctatctcattatcacattattctgttcttgtactcaaacaactgctttgattttaatacatgacttgtgtatgtagattggacagataataatagggataataaaccactaggaggggagaatagctggggtcttgaaacctacccgaaaaattccgaaaccccaccaataccagcaagcttgaaaggctggggaccttctcgctcaaagtcctgaaggggtaaaattataaaccataattcagtaaaaagaagtactccctccatcccctaatataagggattttgacattttgcttgcactgtttgacc

SEQ ID NO: 12599 - DNA, 6463 bp, Oryza sativa
ctgcagcccagttctctcctcgactcggaatcagaccagtcgggagagaaccggctttcggccccgtttggattcccgaacgcggctgaaagctacttcaagcccctttcaaccgagtcggcttcaaaccactcggccgagatcgcatcttctacaacgacaccagatcaagatgatggggcttacccaccggtcctgatgaagctccccgacgatttagcggccgtcttcaccatgacagcgtcttcatcccgtaggcctaggcggaagtcggcttcaacaccgctttcgcctagcttcagggaagtcggcgtcatcctccaaccactcggcacggtttcgacggatcagctggatgactacaacagctctcccaccgtcgactcacgtcctactgacatcgtggagtacgacgaattcagttctcgctacgacgacttcgacgacttcgacggaagcctagatgacaattacacccctctctactttggcgttttcatggccaataatgagacggaggagcaacgccaagcccgggagactgaagaacgtcgccgactggaggaggagcatcaagtacaagaacaagaacggctacggcgtgagcagcaggaccgtgagcggatcgccaaggaggctgaagatcgacgtcagcgagctttggaagcagggcgccgagcgcgtgatctcatcggccaacaagatgtcgaagggacaccggttttccgcacccctcaacagaatgcggttgccgcgatcacccttctcgacaccctcctcaaccaaaacgagctcaatcgttccgaccacgtcgtcaacatcttgaaccagacgaagaccatgatcgcagcatcggtcccagttaactccgaaagcgtccacacgccgactggcagccgggtcccccacttccgatctcatgactaccgtcatccaagccccagcatcactggagcaggatccaatcgcaggagcaggggccacgacgagcggtctgttcactcgccctcccgaacttcatagggagcgccgagtggacgggcctcgctcaccactcggtcgccgccccatcgatcttcgcgacacaatcatacagcgccgagcagctcgaggctaccatcactcgccggatcggcacaagttatctcctctatgggaagggccatttattatctctgaagttacccgaccaggttcatatcgactcaagcgcgaagacggcactctcgtcgacaactcttggaacattgaacatcttcgtcgtttctacgcttaactttatcattgtatctccctattttgactgtcaacatcaagttttcttcttgccgttgtcagtcgggggctattatcacaataatggagtgtgattttttatcaattcagtttgcttacttggtttatcattgccttgtttggtttttctacttagtttgagaggactgaaagtttttaatagcttctttgggttttaggctcaacaaagcttagcaaaaacttttaagaaatcaaaaactttgcaagaatcatcaagcacagcataaatacaccagtattgtacaaattgagcctccatgtattacatccaaactcagtcagagtcagtcctttcatcatcagagtcatcattactcggctggaggtcgttgttgcgaaattgctccacaacatcactcgctattttgtcagccgcagtttgcgcactactgataagatcaagggcagcttcttcacttgtcccgtctgcaaatccatcaatggtgtcgacttcaattctcgggtacaaggattttgtcatcgccaaggccatgccagctcccatacttccagctttcttgatattcttgaaatacacttccggagcaacactcagcttgtcaaatatttcggttgcgtcgagtgcactcggaccaccattattgaggaacatggcttagatgattggagcagcagcattggcgacatcatctcttgctccttctagcctcttgatcttaccaaccaggacgtcgaattgagcttgagacttgatcttgcggtctacaaaacatatttatggtgagaatctgctgcattaaaaagagacaagttcaggccaatagctggcagtaccttcaacttccttcaaggccgagtccctctgcgcagccagttctacattgtctctctccagggcttcaacttgctttttcatttgttccattctggcggcttgcgctgtttgagatccagatggttgaggatacagttatgttggcctaaatcaatggaacagatctggatgattaccttttgatgaaccacttagttcgaagtttgcatcctggagctgagcgattcgatcccttaactccttctccgtcttcttggcgtgctccttggcctcatgtagctggtccctaaccgcttcaagagttcccaaatgaggaaccagcttttccaaagttgtggtcttggcttcattgcgaagatggattctctgcatgatggatcatagttcagttctgctaaaaagaaaaacaaagttaccgaaggctgtcgctcggaagacttacatttacaatacgagtggcctctccaagcgctttcttcagctggcacacttcttcatcttctttttgacggtttatgactataccggcggcttgtgagttctcgtcccaccatttgatcaagataggaggacgagagtcgtcggtcgcctttatgcgagggatttcttctccgtcatcacctgatggtcctgatgtgtttccaggacattagacggatacactgaggttatttaaatcaccgttgtatgagaagacaactaacctgaagatgtacctagctgagcgtgaggtgatctttgttctttgcctggagatccagttatcgagtcattaccagcttctggcccttgggaagctgtcgtctgcgcttctacttcagggatttcttgatcagggcttgcgtccaactggtttccagtcgggggctcttgagttgttgctgcttcagttgttgccgactggtttccagtcggcggctggtcactcggattggcctggtcacccgaagcatgggcgccggtcggctggcttttggcagtcggctggctttcggcagttggctcggggtctttggatatattttgctctgccatggctggatcggggtcttttccagatggatctatatcagatggtttcctgcaaagtattctttcagaatttagcatcattttcatgagagagcttaccaaagtgaaatcataccgagaggtcttatacctggaagatgttctaatttttagcattgcgcggccggccagttttttcctgggcatggtgcgctttgggggtttattaggcgagcccttatccccagatttatcatcgtcgccttcatcgtcatcaagcaccagtttcctcttgcgaggacccgtctgaccagttgatttggaggtctgaggttgcggatctggtctgatcgttggccctccacctccctgagcagtgtgttggcgaggagaccggcgctgagtgactggtggatctgatttcatcagtgcatattcctgaacaagatgcttccatagttagtcaattcagcatgaagacaaaattatgttctgatcatggtttgaagatttccgatacatacctgcggaggcggattgaatgcattatatggcacgactggcagctggtgtgagtagctgacgacgattgcatttgagaagattttatacatcctctccttcatgattctgaaatccagagagtctgattcttcacggttaggatcatacttgccgtcgaactcgaatgccgtgcgagatctttccttgattggcgctagtcggcatttgatgaaatgccgagtgatctgttctccctgtaagccttgttctttaagatttaacatacgatccaacaactccaaggcttgtactgcttcatctccgattggaagagagttccaagtatcttgatacactggaggaagacaagagtacccgggaagagcaggttcaggattctgaacatagaaccagtttgcatgccatcctttgttcgaagtcttgaagggcattgagaaatatttttggctcagagttccccttagttggaatcctgcccccccgactacacacggtttgttcttgtttggttggggcttgaggaagaagattcggcggaatagggcaaagtgaggtttgatccccaaaaaggcttcacaagcatggacgaaattggcgatatgcactatggaattcgggtttaggtgatgcaagctgattccatagaaattcaagatcccgcggaaaaattttgaggtcggaagagcaaagccgccgtagaagaaatgcgagaagaccacaatctcatgagtatccggagacgggaaagcctcaccgtgcgctggtcgccacccgatgatctccttggcagggagaacgccgtgcgccaccatctccttaagattctcctccgttacatcggatgacgcccattggccttcgaagctttctctctcttccgccatcggtttcactcaaatgtgctgatttgattcgagggatggcttgggagaggtgagggattgaggcggtggatcacgggaaggattttaatgcacttttcggaggtggatttggccggagtcgtgaaccctagttcgccggcgcagctttgcactgtagcagggaatggggaaaatggcggggaagacgaagcgtcgcttggatataggatttttcagttaagggtatcggaggtgctaatgggcctaggcctgaacagtacttcagcccaatacttttaacagcgtggcccattgtgttccttagggacttaggcatattttgctttggcaatattatgcgcacaacagtgttgcccaatgctgatgaaatcctttttatgcggtcatataattctttggaattattgcaatgcaaattaaaaaggtgcccgacagaaaggcgttatgctgtttttgcaagcttttttaggctacaaaagctgtttgggttaactagggatgacttgtttttattatagtcatttccttggcgtgttatatgcctgttttcatggtaaatagtcatggcctaggctatttgacttatttattaccataatctttatgatacttgatgggtaatctttagagtttgtatattcggatgcctgtcaagtgtgttcattcgtgaactttttagaatgtaaaccactcggatttcttttattgtggctaaaaagcagtcggctagcatgcctatttaggcgccgcgtatgcttttgtcatataatgcacaattgtgttattattttgtctttcaactatatgtttagtttgttaactaatcacatagttgggggctacacctaattaggtgcatctattcgatgcaccatattcttcatcttttcgccctttacagtccactcggcaggttttggcttgaagagtttgaagtactcgggttatcaactttgagaaggctacgatggtcgactgcaaaggactcgggggctactgtggagattatgggtatcccatatctacacggcgacggtattcgaactgggtaccggatacttaatgtagatagaatatcttatctgtatctcgggtttgtttcttaacttgtgtatcaaggaaacaccctgagacttagtcggttacgactgtattttacctctatcttcatattccgttaggaatatagattatcttttgtaatccggactccttcccatatataaggggggtccgggcgcctctaggggcatatgctgatttttcccgaatcatacaattaataatacactcggcggattcatccccggacaggagtagggtattacttcttttataagaaggcctgaacctgtataaatcctttgtctccaaacccatacactttccgagcttgatagccacccccttttattattgccgaaatctagtttcgacagttaggtacttaattaggtgggttgtattactatgaatgttgatcgaattaagaatccatgtataccatgctcgatctcttttaattacagttgttctgaaatttaataattttgaaattcagaatcaacaaatgtgagatgtactcttagtttattaatactcatgaattcaattctaaaaatctacaataaataattagcacgatgtaattgacatggacgtactcttctattaatctaagctcttatatttcagaaaaataataatcgatgtgttcatcatgattaacattttaatatttgtaacatcaataacaatagtttgtgtaagacatgattggtgactagcacatacatataatatcctagtagaacatttgaagtctaagtttgaccaacacatcaaagaaaatccaaactgcaaacagtatgtgcactgtgttaattaccaccgtatttaattaatttttcttctcactttatatacatgt

SEQ ID NO: 12600 - DNA, 9619 bp, Oryza sativa
gggatggataggggagagcggagaggggtttgcgcttgcttatctagaagagagggataaggggagggccacggattaggggaggtgcggcgaaatcgtgaggcgctgggcggcccgggggttgggtctcgcggaggcgtgtgcctgtgtcgtcgttgtggggaggtgaaaaatgacgggaaatctcggtggttttgcggcgtttgggccagaaaaaatggggttgaggcccaggtttggcctcgtcacccggaacgccaacctctcttttcgcgttgtctgttttgtttggtggcgctctcttctgccggtgcacgtaaaaccgcgcggccctggtcgttccattcccgcggatgttaaggggggtgatgtcgactgtgaagcgggaagagtgacggtgatggtgccgtgttcccgtgcaacgagcgttgttatttcaagatagtaaaaagaggtgatgttagtgcattgggcttaaccgttcccctaacaaatattgggcaccacgttagcttctaccgcatccacttgaagtccgcaataccaaacttggtaacgtgttcctcaatctgattcagggagagtggagtgtggagcgacaaagaacagtgcgttgtgggggtcgtgacctcgctgtgtaatcctccacccacgagctcggtccccacttcccaaatcgccctcagccatcctctcgcgcacgcgtcggctgccatttttcccatcatgtgcctgtcctcaccatcccttccctcattgccatcccaccatggctaggagtagccaataaaggaagcaacaaaattaaagttttccaacataaatacaggaccaaaacacgaaatcatcacctaatttctacatctacaagattctcaactcaccagcaaaccctaggtactattcaaatctacagctttcggtggtgcagcaactgacgttggggctggagcggtggcggtggcgctagagttaccggtggtggagccgtcggtcccgggaccatgatcacatcccgcatctccgttggggaaagcggcgacgccctaggtctcgacggtggcggcaccacaaccaactcctttcatactcgtagccactgcggagcttcatcttcagtactcttgacggcgaggactggcaacacacggagcatcacgaggcgaggatagaaattgcgagaggagggatggaaaagatgagtcgtgagaggaggcgataagtcacaatagaaaacataagggtagcaatgtcatttaacccacttgtagctattagtctacaaggccattaggccacgacgtggcctcgttcacacccactgtagggcaagtagtctccatgtgtgtcttcggattttatggatctgtataactctctttctgcgcacgtaaattagagcaactcattatcgcatgattaattaagtgttaacttaaaaacttaaaatagagtacatgccaaatactatatctataattcatgattaatcctccatttacagtttggtacaataaagtttgtttttctttacgaaattgactctaattgcaaatttatttttttttctaaatatggtacttaaaaataaacgagaaaacccattccctctctcttcctccccaatacccccgcttttggagtctctcctcgaagaccgatcgcatccgcctccaaaccctagacgcggcggccatggcgcggcgatccgcccctctcctccagcgcctcctctcccccactccctccccctccccctccccgccccatcctctcgccgccgccgccgtctcccgccgcaccgtcacctacatgccgcggccgggggacggcgccccgcgcgccgtcacgctcatcccgggcgacggcatcgggcccctcgtcaccggcgccgtgcggcaggtgatggaggccatgcacgcgccggctacttcgagtgctacgaagtccgcggcgacatgccgacggttccccccgaggtcatcgactccatccgccgcaacaaggtctgcctcaagggcgggctcgccaccccagtcggcgggggtgtctcctccctcaacgtgcagctccgcaaggagctcgacctctacgcctccctcgtcaactgcttcaacctcccggggctgcccaccaggcacgacaacgtcgacattgtcgtcatcagggagaacaccgagggcgagtactccgggcttgagcacgaggtcgtccctggcgtcgtggagagccttaaggtatggcgaattccgcttgctgctaactcacctagttgatgtagtgtttgccagggtgcttgggttaatgcgtgtgccgagagaaccccaaatgcaacttaggtttgccacttatcgagcaatttcgtctatatacttaggactgtttgttttacctactgcttgttactttactggattggtaggtttattgtccacatctagtaaccttagtattcagttgaattgatgaaacttaccatgtgtattgacgcttttctgagatgttagtggtttgcataatgagtattcgagatccatgtattgctgggttgtgcataaaacactttaggcatatgtaactggtaagttgtttgttgcaatgaagcatgcttgctgtagttgagatagtggttatgatcgaattatgtggactattcaatacagatttcgatggatgggcttcaaaatatcctcaaattaagtcagttttacaaaatttatgtaatcacctgtgtagaaattgataaatctctgagatgatccagaaggacttatgctaataagcaccaaatgaagcataaaaataatctgataacttgcggtatccaattatccatcctttgagaaagctataaaattattaggttaactatcattggtgtagttctgatttgaagaggaaacaagttccttttgggtcctgtgacaattttcttaggtgaatggatctcacagttgaagttttggttgctagctgcacattaggagcagtgctttgatttcaaacggctcttgatgttggttagatcctatattgttggaacagatgctatggtatgcgttagcattaacaattgacctgaatgtgtaaacagtttaatacttgatacatgttatattgacgcatgatgtatatctacatagtttatatctgatattgctaatctggtcactagtccatggtgatctgagtcaattagttatatttttaacacttttgcctccataaatggcctgttgatggcactctagctgattaggtcttggcaggcagtcctttactgcacatattcttttatactcctattttgcaaatttgcgtgagtaccgatttctgaaatagaacgtatgtaaatgtttttgtcacttttcatttcatcatctaaaggaatttttttctatatggtactgttactaaatggatttactaggtgatcacaaagttctgctctgaaaggattgccaagtatgcttttgagtacgcgtacctcaacaacagaaagaaagtgactgccgtgcataaagcaaacatcatgaagcttgctgatggtttattcttggagtcttgccgtgaggttgcaacaaagtatcctggaattcaatataatgaaatcatcgtggacaactgttgtatgcagcttgttgctaagcctgaacaatttgatgttatggtaagtatgttagttctatcattactatgcatcttaacaaatgcattctgtttgtaacgtcaccatattctatactcacctactgatctatgcttttatcatgtcataaaaacaaaaacaaagtaaagtttttagtttctgcttgatgtttacatatattgatcaaatgcacattatcagagtacttagtagattatctgcaatgaatgtgatagaatattaattccctttgcacttctgtctgaaggatgttttcttgattgtcacagagttttcagatcaagtttgtttgattaactaggaacttgtgatatagcatgctcttgttttgtgtgttcggaggtcacgccaaatctttatggcaatctggtggctaacacggctgcaggtattgctggaggcactggtgttatgcctggaggtaaactctgaactatcgtctgtaattctgtactttgacctgcacaaatagtcaatacggccatcaggagctggaaccagacaggcttgctttcgcagttgtctgttagttacaggctatgtgttgtgtgatattttgtgttgcattttatacactttcttggacccactcaattttgtatgctgccagaacctcttacaaatgtgttaactctcaacttgtgcatatttcatatttgtgcatatgcaaaaaacaaatacatacaatcctcatgaaatgcacaaattttaggtaatgtgggtcaggaccatgctgtcttcgagcaaggagcttctgcaggaaatgttggaaacgtcaaagttgtggagcagaagaaagctaaccccgttgctctgctcctctcatctgccatgatgttgcggcatttgcaattcccatcattcgctgaccggctggagacggcggtgaagcgtgtcatcgcagaaggcaagtacagaaccaaagacttgggcggcagcagcaccacgcaggaagtcacggatgcagtgatcgcgcatcttgattaattgctggccggctgcgttcttttgaaacaaaattttccctttggactaggtgtctagtcccgactgattttcgtttcttatagcgttagatcatcatttcgttcgtcacagccttgtacaatcttcaggtgtcttgtgtctggtggattttgcttcggaatgatggagcaaatcaccaggaatccaggatcgatttttaacgcaatgtttttgcggtcttaactggaaataagagagaacgattctcttaactgtaacactattgcgttgattacttctacttattattacatattctgatctttactataatgataatgtctgcctgatttccttgtagaaagagttgtgttgcagttaactggcaaaatactaattcttgttatatattctaagaactcgttctggtctcaaaataataagtttaaaatgcatgtagtgaacatgagtttactttaacaataaaaattattcaaaatatggattttggatgtataaatatgtaacttttaaaatttatgttaaaaggtagtaaaaaattgtataatgttgacaaaaaagtctaaaatgacttgtttttgcggtatggagtctaaattttgcaatgtaaaagaggatttattctcacattattggcggaaatagtacataaaaggaaaaaaaaagaaacaaggccgcgctaagctggcctggcccaaatatttgcaagctggcccatatggcccgccgcctcttgtgatgcaaaccctaataaaacttctccccttcgctcgcctccaacctctcttcctccccgacccgaggcggcggcgaccctagcttcccgattctcccatcccccccatggcgtcccacctcgacttccgctacctcgacgagggcctcggcggcgagcgcgggaagcgcaagcgccgcgaggcggaggaggcggccgccgccgactccatggacctcgacgccgacgccgacgcgccgaggccgtccaagctccgcgcggtgccctccctgtccgacccctccaagcccgcctccttcgggcagcccacctacgacggcgtcatcgccgggcgcgtctccgggcggcgctggaaggaggcccgcacccgccgcgcctccgcgctggcggcgtcccggaagccgaccccgctggagcagcgcgcccgcgacaagtccctgaagcgcgcgtaccaggcccgcgtggcggagctcaaggaggagatccggcagagcaaggcggcgaagcggaagcagcgggaggagcgggagaagcgcaagaaggagaacgtgctccgctcgggcaccaagctgcagcgggtcaccaaccccaagaccatccagaagatcgccaagtccaagaagcggaagcagctcaaggtcgtccccgacgagttcctcggcggcaagaagtcggacgccaaccgccgcatgcaggtgcccggcctagacaactgaagatcgccttaccaaacaaatccttttgttatctgtgatacccatgttacagtgcagcttactagtttttacattgcgcaacgagattttgtactaatgctttagcatgagattttaagtatggtcaatccagcaattatgttggtatgaatgatgttgggtgcaggttcgttgctgattttctgtgttccatgcattgctgattgcctgcttgaaattatcttaggattaattttaggtgttctctttgtgaatttcattgattgttattatctgttttgatgattgctgagaagagagggggaaaaaatccacccatcagaattcaaaatctctttggactgaaacaagcagggagcagtgattgtaaaacgacgagctgaatttcgggttggtcccaatgatcgattgtttctctgaagtgttttggtctgatgttcgattgtttctatgaagtgatcataccagggtttaccaaaccgtgtggaaataatggtatatctcgcagtaattgcaccagtcaaatcgtgaggtggcggtaaccctacccagaacagcttggtgaaccctggatcaactgtatttcctattgtttgctcccgagctgctttcatagctttcttgaagatcgtaagatgccgcgctgcttggtttggtttatgttctggaattttgagaccttggtcaccgagtcaccatctgtgctgggtgcttaactgcttattgctcttgatccatgtgacaattaattattaataccttgttgcagctgtgtggtggcgaggtgcaaagatttgtgaacgctcgattcttgcaaactgtaaactaaacatccatttttcactgacactgtttagggatggcacatcgatgcatgtaagtttttgccggcctttgatatatgcaaaccggtgatctccaattctccatacgccgcataacgtcgatttatgtctctcatgtctccccgcagaaacattcaggcccggtttagttaccataaatttttgttttggggtatcagtttatcacatcgaatatacggacatacatacggacgcacatttaaagtatattaaacattatctaataacaaaaacaagttacagattccgctaggaaaccgcgagacgactttattaagcctaattaatctgtcattagcaaatgtttactgtagcaccacattgtcaaatcatggcacaattaggcttaaaagattcgtctcacaatttacacgcaaactgtgtaataggtttttttttccacatttaatactccatgcatgtgtgcaaacaatcgatatgatgggtgaaaagtttttgttttaggaaataaacaagcctcagcctaaagatgttgctgacgatctgcccgttaatggtctcttcttgctactcgttcagtcccaaaaaatttcagtcctgaagattaatttgaatacgctactcgttctgtcccaaaaataaagattaatttgaatatggtgtatgtttagatttatttttagaattggaattttctccacgtgtcagtgagaaaaataataggttgaattggtccgccaatttctaagggactaggctaacttgatcttggtcttaggggaatattctgtgtcatggatcatcccatcttatttgtcctcaaaccaaacaaactgaaaaataggtttaatacccttaaataaggtaattaatctatacaattataaattcttcagttttaaaatgtacaattaatatttacttatttgtagtcatgccattataactgttggcgtatcaaaaaaaaatgccactgcataccccatcgatacatcgaacaaaatgtgtagactatattgttctcgtcttcttcctcagtctcctcccatcagccactttaagcctgcaactccctattgagcactggtctccccgtcgaggacgacggccatcgctgccgatggaggcagggtctagttcggcctccaccccctctttgttttccctagtcctctggtgaccaccgttgccagtagcagaagggtgcgactcagcctccgtcccccgccaccgccattgtcgtgacctccacctcccttggctgcctcctcgagagtgaccttgtcgccgccatggctgagctccagcgctatggccttttggttcctcaaggaaggaataagtcaagatgcacgatccagatgttgtttcatatattatgtctattttctctcacttttctcatttcctcccaatttttcaaaaaacggaaataagtaagaaggagcagtagtagtagttcggcctcacttgtcggagactgaactaccgctcgctttcttcaggagatcaagtagcagcaattggcttcacctgtaaccgacctagaagttattttctatttcccactacttttcgtcattttttctaatattttcacaaatttcaccttttcatcttcttttcacattttttatttattttcggcttcatattcaaattctgtgaggcaaacgtgctaatgggcctacaccagcctacgtgctatatttgggcccgtgcagcacggcccggcccgctacaggagccgtgccaccggcatgcccgtgccgtgctcggccggccgcccgttcggccagcactacgctctacggcctgacggacggcagtagagctgggacttgggccgtgccgggctagcacggcacggcccagcgtgcttcgtgccaaatcgggccgtgcttttatcaggcggaaaggagcgtggcgtcatggcaggcgcgtgtgttttccgccgttggatcgagccccgcggcgggtatcgagggctaggatgtgtccgtccccaacccgggatcgagcgcggaattgaactagagagtgaagacactggccgcgcaacctgtaccatcactccatcagattagctgattttttttttcagcgcagccgacacgcacgcacgcacgcgccccgccgagccgcggccacgattccgaattcgaatctgcatctctcccaaatctaaaccccccgaaaaaaccaaaaaaaaaaaaacccgaaacccaaatcgaaatcccttcctccctcacccacacgcgcgctcccccgccgccgccgtctacacgcgcacggatggccgccgccgacggcgacgaggactgggagatctgcaactgcgacggcttcgtctacaagcgccgccgggtcctccacccgcccgacctcgaggacgccgccgccaccgccgcgacctcctccgccccggggccgccacccgaggccgtactccgccgccgccgccgccaggcgctcctccggctccgcgccaggtacctcgacgagctctcccgctgggagtcgctctcctcggacgtcctcgcgccgctccccgccgcgccggccgcggaccttcctccccgaccgccttccgaccccgtcgccgcctcgccgcctcccggctcctcctcctcctcctccgacctcccgtcatcgacggcctcctcgccaggtactcaccgta

SEQ ID NO: 12601 - DNA, 4195 bp, Oryza sativa
ttgctatgagaataaaagaaatttgctcctcaatctcaatctcgattagtggtggctttagctttctctcggagagctcaggttttcgattgatttagtcgcgaggtttgcttgattgctttcgaggaatcgggggcatctgctcgagattgggattaggtggagttcgaggcttggatgcatctggtgccggtagaatctcgcgagctggcagaattggctgtccagcctataattctggagctttattatttttcttggtagaaagtatctggaaatcatctctctttgtggcagtccagatttggatcattcatgccgtggaagaaaataattttgcaaataaatgattagatgattccccactttttctttgtttggtggatctgcattagcatgttattcatagggatgctgtttttttttaattaaaaaaataatccgacatggtaatgagtactttgctccagctatactttattgtcttaaagtacgcggtaacattgttaaacaaaataaattatcttttggatgctgccgcgaaattcacggtggatgctggaaaatcttgtgctttatgccgcggtgatgctatcttaggatattgattttttttaacttgctttctcaattctgtgccttgaatcactggaaagtgttcatgtactcctgcgtactaagttatgctgttttattgtctttccattgcttagtaccactgccaccctgtcatctctgataggactatattcataagcatctttgccaaaatcctcaattctgccatacacaacctgcatcgtttgtaactgtcatctctgataggactacattcataagcatctttgccaaaatcctcaattctgccatacaacctgcatcttttgtaagctttgctgtgctagtggttgataaaccaacgtcctgggtgttgtaaccgttgttgttgaaaatctttgtggtttttatatatatttcactggggtttctatggctgtggaaggatatcgacatagattgcctttttttacttttagctctattcaggttttggctccagttgacgatctgatttctcactttcttctgatttcatttgcagcatggttcaaaggcagtttttagtatgtcaaggctgaagtgcgcacttcgggggtttgatttaagagcacttttgatcctcttgattggtctgccaattctgatctttgttatataccttcatggccagaaagtcacttacttcctcagaccaatctgggaaaagcccccaaagcccttcaaagtacttcctcactactacaacgaaaatgtctcaatggccaacttatgcaagttacatggatggaaagtcagggaaacgccgcggcgtgtttttgatgctgtgcttttcagcaacgagcttgatattcttgatatccgttggcatgagcttagcccttatgtgtcagagtttgtgttgcttgagtccaactcaaccttcactggccttaaaaaggatctccacttcaaggaaaaccgtcaacgttttgaatttgctgaatcacggttgacctatggtatgataggtggtcggtttgtgaagggggagaacccatttgtcgaggagtcatatcagagggttgctcttgaccagcttattaaaattgccgggatcacagatgatgacctgttgatcatgtctgatgttgatgagattccaagtgggcatacgatcaacctcttgagatggtgtgatgacatacctgaagtactccatctccagctcaggaactatctgtactcatttgaatttttccttgatgacaaaagttggagggcttcaattcacagataccgggctggaaagacgaggtatgcacatttccggcaaacagatgaccttctggctgattcaggatggcactgcagcttttgttttcgctacattagtgattttgtcttcaaaatgcaagcttatagccatgttgatcggattagatttaagtacttcctgaaccccaaaagaattcagcatgtgatatgccgaggagccgatcttttcgacatgcttcctgaagaatacacattccaagaaatcattgccaagctgggtccaatcccaagcacattttctgccgttcatcttcctgcttatttgctagagaaagtagatcagtacagttatcttcttccagggcgatgcatgagagagagtggctaggcacttgcagcttgcataacctgatgcgcatggggatcgtggatgatgcccctttggagaacaacatgcgagatattggttgtacctgatacaatttggctgacttagttgagcgatcgcttggcgatttgggtgagttcatgattttgtactggtgtagccaaacattggaagaaggcctgacagcatagcgcatgcttgggcgctgcgttcttgtttttttagaggagctcagcagtgtgtgtgcttttacctcctgagttttacccattacttccatggttgatatatgaactcagaaactcttgtagattgtgaactggatgacatccagaatttttttttatcttgttctgtacagtatcatttacttaccagacgagttaccctgcattgattctccgggcaataatcatcctcctgtcatttgatatatttgctgtacactacagaaagcacatgtataatgcagttggtgtttggtctcagctaactgtttgcaaacaaccagagcaaacaaccagagtcgttgcaggttggcaagaaatgcagtgttttcactgccttttatcattttatcctcttggtaatggttaatgagctgcttggctggcaggttcagttgggtaaactatcacattctcttatatatatatttttagttattgtgagggttcgtctgttcgtgccgttaagcgacatgttaaggcggcattttgtgggacgaagtgggttggaacaggctgttcttgtcggacgtccgcttcagccagattgacaaacatcatgtacaggttcatctgcctgacgagctccagcaagtattcctttttaaaaaaaaatgaaatatttttttatggatttttattctgttaaaattatttcaaatattttttgaaaaaacattgcaagctacgaattccgcaggtttaccttttgctctcatacacgttgcattgcgttgaggcgaggtctctcatggtcaggttcttagcttatctaccgtaactaaaatttaaatttttaacttaattttggaattgatttcagagtttttcatcgtaatcattttataacattatccttttttaaatatagtacaaacgcatgtgtctataatgcgtacacacttactcctatgaacacacatgcatgttcttctcttatgagcatcttcggaagactgtgccgcaatatcttgagaaacgaagtcaccactagcacctcgcaccttttaaaccactagtaacatgtagatataaaagtcctattgataaattacttttaattgtttcattcaatttttcttcatttttctatggcttacccataaataattcaaacattagagcataaaagtgcaaagcgcatcgctgataattctaagtggaagactttcgcagggtcgacgattggctgcccggaaagtggtctgggacctcgagtgagcatccatccacgtccaattgaaaatcgtcgaggcacactaggacgaaacaaacaaaacccaaaaagatttcgtggttccaagaatcatggccgagtagatccccacttctaatgtaatgtcgctattaatctttgcgtcgcccatgcctccacttaaagagaaagaaaatctcaattctgatgggtcaagtaaaagaataccctgaatctgaaacgcatctctctcttcctaaataactttggaatttagacatacggagtgacagttttgtggtcgttttctttctgataaaaagattaatcaatttctgcctagtttccaagaaaagatttaaggttgtaaatatatcttgttgaagactgtgggtgagtcccttaggcttagttgttgataaagcctcattgacttgctttcaggtcatgtacggcagtcactgaagggcatatatgctttacatttacatgttctctttttaccaaaccggcaaaaaaatgcaataagaatattttaatgtcccgagccatatttaaaatttgctggtg

SEQ ID NO: 12602 - DNA, 1992 bp, Oryza sativa
atccgcgcgcagccttgtgaacacgtctctaagaggttgagctgatatgagttttgatgaaatcatatgcttttataattaaatatacaagcaccatcgttaagtttataacttacacgtgaatatattgtactataagaaacctaaccaactgaaatatataatcttgtgattgcacttgatcgtttgtgtttccaacaaagatgagttttatgtgtaagggtgtgcttccttcaagacattatatgctttattgaggatttgagattgtgtagcacaaccctccatttcaatttgatcatcccctaaacaaatgacactaagaccaaggaaaacaaaatatttattaatctcaaattaatcctcattggttaagctcattggttaaggtgattcatcgcttcgtatcatgtgaattgctcatgttttaagtatcgtatgccattgcactaatagaaattaatcttggttggttgtatgcaacacattaaatgatgcatatttaatctttgcacaaataaacaaagaaacacttgttagacgataatcatttttaggaaaacctcaaaacccttaagggatgatcaaaatatgatggagggagtagtgaacagaggaatacaacattgtgctttatttctacgcaacctcaaaaaaattcttacggaaaaggttgtaggtgcaaatatgcttgtgttttaaataaacttttacaattatgtatgtacggcacaattatcttggggtgatatgtatatgtaggtgtcgtacctatctacatcaaagcatctatggactacggtgacttcactaatcttaaaatactccaaaatataatagattatggttagatgagatatatactaatactacaaatattgacaggaagctgtttagatttatagtattaagatgacggaggaagtatgttggtcggtgtacatgtgtgtgtttataaagacgcctgtttgtgggtgcatggtatgttgtgtgtttccgaaagagagtacttgtaggtatacaatattgatatgtatctcttcatcctctccccatcgtcctcgatgaaaatatctatttcatcgtgagatgagtcacaaaaagttccataaaaggtgattttcagaagaggatgacagtatgacttaaaagaccttgacttaatcattcgtttcatcgagagagaagaatattgaaactagaaaactcattaccagatgattaaataaatattaattattataaacttaaaagttaatatatttagttttttaaaagacaatttttatatattattttacgaataaatatacagtatagcagtttgaaacagaaaatgagaaagttaaagcatttaggctgcgttcgggaggagggcacgtaaaacgaaatacgtattattgcatgagtaattaagttttagctttttataaaataggttaatatgatttttaaaataatttttatatagattttttttaataaaaaatacacggtctggcagtttcaaaaacgagaaagctgagttagaaaactgagaaataacacaggcaggcttaaccctgacggaagatgcccccgtttgcacgaggacaaaccaagacccgctccggctcctctcaatccagcctcccccccctccacccacaaacggctataactagtcgcttccaattatcccaccctctcgcccttctcgcaccgaacccaaccccaacaacactcttccgctcccaccccccgcacactccccgtatttcggaacacgtccccgacggcccgactgccgcacgcggcgaggaggccgcggtaattacgggcttagtccgagggggagaacgcaaaaagaccaggagaagacgaccagggagcgcacgcgcaccgcctcccccccacctcgccgccggcgaggtctcccgccgccgcctgccattgggagacgtgggctggagagaggcgggagcatctcgtcagccgattcccgttcccccc

SEQ ID NO: 12603 - DNA, 3630 bp, Oryza sativa
tgtgcgacgagatcgatgagttctgccacgcgcacgaggcagccttggtggatgccgtcaccgacctgccggtatggggcgatccacgggagctcatgaactccttgtgcagccccgccgagctgccagtatgtggcgatccacgggaggtcatgagctccttgtgcagccccggcgagaagcctgtctctggtaccaattaggcatcccacctactctattggtgctttctatgcttacggcttacctagataatttgcgttattgtggtcatctaatttggtggctgaaattaggctcatatgtgaatgctgtagaatggctgagacggccgctgttgtactaaggatgggggcaaatcagcatgttgtaactaatttaatttaattagggtatcttgagttgagatgttaatttatttttctgtgggatgccatcagaactgttggaattgtagctatgtatggaagagctgttgtgccttgtttgcttatatgaaattcgtgcttttcaaaaatgatgatcttttacttcttggagttcagcacaatattggcataaatttatttttgcaccttccaaatacaacttgctgtgtagacaagttgaaaactcaaattcttatccaggatattgctactattgtacagttaagttatgccagtttgtggagaaattagtgtttcataccataactttgaatgcagttggcaccatggcatctacagagtaccatctcagtttactgaatctctgattatttttgctctacttggattggaggaagaggaattgtgaagccagtatactgtccaaaggagagctcatatagtcttcttaatatttgttgtctcagaggatgtgtcggcttcctgccaagtgccgaccaccaaaaaatcaattctccttcaaattcttcccgtgacatctctgtttcttgttgtattgttcctttgttgaaaatttgaagacatcaagctgatctctgaactggtgacatcatctgccactttgcattggctgttctgcaggtatgaccatatgaatattttgttttgacaaacaagtgcaatttatggtgctttttgttaggaaaatgccaacattctttatagaaagttaacatgcaggttgtggttagttctctgatgcctgaatataattgcaattcgattacaaccaagcctgcatatttcaatttttgtccctacatattccaagtaaaattatacccttatttttcatttgttaaaattgttgctgttagactgcagtgttgacgctcagttaaagtggaattccttaggcttgctaaaaaagatatgtccacattaagtgaagtgcatgttgtgcaaacaaatatagtaggtagatatccgtcatatcaagtatcaagatgcatttgtgaggtataatgggtgaagcaggtgaaatgaagtgagataaatcagtaagattagttgtaaaatgaagctataacctattgtttgtattgtagtgttgtatttcatgcttttaacgaccttggcactgaaatgtctggtggttattttgtgcttgataatgattgctggtttctcttctcttagatcattatgtgcaggtaaaactagttcttttggttgtcgatattacttctcattgaatctgaacatattgtcacttggcacataatcttattatcaccctacttatctttctatcttttgagtttgtaatgaaatatattgtatcgttgtatgattaactgataaaacaactgtgcttgaaaattgtggcagcaatgcagcatgagttcaattctgagactatgatttgattgaatgactacacatatagcataagttacaaatagagcttactgagaacaactattacactttgttaaatgcatgttctaaaaatgaaatattccaaggtatgcatccatcgtacaaaaatgcatttggtgagatataccagctgaagatttaagagagcaaaagaaaaggagaggaatcaacgaagaagatgagctgcggctgcgagcaacaggaagtgcctaggaagagatccttatctccggacaagttcgtgactaggaccaaatcaagtgtcttgacgatgatgtctttaatggttggcatttttagtctagtttgtgtaagtttacatgcttgagttacaatcttagcatgttgcaagttatactctggtgcagaactagtgaatggcaagaaacattccttgccagcatcgtacaattcttttcaacctgcttatgtccaactgccattttcactttttcagcttgcctggagtatctcccattgcaaagtttgatctagctacagtttggagattgttactataatatttccttcttctgtcctagtaatatttgccaatttgcatccccttaaaatgtgtcacagttgatgtgtattagtgtttgtgtgtcagtgctagtgtgtcagtttgtgagtgtgtgttttgagaatatgttctgttaacaattggtcatcaattcattgagccccactcttaagatgttcccttagcagataacaccatgattctaacatatttcatactttggttcttgaacaagcagatgcaatatggctaacagcggcacaagcaccaataggtcaatctgggatgccagtggcatcatgccacaagctcaagctgcaccagcatgtataaccccttttgcagcttcatgtaacaaccactctgacggttatcacttatcagcaaagagctcaagctgtgccttatcttcctgcagctgcatcctatcagcaaggagctcatgctgggccatattgtgctccaccttatgcatatgccaaccctatgtcttaccagcaggctcatgggaatgctggctaaccatctgcaggttatgatcagaatgccatctacaagaatcctgcctaccctgatgatcatgatcagaatgccatctccaacaatcctgcataccaccatgctggctatgatcagaaaatgccatctacaactatcatccctaccctgctgggtatgttcagaatgtctactccaactatcatggctaccaggcagcttatggtcgcggcggcgccgcgactgatgcggtgagcgtgattcagacaagcggtggagcggctaccgtcgtcgtcgcgcaagcagctgatcccccttcagtccttctgatggtgcacttcaccccaaatccactggaggagctcagatgatgtatccctatctaagaatttctgtttctgttaccattttctgactgaatggatgaagtagaggtgctttctgcaacaaggcatcttgaattatgcttatgatttgattgttcgatgattctctatctgaaaaaacaatggagaagatctgtgtttgggagagctttacacctgttaatggggagaacagattttttttttcacgattgcggaaaaggattgcacgtcaatataatggggaggaagagagagcactagctgcgtggttcgtcgaacctcctggacgatgaccacgatgaccggaggaatatgctcctcaggctgcggctgctctccctcgctcgcttcacccctcctcctcctcctcctccttcccgcgtggtggcggcgcgctcctgggcggcgg

SEQ ID NO: 12604 - DNA, 1590 bp, Oryza sativa
tgggacccaattgtcagctccattcctcccttcttcaatttgtatgtgcttcaagccgcactatgacacgtcaaagtgcggcggtgtggcttgcggtgtgtacagattgaagaaggaggagtggggctgacaactaccccttcccctgtttttgtttattttcatccttaccacttacatgtgagacccatttatatttttaattcttttaatgactgagataccaccttaaccaagccaaattgctacatcagcaagaaccgctttcaaaaccaccgacggaatgaaaaactggtttttgaagttgggggaggtgttatatcctgttttgtggtttaaggatgtcatttgaccaacagcaagggatgagtgaggtgaaaatagacttattcctaaatgtatgatcggacttggatgtcccattaaagaaacatttcgggcctattcagattgtagccaaaataaaccttaccaattttttttcaatttggcaatattgccaaattttgatatgatatcttatgtatttatcagagtttggtaaaaattaaattgatgcacatatttaacaactttaccaaaaaaaatggtatgatttgaaatggcatcaatcttaacaacccattcatatgatcaattgatcatgttattacaagaagcaaaacaacttaaattttgtttaaaaacacataattatatattatcccaacaaataaaacgaaagaaaaattatttttcagagataacaaaactgaagagaaaaataataatgttacgtaacatggttaatcaacaagtctcggagatcgattagccactgcatccgaagttccgaacatccgtctcgcaaagtgcatgctcccagactgacagaagaaaaattattgtatgtttagttaacatcaaaattgaaagtttggttaaaattagaacgatgtgatggaaaagttgaaagtttgtgtgtaggaaagttttaatgtgattgaaaagttgaaagtttgaaatttttttttgcaacttatcacggcgtaaggcgcaagaagtatagttaaccaacaccagtaatatcgtacagtactactccaacatgtcaccaaacttctctcggcgcgcccggggtgaactccaatctacccgggatcctaactcgccaccaaacctcctcgtcgttcttcttttaccgcggccggacacggagcaggagcacgcacgcacgtacggcgcgcgctcgcctcactgcatttctatcccggccatcggtccggccgtcacgatgcgccgccgcgtcgctctgtgcctcgtgcttttcgccttcgccggcctgcacgcggcggcggtggaggccgtgacgctgtcgacgtcgtcgcggtggatcgtggacgacgaggccggcgggcggcgggtgaagctggcgtgcgtcaactggccgtcgcacctggagccggtggtgactgaggggctcgggatgcagcccgtggacgccatctccaagaaggtggcgtcgctcgggttcaactgcgtcaggctgacgtaccccatcgcgctggccaccaacgcgtcgctgtcgtctttcaccgtgcggcgctcgct

SEQ ID NO: 12605 - DNA, 2960 bp, Oryza sativa
  unsure (1)..(2960): unsure at all n locations
tcgtccgccgcccgcgtttcgtcaagtgtgcagcagccccgtcgtcgtcttcgtcctcgcctccgcgtcgtcaagcctcgtgccggctgtgtctcgccttcgtcccaggatcgccgccgaagtcgttccctcgccgtccgccgcgcccgttcgtcgttgtcgttcccacgcctcgtcgcgtggtggtaaggatccgtcctctcgctgccccgtcctcgtccttttggtgtcgccccgtacccgttgtgcggtcgtcgaccccggtacccgtgtaccggtgtcggtagtcgttcacgtgtgcgggtggtgaccgtgtagtgtccgtgttagtgtgttcgctcggtagccgcgtggtttccacgtgtgcagcccgcgtggtgtctagtggagtccgtttgtcggctactcgcctcggttgacacacggggtccgcttccgtcgacctgtggaccgtctctgtgtacctggtctaccgcggtcctttaggttgacatgtggggtccgcatgtcaacagcgcagccttcctgtcttttccaggctagcgcttccacatgttttattgttgcaaagcttaattataataatccgcaaatctccatataacagcactaaacttcggatgatcatatcttggtcatacgaactccgaatcgacccgttcaagtctcttaatgtttgttataacctaaagaactgtttgctttctttttatgtgttgttattgcttctttataggcttgtagctttgcttgtgtgcttcgcgtagctttcgtcgttccggaggttcccgaagtgtggttcgcggtcgtcgccaaaggttcggaaggccgttctctctgagcaaggcaagtcacatcatccttgagcatattgaatcccagtttataaaattattttgatttaaattaatgcattactgctttatttaaattcccgcgttatcactgtttatttagccatgcctatttatcattgttaagacattattattgctattgttattattaccttgttcaccctaggaaaataaaaccccaactagtgggtactctatttatggttccactagtgtgaacttaggtagatgcttcgctggttaaataggcaacattaggtggttttataactttagactttgggaaatctcatatcatttggacattatggaatggttggcttatggtggaattggacatacacctctcttcctctttcaaaacccctaaaacctgttttccggtggggtttgggtgcatgccagttgtgggaagtagcaccctggccactataaggattaagctcgggcctctgttgcaaagcactaccgtacttccacatgtctagtgggtaaggcttagtttgtggctcagtctggttataaacaaaagtacacggatggagatggacgaagtcgggggtcgatggacatctctaggacaaatgaaggctacacgagctgcggcccggtagtcgagatgtcatggcacagggctggtgtcctgctgctaggggctcaatcctgcctacctgtctcggaggttccggccgtaggtggggttgggtcggtactcttgtctatggctaggatgggttggaaactatgtcatgtcttccgtccgtataccgtggtggtatgtggcacgtggttacacgtgaggaagatgtgtcttgtgggtaaagatgtacacctctgatcagagtataatctattcgaatagccgcgccctcggttatgggcaagccgagcaatgtacccaagtcagtgttttaattcttaaaatttgctcaataactaaaatgtggaatggttggcctgggttggcttgggacgagctgggacccagggtcgggttgccagttcggtctgaatcatcgtaggccttgggttaaggcaggttcgtgagggttcacggccttgattaataattttgtgtagctctaggatcgtctttataaaatggctttgggcaactaagtgacttttaaatgctgtttactgcaaaacttaacccctatattattatccccttgtactcccttgcattaattatgcatctgccggtgtggcttgctgagtactgtggttgtactcattcttgctctatctttctccccccttcagtaagagaagcttcggagaagatgtcttaggtggagtcctggcttataccccagttgagcgcctgtgaagatggagccgtaggcccgctagtccgctgctgtttatttttgtttgtcaggcctgaagtgccttgtaataatgtatttattatcgatataataaagatgtgccttttatatcatgtttgtttggtgtaccccggcttttcctgggacggggattaatacactagcgttcgggaaaaggcaattttctcggtcgcgacaagctggtatcagagccatctcgactgtaggataagccaagggataaaacctaaggacatattttataaataaaactatttgcgaaagttcctgtttcctcctttccctaatgctatgtcacgtcctgataaattcatcccgaaataaaaatcattttttaaaaggaataatagaattaattaaaattcagaaagaaattggcaaacactaaaatgcgtacaagaaaaattcgaatgtggcccggagaatttttgttaaattctccttggtttaaaaggagccctcaaattttacttgaattttcagagcaccggaaataattattaagcaacaaaaacaattatcaaagtttagtaaaaagaaaaacctaaaaataaccttccttcctcctttgggccaagtttggctcaaagtccactctctctctctctcggcccgcggccgaagtccctctctcctccctctttttctctccctctccctccccctcccctctctctcccgggccgntcctccctcccctcccggcctgcccggtcccgggccgccctgccccctcccgcctgggccg

SEQ ID NO: 12606 - DNA, 708 bp, Oryza sativa
gaaaatggcagaacaatttcagagcttcaagggagatctgtaccagaagtatatactgaaggggcagacaccgaacttcgacacattcccaaagctaagggatcactgggacgagttcgttgcatataagacaggtgaacaagggaaggcgatgatggaaagaaacaaagaaaatgccgccaagaagaagtaccatcaccacttggggtcaggaggctatagcgtcgcgatgccgaagtgggagcagatggaggctagcttgattgagaggggtatcgaaccggcaacagccaaatggccggaacgatcgaagttctggtactatgctcacggtggaacgctcaacccagctgatggctcactggtcttcggctatcagatacaagaggctgcgcgacgactaacagatgcagtggaagcctcctctcagggcacgttccgaccagacagagatagggacgagctgacactcgccctgcagactccagagcatccaggacgaacttgagggaaaggggtgattccttggaagattggtttcaaggaggacatccacacgtacaggagtcggatgaggagcaagagagataccgaggcgaagattgcagacctagagttccgggtatcgagctatgaactcaacatgcaagaagaggtggcaaggaaggttgatgaacgcatggccgcacatcggtcccatgatcccca

SEQ ID NO: 12607 - DNA, 6221 bp, Oryza sativa
ccatccacccccatccgggtaacgatcagacgagccctaaaaacaacagcagaaaaatgggtgaaggaataggggaaagaaaatatcactagtcacctcgccatggcggcgcgggcggtgcgtcctgaccccaaccacgatcagcggcgagtccgcgaccgcgagcgagacgcggcaccaccggaccaccccctcccgaaccaagcaggctgctcctcctccctccgaacggcgaccaatgcagcggcggcggcggcggcgatcgatcgatcggcgcggggaggggaggatgcgccccccagcgacaccgcgcctccgcccttatccccctctctattgaaccccccgggattccggggcgctgcctgccgccgcaatggcggtttgctgctgcttttgcctttgctccgcttcctcctttcttcgcaagccacacgcgctccccaagagagagacaccactcgaggggaaatgcaaataaaaaggaggagcgtttgcttcggtagcgccgcgccaccgcgtcttccggtttctgatttgcgggcccattagggcccacttagaatgtgttcacgcctttggggccgtatgggcctgttgtgcggcccactgtaacttgggtatggaatatcggcacggcataacacatggccctctgttcggataaagttaagatctgattattggttggaagccagtttcaaagaatatgataatgttaaaaaaacagaacttgtggtttcttgtttattgtttgaatttttaactatagcttctcgaatctagatgaaaaatttatctatttagggaagtttttattctgaacgaagcaattgccgtaagctcgtcgaaaaggcttgacagaggaataatattgtttccttaaaaaaaaatgaaagacctaaatcatttgtaaatcattggtggtgttttttttttataaccgtataggattaactcatgaattaacgacaggacagttaacttgcacacaattgtatcgaaacaatcacggtagacgcggccgcgcacttagcgtgtggtgcggttgcacgaaacggactgtaaatgacgagccatctcagttaagtgatcagcccattaatctccctttttttacagctgacgcaaaaaaggttaaccatctttcaggttattacactttaacctgcagagaatttcgtagcttttccagtgatccatcacaatcacataacccgtccgccacgaaggccataaatccgcctatcaattgatcaatccaggtcattatcagcgtatcaggagaagtctagttagctctagccacatgccagcgccacccaaacgaccaggtcgccacagatattgttttatattttaatttggcaggaatttgctttcgtaaaggaaggaaaaatctaacgagctttttggttgcgcgcccatgcggtttgaatgacccggtaaaagcatccgggtcgtcaaacacacagcgctttgtggtcgtaattaattaacaactttgtggtctaattataatttgttaagaagaaaacaagaagatataataagatggtgcttaatccagcctgaaatgaccacgcggtgtatgttgccacggtctacgccgttgttagttcacgacatcaaacctgcattctctacgcgtctcgcagtggtgtaaaatatatagtgggtgagatcgtttgtggactccaaatgaaaactttctcattatctatttaatgttatgtttttttaaaaaaaatacatataggattacaagttttcttgaaggatcatattaatctgtttttaatgatatgttttttaaaaaatattacatataagattacaagtttttcttaaaaaatcttattaatctatttaatggtatatgtagaattacaagttttttttaaaaaaaatatatcttataatctatttttaaatttataataattaacatttgatcaatcattaatgtcaatggtttctcgtgccttgtgtgctgctaatttcctaaaccgaacggagcggtgggtgacgtacacccgcttccgtgcaaaacccaaaaaggaacttcggagttgcacaaaggttgtgtttagttcagcacaaagtttagattttggttgaaattgaaaatgatgtgactgaaaagttatgtgcgtatgacaggttgatatgatgaaaaatgactgaagtttggattcaaactttagatttaaacacagccacatttccgttcggaatccccccggtagagttccaacggtcactgcggctgaacgatctgcgttgctcgggtcagagccgtcacgaggaggaagaggaaaccgacgcggcgaagcaaccgagagacgcgacgcgctcccttgtccccgcgcccgcgccgcagttccatacgcccccacgaacgaatccgcgacgcacgcgcgcgccagcggcgagccaacccaaaccgaccaaacgaacgaaccaacacgagtcgacacgcttcatccgctcggggatgggaaatccctcgcccgcccatgccaaattgccaatgcggcgcccatgtcgtccctggtcagtcatggctggcactggcagcgccgccacccagccgcccgccatgatctcctcgaaatcagaaaaaaaagaaaatccgtgcagcgacgaagcgtgacagaaatagaatttcggttttgatatagttatgtcgccataaatcttctctaattacagtcagtttttagccctcaaagtttcgtttagattcgtacaggactgcttaatttgccatcgtgcgtgcaagcactagttcatactacatacacatgcatctgtgctgcttgctgtgatttatctgatcgatcacgttcctttgctatctacatgtaaaattacactctatataattacatatataatttaggaagttacaatgtaaatacatgctgactattttttggtgaaaaatatggcgccataaatatagccagaattttggttcagagatttttgtgccgataattctacagctatagtatgtgctcgtttgtttgcagggaccaggcaacgtgcgatgctgctgctgcctgccagcacggaacaacaaaaattaagcgcgtaggatcgcatcgcattcgctcgcatacaggggaggtgagtagaaaaatgagccaaatttgcagcgtgttcgtttgtcaatctggctgaggtggacgcccccgacaggaacagcctgttcccaccataaagaaatgccgcgttcacaggtcgcttaacggctcgcatacagggagtactatttcgttagcaaactagcaaagtctagtggtgatggattaccggattacccaactgaaactgccagcctgatgctgctcattgccaaggatgagaggacaactggagaaggccgaacaatagtagtagtgctgctgcgagctcagctcttgccaacctgcaactgccaccaacatgtcagtaaatgtctcagctgctttacctattattgggctcaaattgaaagggaaatatcctgcgtgttcttttgactcaaaacgtgttactactacagcaaatgcatcaaagggtaaacgaattaggaacacagggggacactgtcaacagttacaaggagatgaacatcatagtcggggtcaagaagagaaaaatggtactagtatctcatctgtaagtaaatgacgatgtacaccatggagttggaccagatctagagtgtcactcagttcacaatttacaaatagttttgaggtcatatatcaatcatgggagcaatgaataaactcgggtggtataagcacactctgccgagctcctctgcaaaacaagcacgcagcacgcccaagcatgcgctatgctgttaggccttccaactacacagtacaaaatcatgaactcaaaccaaccaccaattggtcgctcaactaagctagtcaatcgtatcagctacacgctgtggcgcgatgttcctccaaaggggcattgtgcatcagatcataatgcaaatcatcatccctagccactttctcgcatgcagttgcccggaagaagatagcggtactggtccattttctccaacagataagcaggaaggtgaacagctgaaaatgtgctagggattggccccaacttggcaatgatctcttggaatgtatactcttcgggaagcatgtcaaaaagatcagctccttggcatatcacatgctgaatccttttggggttcaagaagtacttaaatctaatccggtcaacatggctgtaagcttgcattttgaagacaaaatcatttatgtgccggaagcaaaagctgcagtgccaccctgagtcggccagaaggtcgtctgtttgccggaaatgcgcatacctcgtctttccagcccggtatctgtgtattgaagccctccaactcttgtcgtcaaggagaaactgaaatgagtaaagatagttcctgagctggagatgaagcacttcaggagtgtcatcacaccacctcaagaggttgattgtatggccactggggatctcatcaacatcagacatgatcaaaaggtcatcatctgtgattccagcaattttgataagctggtcaagagcaaccctttgatatgactcctcgacaaatgggttctcccccttcacaaatcttccacctatcataccataggtcaaccgtgattcagcaaattcaaagcgttgacggttttccttgaagtggagatcctttttcaggccagtgaaggttgagttggactcgagcagcacaaattctgacacatatgggctaagctcatgccaacggatatcaagaatgtcaagctcattgctgaaaagcacagcatcaaaaacacggcgtggagtttccctgactttccatccatgcaacttgcataggtttgccatcgagacattttcatgatagtagtgaggaagcacattgaagggctttggcggtttttcccagatcggtcgaagaaagtaagtcaccttctggccatgaacatatataatgaatattagagctggcacaccaatcaagaggatcagaagtgccctcaaatcaaacccccgaagcgcacacttcaaccttgacatgctcagaattgcctttgaaccatgctgcaaatgaatttcagaaaacaagtgagaaatcaggctgtcaactgaaaccaaaagaaacccatcttcttcacataattatttcaacaccaatcaactgcacaaaacacaaatgaaaattcaacagcattggttctaccaaaccagaggatcaggttatcagtacaaattgccaaaaattctaagttgtaacatccaccgtgaatctagtagcagcaataaccaaaggatagtaattttttttatttaacaacaacgttacaactacaggatcatagacagtagaatgtgtgcatattcccggttaaaaactcaatgttcatatccatgataagctaatgcatatccacccaaaaaggaaatcagctgattgtttatgttccatgaaattgttatctttggcggcatgaataatccctcgggaattttgcaaaaagtaaaaggcagatacttgtaacatccttatacaaaggaaaagaaaagaaagattccaggattaggctggacaaccaattcggccagctcgcgagattctaccggcgccagaagcatccaagcttgaacttcacctaatcccatctccagcacaaatagcccccaacaaatagaagattaaaatattccaatcagcaagcacttatgaattattatgatcccagagcaataaccaataaaaaatcgaagcagcaagcaagcagttctgcatccctacttttattcgatccaaacgcaataaaatagccaaaatcgaagcatcaagcaagcagttctgcatccctactttttattcgatccaaacgcaatagaatagccgaaaaaaagcaaggcaccaagaagaacgaggggtgcttgggctttttccgtggaccgagcaatccatcgcgaaaatcccaacgcggcgggagagaaagggatagatctgggtgggacgagagaggaaaacagaatctcacctcgctgccgccgcagacgcccccgcagatgccgccgtcgttcttcttgcagttgtagtagcccgccgcctccatcgcgtcggcaaacgcgcggagcagcaaaggtggggacgcgctgctcgccgccaatggcgacgcgtgcgtgcgtgcgcc

SEQ ID NO: 12608 - DNA, 1040 bp, Oryza sativa
cagagcggttgccttgcttcaactcttggaattcccttttcttaagggccatgactccggcgggcacatgggtcctccggaaagcggcggtgaagcgggcccaagtaataggctgtccttctggctgcgtagcctggaagtggtcccgccatagagatgcgggcccctgcagttggtgagcggcaaagatgactttctcctcatcgttgcactgcacggtgtctaactttttccccacggcatgcaaccaatccaaagcatccacggggttattggagctagagaaggtaggcggacggatgcggaggaactcggcgagtttagagtgttgcgggggtggtggtggaggtggagcattatgctgtggcggattttggatgtggtggaggaaagcagccatcatgttggcctgctgggcgaggatttgggtgaggatggagttggtgtctggtggtggtggtggaggcgggggaggaggcggaggtgggctgccatggttgttgtggttgctaccttcgggttggttgccatcaccggtagtagcacttctcctggttgtcaccatctgaaaatcccacatagaaccggcaaacagagagagctgactattaaaactaaccacccacgactaccataattcttgaatttattactgctattaaattggttcattaaggttcaagttgcttaagcaaataaaataaagacaggctccgacacagttataccacacaccggtataaccatgccccacacgactctggcagaaaaacaaacgagaagaacacacgcgcaagcctactaactgctcgtctacttctgcgacgggccagggcggaaggtgagcagcagcgcatcctccgtgctgccaacgccggaggctccctcctcctgaggaaccacaggcgcgggctcggcacgaggggtctcgacgaagcaggtccacgccagggactgacgaacagttcgggcctggaggtactcttgcgggcggtgatcttcaggctgcggcagacgcgacggcgcttggggcgacaaac

SEQ ID NO: 12609 - DNA, 602 bp, Oryza sativa
tgacttgcattttcaaaattcgagctgtgacggtttcgacgttcggtgagctatgcttcgaccgattcgtttcgcccccctggcgcgttagctgatcaggagtttgccttgggatttttccacaaagacatcattcacagaaaaagaaaagcggaaaaacacaaagattttatactgtttcgggcctccaaggtggataataaccctacgcccaacttttttttcttttttcattttcctcttttttttttgctttttgtgccgaacggcttacataatacgaacatatttacaattggcgaatcgggtgccacccatattacacatagaagcgtctaagtgaagcgacgttctaggagtggtcgaactcttcgccctccaatgttgccagccgaaaagaacctgttcgagatctctgctttatcagatatggtccttcccacttagattccagcttcccgactgccatagggttcgccttctttgttagtacgagatggccgggccgaagctctgtcggtcgaacctttctgttataggttgccgaagtgccttccgcgtacttgcgcatgtgttctagtgcttcgactctcaccactttc

SEQ ID NO: 12610 - DNA, 1060 bp, Oryza sativa
  unsure (1)..(1060): unsure at all n locations
ccgcgttgatgaattgaccaccnagatggnacagnacntcatcattctagatcgatccagatccggcgcccactctcactcactcactctctcgaccgccgcctcgcctctctcgacctctctgccgccctctacgccctcctctgcaccgacggctcgacctctccaccgacgccggcctgcaccaccgccgccgcactcactctctcgaccgccgccatccatatccaccgccatctccgctgccatccagaccctcctcgccgccgccctctctgccgccatctccgccctatccgccgccctcgccgcctccttcttcaccgccgcctcctcactcactctctcgaccgccgccgtcctctccaccgccatctccaccgtcgccgcctcaacccctcctccgccctctccgccgccatctctgccgtcctctccaccgccatctccgccgccgcctccaccgccgccctcgccgccggtcgtcctctccgccgtccgtccatcgacttccccgacctccccgaccctgacctccccgacgccgggatccccgaccaccgccgaccgcctcgacctcttcgccactgcctctccgccgccgccaccaggatccaggacgactacggcctgcgccgccgtctccaagtacgccgcttctccaagtatgccgccaccctcccccattcctccttttttccgatggatgaattgcattgtttagatgaatgaaatgtgatttgttgtttcgattattggtgctgctgtatagatgaattaaatgtgatttgttgtctgtgaatgttttggatgaatgtaggggctagattttatatacatgattttggtgcagtgaatcttagcatcaatagaggatcttagcatgaatttttaatgcattttgttttctataattctttgataattaaggacctttattaggtgtagggtttgaaatctagttacaagggaagaattgatagattggccgcagatttaatgtagttccgaggttatcaaacctgatgaactacttgcagaagaagagcctatcaccgtc

SEQ ID NO: 12611 - DNA, 737 bp, Oryza sativa
cctgtcgtcgcccatttccatacagaatcttcgactgatgtcgcgtggcaaactcctgctgaccgtggagtccaagaagtacccacatctgcgcatccagggacacatcgtgacccgagccagctgcgaaatcttccagaccctgctggcgccgcacagtgccgaatcctcgaccaagagcagcggtttggcgtgggtctacttgaacaccgatggatctctggcctacaacatcgaaacggagcacgtgaacacccgggataggcccaacatcagtttgattgaggagcagggcaagcggaaggccaagctggaggatctgacgccgagcttcaacttcaaccaggccattggtagtgtggagaagttgggtcccaaggtcctcgagtcgctgtatgccggcgaactgggcgttaatgtggccaccgagcatgagacgagcctgatccgtggccgcctagtgccccgtccagtggccgatgctcgggactcggcggaacccattctgctgaagcgacaggagcacacggatgcacagaatccacatgccgtcggcatggcctggatgtccattgacaacgagtgcaatctgcactacgaggtgacgctcaacggtgtgcccgcccaggatctgcagctgtatctggaggagaagcccatcgaggcgattggagcgccagtgacgaggaaattgctcgaggaattccactgcagtcgagcgcgagtcactcacgcgg

SEQ ID NO: 12612 - DNA, 11839 bp, Oryza sativa
agggcaagcatatatgaagtaaatatgatagtcaactggttaacaaacgctaaatataagtacaatactaaacatgaatggaagcaaaccggtacaaaatgaaagatcagcggagcttcacgatccactaaacagccctcaacggtaatatcgttcgttttttgatctctagtgaacaaataaacctcacagggaaggaatgggtttataattgtaaggcaaaaatcgccctcccccagggcgtcagggggaccgcttgctaaattccatgccccctaacagcccatttgctggcggccccccgcccagtgcaaaatcgccctagcgaaggccgccaaggggaccgcctgcaaaattccatgccccccctcgccgcccatttgcaggcggccccccgcacagtagaaaatcgccctcgcgaagggcggcaagggggccgcctgcaaatttcgttgacggccgtcgcccgagagcgaacggccgtctgccacgtcatatttgccgccctctgagagggcgatttttaggcggtaggcgactacttccgtcaattttcaaaatggaaaattatttttgtaaaacttttaataaaaaaaattataaataaaaaaaattccacccccaactatgcatgagttcatttaaaaataatctattattgttatttgaataagagctagcttttcaaaagtcaatttgaaacttcaatttctttaggctagtgttccagttagttatgttttgtactatacgatcgttttgaaatgcaatttttttttaataattggcagtcgattctttaaaacaacggccaaaacaaattccattatctccaaaagaaaattcagttctttattttctgaggtatcctttaatggttttcagtaccaatgctcaatagttctcgcgaaaagaaaatataagagcaaggtgtataggagatatcaggagtagcgcctgaagggtgattagttatggcttttgtttgtgagatatgcgcaatgtatggtggttgggaatgtatagtaaaaggcttaatccagccatagttcaaaccgaaggttcaaaatttcgaagtgaaatatctgaaatcccctaaagttggatatacaaatgggctaaacaaggatttgttcgtaagaaaaatttgtgactaccactacttcaatgaaatatattttgtgtttagtcaactttttgtcgtggacgtcttattgggcttgaagcggacataaaaggctagagtcttgggttgaatttatcctggcccaaagatagataggccatcgatctatacaataaatagaataagtttattttaggccctttttcttaacatcgagtttggatcacatcctcaaaccacaataccagatatcactggcagcgtgatgatgaagatatctctggctcggatataaccatgcttcacttcaacaagctgacagtgcaaatgttatatattagttttacttataatatgttttaataaatgtcactgtaccatgagttttctatattttcgtttgcagaaatacttgtataagtgaaagaaaggagagcgagcttacgaagtacttcgatgatcaaaaaggttgattggagattaaaccaagatatttcccaagtctatctttatatcaccatgtcacttttgttccatacaagacaagagatgaagttctacacgtttcggatctagagtcgggtctccttaacttcaaacggacctaggcgtcgattcagaaggactctcggggcccatgagtacttgttggaaaacttatggcgtatacttcatatggttattgttccacgttaaaattcctcctgaacagtcgggaatctacaaaacaagccacacacctcatccagtctaagtctggtttggaccttgggccttgtaattgtgtcatgagctaagtccaaggggtgaacgccctagagctaaccctaggacatccctaatcatatttattcagtagtcatcatcgtttagatttggggttttgcttagattattttgtcatcgtaattccgccactagttcggtttgtggaaccctaatttgtaatattcatcttatattcgtaatatattcatattgcatcttctactctcttgtttgtgttctcgattcgcttgcaggagatattattattggtgaggccaaccatgtttcggtttaggtgataaccaacgaaggggttgtgtagtgattgtgaggggttcagtcatcttgatcagagccttcggatcgtcaatgtcgagtctctataattgactagtcagtatctaacggaagatcgggatcctagtccgcatcacatgaggaccaaccgtgccacggcgagcggctactggaaggccactgacaaggacaaggaaatcttccgcagccgcagtgtccagctcctgtccagtggccacgtgctgcccttctcccttcatccgtggccctgaagatggggaagagagaggaagagaggtggagataggattacgaaacaattgctcactgacatgtagggctcgtgtggtcccagcaaactcagctctccatgtcagctaaaaccaaacatgatagtgctctagaatctcaattaatcaggttttataagttggtgaacgcattatatctggtattgtggtttgaggatgtgatccaaactcgatatcaagatgagagatatgaagtgaacttatttctgctccaaatccagtaggcagcgcaaaggccatatgaaagtgatatgaagaatacagaaggaggcaatagaaacaggagtaacacaccatagcaggcagcagcatttagcttcagctagcagccaacacttgttcagtgggactgtccgttacccgtaaaccgaaggatttatattcttcaagtctctagatagtagcgtgtgttggatgtgcatgcatgtgtgggtgcgtgggtagtggcagtgggtataaccgtgcagtgtggagtgtgttcgtatacgtcctggctttgtacccttgtaagaaggcagccaacacgctggtaccagccaatcctcaacttgagtgaagtacatgggcggtacttaaacttgagccgatatatcatctaagtctctaaactcctaaaatatatttttaggttcctaaacttaccaagtgtgtcatataaatccaaacgggttctaacccgctccatgcgttgacctggcagtgccatggtgacacctacatatatatcaatggaatccacatgtcaagcatatataaaaattaaaattaaaaaccatattttctcctcttaggtagacagaaaaaaagataaaaattatagatagagaggacaaaatatgtctttctaattatattttttctatgtgactgacacgtgggtccaactaacacgtatacactatcgtggcatgccacgtcagtgcacggaaggggttggagcttgtttggacctatatgacacctaaaacaagtttgaggacccgaaaatgcattttgagagtttagggacttagatgatacatccacacaagttttagagaccgctcgtgcacttcactcttttcagaatatcgaaaaaatcaccgtagagcaaattccacttttgaaaatttcgaaaaacactttcaaaaaatccaaaaatcaccaaagagcatttttgcttgccaccactattacaaaaattttgaaaatcacttttagaaattccaaaaatcaccagcatttttgctagcgcggccttttcgaataaatccgaaaatcacctgacaacaattttcaagaatgagaaacactttaacaaagattttgagcaccaaacttattcctagacatcaaggcaacatcgtccttaatagtacggtttttctatcgacacattcaaagtaaaaaaaaatcacattttaccgtttgaactttcgccgcactttttctttttatttttgttaacacgaatggttattgccttgaatataaactcatacaggactaatattctttcacatgttctcaaatcagctgttagtcctcactactcatattgttattaactaacacaataattagggacctagttgtactttccgttggttaaaaagtgagataacaacgtcgtacataaacggaaggagagagagtaggtattggtggtaacaataataaataaagaagaaacagtagtagagcaataatgcctgaaatcttagtggcaattatttaaatgtcacttattatatgtaaaaagacaaacatatggtccaagtatgcaggtgcttgtctccatgtggtatctgagattgaaacgatggatcatgcaacttaatttggattttggaagttgcacacctgcagcacggaatgcagattttttttttatttagtagatcttactccctccgtctctaatataaaggattttgacattttactttatgtttgacttttcgtcttatttaaaaaaaataaaattattatttattttatttgtgacttactttattatctaaagtattttaaacacaactttttgttttttatatttgcacaatttttttaataagacgagtggtcaaaacagtgcaagtaaaatgtcaaatcatattagggatgaagggagtagaagtttagtaggttacacgcagattctttcagccccaattggagcattcttatttttccggatcaccatggaatcgaatcgttgctccaaacaaggactcaactgattatcatgggatcaagcgagtacttatatattattgtaaggttaattacatggagattcttcaagccccagttggatggaacatgtggcatttctccagatgccacaaatcttttgagcaaaagttccagtgaacaggtctaaaattgaagtaaaccaaagcagataattgtacagtatccagcattgatcagtactaatttgctggagaaaatcactgatgaatcatcattatcgatcacgggatgccatatcaagaagctttgatcctgcaacggcaccaaaaaagaacgaagaacacatcagtgtataacgtcactaacattaatatcatcgatcgtgttcgaattaatcactctgcagctgctaaatagctcaccagttcatcttgggcaggatcctgtcgagatggaacagatgcttcctcacccggtacacatgcatcgtgtacattgccgccgcgcaggtcacgagaaagaaggacagcacgatcagctcgccgaaatcctgttgaaaaaaaaatcgacgggaaagattatacccgattccttagaaccacgtgaacgacgacttcaatgcaatgttctttccaatatcgcaataagccgtgtatatatcctcgttggatgtagaggtcgggtttttatgtaaaaaatttttattgtggcaattaatttccatgtgcagcatgggggatatggtgttggtaccctggggtcggagacgatgatgcccatgacgtaggtgagcaggtcgaacatggactgcagcgagttctgcacgccgccgacgacgcaccggtcgctctccgggacgccgtcctgcatcagctgcatcacggctaggtcgaacatccacagccccagccgcgacgccgccacgccgcccatcagcatccacgccgacgccaatggcgcggcgccgccggcccagacggaggcgacgcagacgaggaggcagcaccactgcgcccagatggaccagaggcccgcgcggagcgtggacacgcgggcgtgcgccgccgggtacacccacgtcgcggcgatgccgacggcggcgctgacgccgcgggcgaggctgatcacgtatgccgggatcccctcccagtccagcgtcgccgtcatcagcgtcccgaagctcagcacggtgaagtagaggaacgcgagcgccacgccggggagcaccacctcctgccgcgcgtacaccgcccacgactcccagcacggcagcatcgtcatccacagccgctccaccttctgcggctgcgccgccgccgctgcctcgtcatcgtcggcgcgccgtcttgagatctggctggtctcgctgagcgccgggaagccggcgtagacggagacgaagagccagtactggacccacacggcggcgaggttccacgccgccagcgccgccgcggaggcctccatggacacgaagctgatgaagaacccggacagcaccggcgccagcagcttgcagctcaggtcgatccgccggatcaccgagttgatccccgtcagcaccgccgccggttgcccgccggcgatcaccaccaccctgcacgcagcaaattctcagcaattttctcgatctatcaatcgatagatgcgaacaccgaacactaccattctctctcgatcagtatggtgccagcgagggtggagagcgcggcgagcgcgccgaaaacgttggtgacgacgacgagcgccacgaacgccgggaaccccgcggcggcgagccgggcgccgtagacgagcagcgccgtgacggagacgccggcggcgacgaaagacgcgccctgcagcagcagccacagcctgagcacctgcaggtatgcgagcctgtcgacgacggcgccgacgatggggcccagcgccgccacggcggaggcctccacgacgccgtacaccgccgtgagcaacagcgagcccggccagattcggatcatgtagagccccaccgagaactcccacatcctcgcgccccacctcgccaggaagtgccccacgtagagccgccggagaagcgccgcgtcgtccaccccgccgccgccgtcgaggagcggcgccgcgaggtggccatcactcgccatacttactcaccttgcaatcttgaatgattcttgatcgatcacacaagaagatgtacggatcagaggccaatcgatcgaaccgcgacgagactgatcgatcactccgatattgatgtgaagaagagattgattcttagccaggagagatgagtggatcgagggattgaaaaagagaggatcatgcaggtgaagggtgagacaagaacacgtctgcatctgagcagtcagggagacgctgctcttgtgctacctccggtttactacctgacagaggcagcagctaacctactctgtctctcaaatagtagtaaatatcgagagagaattttaaactctggagggatgtcctcttttattatttgcatgtcacctaaatagttataaaaaaaataagaagatgtactaacatgtgatatatcactccataagtatacaagttaaaaattcaacttctacatgttagaacgaaaaaaataaatttaactgtgagtatacgttaactagctgtagtttaatgtgtttgtttttttttttgcgatatgtataagttgaattttaacttgcttagactttttgtttgtaatttttttatcattcgttttattaaaaaaatttgaaattattatttattttgtttgtgatttgctttattatcaaaagtactttaagtgtgacttatcctttttatatttacattaatttttcaaataaaacgaatggtcaaatattgtaagcagaaagtcaaagcaacatctattatgggactgaagtagtatattaatgcatctttttaaattttttatagttatttaattaatatgcaaataacaagaagatatgcccttgagaattagaatagttttacagtaaatactctatatactattatgaaaatgtctttctcctctgcctccacatggaaacttcatttctctcctaaaaaccgtacacctaaaaaattgttttcttttaataaccaaccattttttttaaaaaaaaaacaaactgcttgttgggttaaaatcctcaaactaaactgaataaaaacctgttacaacactagtagaattaaatatgtaacttaactcagatttgggggataattaagtaattaagcctcggtcaactacacacttgcgtgataaactacacgggagctgtcaaatcttgtctgatagatatatgagctcccattggaggtacttagctagataagtcgcggttaataatttggtgtaatatactacaaggctgtcaattcttgtattgtgtacttatgtggcagagtctatagtatgatgttatctctgtcagaccaagttgatttgtattactgtgggcagctccatcgggtttattgtatgatcaacctattgcagggaagacgtttagtatgatcaattgggcctaccttaattctttcactgaatcaaattgagagttgtatagggattaacatttgctctacggtttattaaaaaaatgtggttccttaaaataattttttttctactgcattatatagaccatttatttaacttatctctgtgacaagtagataattggtgataataatttgttcagtaatttaaatcaaatgggacagagagagaaagagagaagacacatttttccgatctgtcgattgttgtaagcgttccaccaaaatcttatttactgatcagggagagttggttctgctaatcacgaaatcttatttagtgataaactcatatatattttttcccgctagtctcaaaaaggattattttctataaccaatgaaaaattgctcaagtctgattcgtacttctagggtagccttacgaaggtcaaacataattttctttcgtatatggatcattgacgattaagaatgacccttgaattaaatttgaaaataataaatggttggaaaacacaagcttacaggaacaatatccttaccaatacaatattgttaggcatatacagacactacgccagatcctcacacctctgacgggatacctgtgacgggcaaacgaattggtcagtagtgaccattacctttgacgggttatacgggatgccgtcaccggtgaggcatctggccgcggcccgtcacaggtatcccctcacctgtgacgggccgaaaggaaaacccgtcagaggtataccagtgacgagtttttcttccaacccgtcactggtatcccctcacctgtgacgggccgatacattagaagccgtcagaggtgatgggccgccacctgtgacggctttcatttctggcccgtcacaggtgagaggataccagtgacgggccgttgaatagaagcccgtcaaaggtatgagcaatacctttgacgggctttttttatctaacccgtttgaggtgtgttgggtctataaatacccccaaactgccaactgctttccatcccgaccattgtactgttcacaaatcggttgggagggcaaggggggcgattttttgctaaaattcaaggtaaaaaacacattattctccattcattctcaacatatcgatcatcatttatttttcttcgtatgttgttgatttcagatggatcgtagatggatgtactatgcgcatcgttcgtctaccgagtatagagagggggtcactgaatttgtcacatttgcggataatgacagaaaaagtaggatgagcatgcacatgttgtgcccatgtagggactgtaagaatgaacagatgatcgaagacaaggatgaagtgcatgctcatttgataatgaatggattcatgaagaaatatacctgctggaccaagcatggagagcaagaggcgcctgatgtcgcagctgaagaagtgttggatcaggatgtagagaacaccgccgcagctcgagaaggcatgttcgtaccttctactttaggtggagagaccatagatttggacactcaatgtctatctacaatgttgcatgacattgaagacgcagaggacaacgacagagattatgagaagtttagtaagttggtggaagattgccagatgccgttgtatgatggatgcaagtcgaagcacagcaagttgtcatgcgtgttggaactcatgaagcttaaggctagtaatggctggtcggacaagagttttacagaactccttgagctgttaaaggatctgttgccagaggggaacaatttacctcagacgacatatgaagcgaagcaagtattatgtccgttgggcctggaggtcagaagaattcatgcatgtccgaacgactgcattttgtattacaaggaatacgctgacttggatgtctgccctatctgtggggcatcaagatacaaacgagcaaagagtgaaggtgaagaaagtaagtcaaagaggggaggcccagcaaaggtggtgtggtatctcccaattgcggagcgcatgaagagaatgtttgcgaacaaggaacaagctaagcttgtgcgctggcatgccgaagaacggaaagtcgatactatgctgaggcacccagcagattcagtacagtggaggacaatcgataggatttaccaggaattctcaaatgacccaagaaacatgcgtttcgcaatgtgtacggacggcattaatccttttggtgatttgagcagtcgtcacagtacatggccagttctgcttgttaactataaccttcctccctggttgtgtttcaaaagaaagtacattatgcttgccatgctcattcaaggaccgagacaacctggcaacgatatcgatgtgttccttgaaccgataatcgatgacttcgaaaggctatggaatgagggcacacgaacatgggacgcatatgcacaagagtatttcaacctccatgcgatgctgttttgtaccatcaacgattatccggcccttggcaacctttctggccaaactgtgaaagggaaatgggcgtgttcggagtgtatggaggaaacaagaagcaaatggttgaagcattcacacaagacggtctacatgggtcacaggagatttctcccaaggtatcacccgtataggaatatgagaaagaatttcaatggacacagagatacagccggacccccgacagagctaacagggacagaggtgcacaacttagtgatgggaataaccaacgagtttggaaaaaagaggaaagttggaaagcgaaaagagaagagcacatcgaaggaaaaaatagaggagcatgtggaaaaacaaaagacaaaagagaggagcatgtggaaaaagaagtcaatattctggagactaccatactggaaggatcttgaagttcgccactgcatagatttgatgcatgtcgagaagaatgtatgcgagagtttaatgggattactacttaacccaggtactacaaaggatggtctcaacgcccgacgagatctggaagatatgggtgttcggtcggagctacatcccataaccacggaatccggcagggtttaccttcctccagcctgctacactctctcgaaagaagagaagattgatttgctaacatgtttgagtggtataaaggttccatctggttactcatcaagaatcagtaggctcgtttcactgcaagatcttaagttggttggaatgaagtcgcatgattgccacgttcttatcacacagctgttgcccgttgcaataaggaatattttgcctcctaaggtgcgacacacgatccagcggttgtgttccttcttccatgcaatcggccagaagatcattgatcccgagggactagatgaactacaggcagaacttgtgagaaccctatgtcatcttgagatgtactttcctccaactttctttgacataatggaacatcttccggtgcaccttgtgaggcaaacaaagtgctgtggtccagcattcatgacgcagatgtatccttgcgaaaggtacctcacctgtgacggcccagagtgctgggcccgtcacaggtggtcttacctgtgacggctccacggttggcgcccgtcacaggtgaggccacctgtgacggccacatagtttgagcccgtcacag

SEQ ID NO: 12613 - DNA, 1046 bp, Oryza sativa
cgggtgaaacatagcagactgtgccacgcatgcttggtgtgctgctcactgctccaccactcttgggcacgaattccccactagcccaatccttgctgctccttctcacaccgtcaatccaccaatcaatgctgccattgccattgctgctcctacgactccagcttttcatcattctccaccttgatcgtcccttctcctttaagtcacagtccctctcccaccactgcatgctagccattggaccaatctcactccttgacttagcaagtgctcgccttttttgcttcttggttagctcatcagcatactcctcacgccaccattctctcgccctgcgctttgttttctttctctctgttgaggtggcaggggtggttgcagatgctcctgcaatccaatcattcttcggccgctccttcttgatctccgacctaatccattccatcacatagtccttgacaccaccagaaccaccaccattgtcctgacgccaccaccagtcattcccagctcctgatgctgcagcacctccaccattgcagcttcggccattcaatccgctactgacactagtcttatcacatcctgaagtggatgctgcctctgcaggagaagccatggtaaacccctcatcatcttccggtgacttggcagcattgtcttccccattgacagcaacagcagtagcattttcatcagcaacagacatgtcatcatcacattcgccacaaggattgctactctcatttccattgccctcaattgcagcactctctaattcatccctctcctccgactttatctgcgcgaggccaaaatctgagaggcgagcacggagctcaccatccagcaacacattgctgggcttcacgtctccatggatcactggtggttgcgcgacggaatggaggtaatggagcgcggcggccacgtcacgcgccaccgcgagccgccgtgggcactcggacaccagcttggggcacctttttccgagcagcgcgtcctgcagcgacccgttcggaatgagctcgtacacgagcata

SEQ ID NO: 12614 - DNA, 1726 bp, Oryza sativa
acggtgtcaaacattttgaaaccgagggagtatatgcgtacgtaactccaggtataacatgctgctcttaattcaatcgaggctaagaaaaactcgaatgaaaaatacagccggtcgggagttcgttagtagatcgccacctcagtccatatatgcacgtatgtttgcatgctccggttgcttggtgatggttgtgatcttgattcagttgtgttgtcagcttttcatgcattgacctggtcagcttgtgatcttgattccagagcttgtacatccgagtcgaacatgagtatctctgacatgcatatgctgcttgatcgggttggtcgaagtcatggtcaacggtcaaagaaagcactcggtgttagagattggcatcgaagatcgaactcgccgagccaagattgatcttcccggctagtttgtattcaagtccatgtcgtcctgcttcaaacggataattgactctcgccggaaaatttaatattgaaaagaaaagacaccgatggataggagttgatctgttgcacggtggcgacaaaagttgaattgacgacaacgattccttcgacgaacagtgagattgcattgcatgcttggttgtagaggcttctggtcttgctgatcaaggaaaagaactcggcggcgacactgattagatccatcgccgagattaatcttccatgtacttagctggcacaccccttaaccattcggccaaagcgttgcggagtaggctcacggccagttggctgcacatcgacgccaccaatccatgagccggtgatattggagattaaatcattgaatctcgccgagactgatcttcacgactggattgaatccgagaagggaagaacgagtttggagaatccaatgacgtcggagattggttccatcacaatcgttgatgaggaactcgacgcgacccctacctggcgcgccaactgtcgaaacatgaattcggcaataataaaagggggtaacgcacgagacctaaaagtggatggatgctgagacaaaggatttagacaggttcaggccctctcaatgagaggtaataccctactcctgtttggggatttgaatctgccgggtgtattatagatctgacgatcatatgtgctcatgccccctagagggcctcctgcctgtcgcgaccgagaaaattgccttttcccgaacgctaatgtattaatccccgtcccaggaaaagccggggtacaccacacaaacatgatataaaagacacatctttattatatcgataatatttacattattacaaaggcacctcaggcctgacaaacaaaaataaacagcagcggacttgcgggcctacggctccatcttcacaggcgctcaactggggtataagccaggactccacctaagacttcttctcccaagcttctcttactgaaggggggaaagattgagcaagaatgagtacacccacagtactcagcaagtcacaccggcagatgcatgattaatgcagggggtacaaggggttaataataagggttaagttttgcagtaaacagcatttaaaagtcacttagttgcccaaagccattttaaaaagacgatcctagagctacacagtattattaatcaaggtcgtgaaccctcacgaatttgccttaacccagggcctacgatgattcagaccgaactgggcaaccgaccctgggtcccaactgttcccaagccaacccaggcc

SEQ ID NO: 12615 - DNA, 15728 bp, Oryza sativa
aaaaagtcaacggtgtcaaacatttcgaaacggatggagtatttatcaaggatcaacacttcacctgacagtatttaccattaccaggtttatcgttctaattttcttataaaaattagattaatcttggtatttttctagtcttctaattgacagatcactaatgttgtttgatctgttatgcacgtacatctgttgcatccgccgttacggttggtgtactccaccgccattgttaatggtgtcattgacttcaccgccggttcgccttcatcgccgtcgagtgatgttttcgcctacacggatggttagtcacaccaccgttgttgggcatctacgtcttcactgccggcctgcctccgtcgccgccgactggtgttttcgcctgcacggctgacctattatgccgccgctgttgggcatctacaacttcactgactggctgcctcatcgccgccgaccggtgcttttgcctatacggtttgatggtcacatcaacgttgttgggcatctacgtcttcaccgaccagctacctcgtccgtcacgccgactggtgttttcgcctacacggctggcctattatgccgccgttgttaggcgtctatgacttcaccgccggcctgcctccctcgccgccgactggtgttttcgcctatacggttggttggtcacaccaccattcataggcgtccacattttcaccgccgaccgcctaggctgcctccacggctggtgttttcattgccattgatggatgactttgttcccacatcagtcacctctatcatcaccgcgggaaataccaaaaagctaagtcatcattaattttctttatatgatattttccttttcctctgcctcactacatcaactggttcgccgttgactagtgagtcgggggctacagatgttatatcatatttttttaacaattttcatttatctttattgcttgcgacataatctgagtacaaaagtgcctatcgagttatggagttccatcttcctatgctttccgtttggtttgccaatggatagttgcctttgggccgattcctagcactcgggggctcgttggatggaccgagtaacgcaaggtgctaagtattattcggaataaatcaaaagcatagagataagataaatttactttcttctccacaattgcaaaagtacccgagtagtaaattctgattcgtgaaactttgttccattaatgacgaactcatgtcactcatatgcatgtttgggaggtgcctaggccgactcccgatgcttgggggctatgactagtcggacagagtgtttaaatgtacggagtcatctgttcggggaaatcaaaattggcaagaggagaaatacatatttataaatttttaaaatacttgaatttttctcgagtattatattaacatcagatactactcatcctatatgtttgttctgcaggatccatatctaaatatgcataaaagggattcatggctttaagcttatctcttacgctccaggaatggatcagtcagaacatcaccgactggcttgcctccgccgccgccgactggtgtctccgcctgcacgactggcctattatgccgttgttgttgggcgtctacatcttcaccgaccggcttgcctccgctgccgccgactggtgtcttcgcctgcatgactggcctattataccgccgttgttgggcatctacgtcttcaccgaccgacttgcttccgctgccgctgactggtgtctttgcctgcacggctagcctattatgccgccgttgttgggcgtctacgtcttcaccgccgtcttgccttcgtcgccgccgactggtgtttccgcctgcacggctggcctattatgccgccgttgttgggcgtctacatcttcaccgaccggcttgcctccgctgccgccgactggtgtctccgcctgcacggctggcctattatgccgccgttgttgggcgtctacgtcttcaccgctggcttgcctccgccgctgccgactggtgtctccgcctgcacggctggcctattatgccgccgtgtctccgcctgcacggctggcttattatgccgccgttgttggacatctacatcttcaccgatcggccgcctcgtatgacgccagctggtgctatcgtcttcacggctggccacgttgccgccactacaaataggcgtcatcaccttcaacgcaagctgtctacgtctgctgccgactggtttcttcacttcgatggctgcatgattctgccagtgttgattggacttatcgtcttcatcgccggtcgtctcgtctgctgctgactagtgccctcgcctctacgtctggtttataccgctaccactactgatggacatcatcgtcttctatcgtcgactggttatgccgccgccgactggtgcttttatcttcacagctgcgcgtcttcgctaccggtttgcttttgttgccgccaactcgtgttcacttcatcacggcaatgcaactttgtcatcatggtggagcgacttcatctttattatcttcggcaccggcaaactctattgctgctacttcgcaagttttgctacttcaccaaccacgacgtctttgtgaacctcaacatctcggcatgcgatgccgtgttattttactagaacaagtggctctccaatattcaggatttctacttggtcatcttcaacacatatcttcaatcaagcaatgactactcgacgacaagaagctataattctcgactctatattcagttgtttctcaactaaccaaagagtcgggggctacacaaatacaagactcaaaatttgacagatgctatgtcaacatgaagcaatcaattaatcagccaaggagttctatggaatctactttgggagtcatcagcttcgtcctcgctccaaagcaggcgttctacttcagcaatctcaattattttaccggcaattttggcttcttagcgctgccataatctactcaaaaaatgtcaagtatcaagttcaagatttaatctacatgttcgggagcttagagttatcaactaatcagctcagtttcgacgagttggacaacaacatctactttcttctaaatgaagcatctgcaatagctacaagaccaagttctactgctatcgtcataaatcaagaggcgttgcattaatctcaattatgcacacgctaacatcaagaaaactatttgagcttcgccatcttctcaacaatttgaaggattattgtcactgacatcatcatcaacacccctacttcatcggccctgacgtctccgccgttgctaaggggtgactacgtcttcggttgcttttgtcgtcaccaactttcatcgtcgacttgttatttcgtcttcacggttgacctactatgcaaacactgatgagcgtcttcgtcattatcatcggttgctacatcgctattgcctggatcaccgacatcgtcatcttcatcaacatcctgtcaaatctcttcaacatagcccactctactgctattaatgggcaacttcgtcatcatagccggctatctctattgccgctaatcatcattaccatcggatgcgtttgtcatcgctgactattttcttcatcttcatgattgatggatttcgccattgccattgatgagcatctatgttttcaccactggcttgcctctgccaccgcccatggtgtcttcgctttcacggttggcttattatgcctctactgatgggcgtctttgttttcttcaccgagcgccttatctgttatcgactgattatttcactgccacggctacataactttatcgttgggcgccttcatcttcactgatggctgacctgactgctgccgactggtttcttcgcctccacggctgtgcaacttcatcacttttgactgatatcactatcttcactaccaccaatatttttgccacctctgatggacaatattatttctatattggtcgtcttgtctatatgccaactacgtcagctaccatcaatggacaattatgactacgacagaaggacaagctatatgctcaggggcttactagctcaaacacaagtatcataccatcaatttggacttgttccggatacatgcaacatgaattcatgaccatgggcctattttctacgctcaaagactggactatttattattccccgtaagggttatcaaccgaatacttgtgccagtcgggattcacttattatatctatttgggagtatcccataagggataatcactcagatcagaagctattcatatgagctacacttggtctatatcacctggaagatttattactcggaagcatgttacatgcgtcatcctttaaagggtgtcgaaggcatattttttggcctatgcctaatatgtctgcagcccatattttcaggtgtggcctgtcacgttcttttagggacttaggcactttttgcttaggccaaagtacgcgtgatcaagtgcccaataccttaaaatccttttatatcgcagttactcaactttttaggagttggtacaatgcatcttaaaaggtgttaaatagtaaagctttatatagctgccccgctgacttttttatataagtcaaggtgatgtttgggtttttaagcaattgattggatacaatatcgttgctttttgccacgtaagtgtgcacttttattgaccaatattatggcttaggctgattatatattgtggtcattttccaggcggttggtaaatcctttatgagtttatttactcggatgttacaccacatatgccatatattttcaggtgtggtgaaaccatgtgtcttttagggacttaagcacatctgttaaagcagtgtacgcatgacgtatgcccaatactttggaaaattctttattcacagcatacaaggttctttatagctatttttgctatgtgatttttcaatgatgtagtcaactttaggttgtacgcatcttgttttacaaagcagtcagtatatcacttggattatattattcgaggattcacaccgcatatgctacatattaatatcaagtcgcttggttgactacaattatcgaaaccactcggttggttggattattttccttgactatatgcttggtttgttcaattgaccacatagttggggggctacacctattaggtgcatctagtcgatgcacctgactttatttttcagccctccacagtcttcagatttggtaaaagtactcgggagaccatagcaacgatgattgaagcactcggctttggagtaatctagttcgagagaagattatcttttcgactatgaaggtcttaggggctactgtggagattatgggtaccccatacccacacggcatggttatccgactagtcataggggatagcttatatctatggaatatgtaacaaatcatgacttgggtattacgtttccttttatattatggagcagcctaaagtcctgatttgataatattgtaaaatagatttaggaaaccgataccgtattggttaaggtttctatcttgtaattctgccccccatcctatataaggtgggtaggaggccctgtagggggcatgagcacatatgatcgtcagatctataatacacccggcggattcaaatccccaaacaggagcagagtattacctctcattgagagggcctgaacctatctaaatcctttgtctccgcatccatctacttttaggtctcgtgcgttacccccttttattattgccgaattcatgtttcgacggtgaagtaattttgattgatgtactttgaagattgcatgaatgaagaaaatgattcagtttatgattcaacaattccttttatcacaatatttcattaatgctctgctttatgtacaaactatatcaaaaataatatttatgttagttctgctctcatgtgttaattccaaactattaaatttatcgatcgattgagtcgatgtcgccgccgtgtttcaatttgtgtgcactttgctgctgccgccaccgccgtcggccgtgctgctgtgcaatgccgcttctttgccgtgttagtgcgtgcgttctagtaatacgttacgtcgatctgccgccgtctctatttcatgtgatgtgttcgtctccacctgcatgcgtgggtcgcggctcgcgatcgccggcatccttccgtgcacacgaccggcggcatccttctgcgtgcgagattagcgatagccagttaattagtttcatgcggttttgaaggaagatgtgctccaagatttgtgcacgctagggggcaatatctccataggggtgccatgcaagctttgtggcatggggtgccatacaatttttttccagggcgctgccgccgcctgccgcctgccgcctcctccccgtggggagggtgccaccgcctcccctcccgccagatctggctgaggggaaggcgccgccatcaccgctaggccgagaaagaggagtgcgcgtgcgtgagagaaagaggaatgtgcgaaatagagagcgagagatagagatagagatagagatagacagagagaggagagagtggagtgcgagagagagagcgagagactctcggtcttatctacgcgagagagaggggcaccgagccctctcagccttatccgctcaagaccatcggtctgctctgttttttagtgccgaattttaaaaaccgagtgtcggttttaataaagtaaattaatggtgttagtttttgttaaaaaaaggcacttatagtctattaaaagtgccagtttttgtattttcaacctgcagatatgagaaatggtctataagtgctggttttatcacttgtggcacctaatgtcgatctctatatatctttttatagtagtgtgatcaaaacatatacgtatgattttgttactatataaatagtctaacagcataagcatattagaatacttttatgatttaaatgtaatagttgcctaaatgtttttacataaattttgctttctattagaagaagcaaaataggagagataaatagataatagaatgaaaagagaagaatggaaataggagcgtacagagttgttacgtatatacgtgcatccgtacacattgagtggggcccaaattggaggtagattaggatgagtggattacttatttttttctacgtctaatctaatggtcgaaaaggatgcacccatcaatttaaatgaaaatcaagggttagatgttttttgccacgtggcagcttagtagcgtttgtagagtgtcatgtgacgacataggagcgtttgtaggaagttaatgaacttttagtatatcctccctctgtttctaaatatttgacgccgttgacttttttaaatatatttagatgttcgtcttattaaaaaaatttaagtaattattaactctttttatatcatttgattcattattaaatatacttatatgtatacacatagttttacatatttcacaaaagttttttttaataagacgaacggtcaaacatgtgctaaaaagtcaacggtgtcaaatatttagaaatggagggagtaatagatatttttaatataaataaatctttatttaaaaaattactccacaaatttatttttcctcttttttgaacgagctgaccatcaggagacgcttgtgggccatcttttccatgctccattttcatcgttttctattgtccgagtatgcacttgcaacctgcaagcaattttttgtctgtttcggtgggtgcctccgtggaggccaaataatccacgattttaagacttgttcataaatactccgtatctagtgccaaaaatagctggggctggtgatttgcacatgtatacatctggacaggggaccttgttagggaaggttggtgccgtacgcagacaccgtcattatcacgattaggatcgagattttcaacgtcctctcctaattactatagtgcacatggatgctaaggcatgcaattgatgtgacgtgatagtgtaattatacaatcattgagacctgcaacgcgcacattgaatacaaatatatgaacgcaaaatggatatctaaaaagaaaaagcctaccgaaagcaagtatccaaaatggcatccattttgattcgattcgaagtcagtaatagaaacggacaaggttagataatggtaaaaggtcactagttacaaactacacagcaaaattcgcgatgagaaacgcgtacacaagcgctgacaaaatgaatacaatggcatggtaacgaccaagccaaactaaaccctatctcgctaatccaatcaattaatcagcatacattgttatgttacatagaaaaccctcatttgtggggtttacacactcaaatttccagcgagcgatgcagcacaccgccattcatcccaaggcaggtatgctgcatgctgctctcctcccaaaaccggcaaactctattgcccattgcaccactcgcagatcaatctatcccaagacaaccgaaacgagattgattgatttcttttgcctccactccactccacaggttccacggccgtgcatgtgtggtacaaacacttttcgtacatgcgaaaaaacactttacaatgtggagctgtttagcgtaagccatacttaaaaagtagtaagccttttgcgtggtgccaaaatatgtcatgagtcatgtgagccttggactatcaaatttatgcgcttgccgctatcgatgcggaggccatcactttttaggcccaactgaaaaagaaccgatgaattggttggaaactgattcccagagtaaaacaatcgagagatggaactcagttgatatgaacgtgtacctccacctgattgctatcaacagaaaaccatctcaagagaacaccgaggtggaccaccgcgggtatcattttgaatagaaggggtgttgttacctgcaatggtacacacgcacgacataaggtaaacgcatcatgaccacaacaatgtcacaaaggtttggtgatcatgctctcatttgagccgctccttcaaatgtttgctgagtatcatttacagtgagaacagaatatagcttaaaaagaaatgaagcgtataggtgcataccagactgagtgcagtggttccaagaagaagcagataaagtttgccctgaagaaaagcaattcagctatcagatgaaagtacacgcacctcagtgctcacaagacaacatatattatcataacagaacagttaaactattgactactccaaaagcaagctagagcaaaattagtcagaagctagctagaactgagtgtaaccatgagagtataaaacaacattgacaggcaggaagctttggagcaacacatgataggaacaaaatatggagaaataacctcaatcagatggatgcttgaagcacggcttagaagaacaaaagcaaactctcctatttgtgcaagagacatgccaacctacaaggaaaataacatgagatcagtgtaactgcatgagcaataacagaagggagcacatgtaaagcaatcaagacttacaagaagagatgttttgttgctatagccaaaccctttaacgacaacagcaacaataaacgtctttacagttatcaccaaaatcacagctgcaaggagtatatcgacatggttccaaaggaaatggacattaattagcatcccaatgctggcaaggaaaagagcagcgaagaagtttcgaataggttcaatctgcagaaacaacaaacctgaaataagagaacatataatgaatcattaactacatgaatctagctaaaactttgactaaagcagtaaaagaaacataaaacaaaaaaaaagtgcattgtcattcaaattgtcacagaactgacaaacttcacccaaaaaaaaaagcatataatttcacggcaaggaattacttgttcaagtgtgtgttgtgcaagatcagttgttgatatcattactccagctgcgaacgaacccaactcaagactcaagcccaacttatcactgcactgcatcatagaaggccgcacatgagtaaacataagttttaggataccgatagaagagagcaaatagaactgttaaaaggataaacataactacattttcttgcaagaaaactgtgcatgagccataacagtaaagaaagagttgctgaaaactgaagagcaaaacttacaaagattagtgcagaaacttggaacagaagaaagatagaggcaaagcactagagtctgcactacacattcactataatacatgctataaatcaatctagaatagtgtaaaagatcaagtttagcaaaattgttactttcacaatttttctttgaataaatttaatgtttagcatcctttaccggatccagttagagtgtcacaacttttggccaggtttagtacatgtaacagttatctgcactactccagtcatccagtgtttaaagaaaaatagtttcccattactgaacaattgcattcgatactaacatacgagcagttaaagaaactcacccaagcaaacaacaagcagaatgcaacagctgccaactggtacagttcatttgtctgcaagaaatgcagaaatgttaatgtaggataacatgatgatctgaaccagaactaaattaaatgcaaattaaatgctcaacaaaactattcatgtagtgcctgtcgattatattcacctgagatgaaagacttatcatcagcttaagaaaccaaggcacaccagttcgggagaggatggaaaggattgtaaggaatgttatcaataccaccaacctgagaatgtcagaaattgtgacaaaagaatttaatccaacacctgattatattatggaacaactttcacagacaataggaagttcaaatatacataggacaacatgatgtcattatcaagatataaggcaataaacttttgtgctgtcatgatgtaaaggcaggtagcactgctattttaagtaccaccatttagacattgatgtggcatgaatttactgcaggagacatgattctagtgtacagattattgtagtggtaaaaaattatatgtaaataaaagtttcaagccaaaaacacactacacttacgacttggccattgatgcaactccttgaagaagaccagaagcgccactcagaattggaagaagtgcaaaaagaagaccaacagcacagtcctgagacaaaggaatgtcaaatcaccaatacaaggaaagtagtgaagctcagataaagaaagaataatcagtccactcgttcgattcttaagaagaagcaagcaaaacgtgcaactttacgaattcatctccccaaacaactcaacaaatttagaagatggtatccatttctttcatacctgcaatatgagtgtgccaaccgtaacttggccatgaagggcattgatgctatttctttccatcagaaatttcaaaacctacatagaaaatattttcccagaaaagttaagcaaaggagatggaaatgggatttacaacacgaacataaccatattgcaagttatacgacattcaggaaacagttggcacatgagtcaagcaccatctacgaggtaacaacgtgctaaattgaaaaccatttggcatctatcgtctatgaaaggggtaatggttccactacgaaccaagacgaacaagttgatttacaacaaaagctgcttgagaggatgtgtagcaaaacactaaaagataagagtggcattccacggtggagtgaaatgaggagttaattagcaacacaaaagggtcatctccactgtctctgcacatcagaaaggagaacagaattgttgtgcataaaccactggaggaactgaaccaagcacagtgttttccggattaaaacccatgaaactcaacgtcacaaaaaaaattgagtcccagtcagattgtgcaaccaagtccttgattgtggcagagttggcagaggcaagactaatagataaggaaccaccggctctgcccaatggtcgtcaccaacacaatcagagctcccaccaacaaattgggcaccctgccacaaaaattagagctcttgatgatgaattaactatcaagttccttgccatattaacctctcgctgccaagaagagctcctctctccctgccgctaaatcatctcccgtttgcagttcctcttctcctcctactgccaggtcctgcatacttcaagttccaactgcccaatctactcaattttggcaccaaaacagtagatgtggctagctttttgtggagggtgggggaaccgagagagggaggcagaagcactcctgacaacggacactgggagagaaaaaatcaaaccgaacaaaacaactgcatgccccaaatttccttgtttggttcaatatatcctgatgatggcctgattactaagtagtatcaataagattatcgataacactgtcataaaacacatgcgagagagaatggacatattgctatttaaagagacaaagaacagtaaacggctcaaggactacgcacattgaagcaactaaaagccattgatgttataaatcataagcggacctgtagggtccattgtaaacttggatgaaaggcaatcgaatgcacagatatgcaagttcaaagatttagaaattaccacagccgttgaagacatagaaagaagaacaccaacaaaaacaccttcttttgttttgcctccacatagctgcaatgtgatattaaatataaacaaaaattaaaagagctgtaagacgtgttttttaatcctaatccataatccagagcaacatataacagggtgtacagtacttatgcttgaaaatggaaacatcaaaacatggttatttaaattacaacaatgaaacataccgtagcagaaataccacaaagcaacatgaacaggatgatttggagcaatcctccaacaacagcaaccgcacgaacaactcgaagctgagacaatggggaaacacctcatgttgttattatgtcaagtccatgcttgcataagtgcaaatatataaaaaaatcaaagatgtatacttttgctgtagaaaattcaagtcccagagcaaacagcagaaatatcacaccaaactgagctactgtttcaacctgtatggtaaagtatgagtcataaacacacaaattatatacaagtagatatatgcattacactcagtctttttacatgtagatttattgattgcattacaatttctacagtgtctgaaagccaaaataagcaggaaacacgaatgtgtataccagtaaagaagataacaatggtaagttggcaggacagaaatggtccaagaaaaaacagatgagcaacaattgagatatatacacataaaaaaaagaaatgtgcacagataaataaatatttgcaatgttacgagaagcatgatgtttttctagtcaaatgccagagggaatttctcgagcatacagctcgaaaatcaattgaagtaaacttaggcatttaaactagaaccttgatcttttacatggatgggatttggtttcttcaataagtccaaagttaatggcctcactgttatttatgtgaagttcactaaccactacacatgtattgtacgaatacagttaccaatttcagacaatgcaaaacatatctcattatatggcttcatctcaaaacaattccaggttaccatgccattttccagcaattagatgaagcgaatcttaattttcatgtacatctctatctaacaactgatagtgaaagaaacagagtgttcccatgaacttgtagggtgtgaagatagaaatgtaaaagcacttaagcggtatatatttctctccatgtgcacaacaaattgccaatagaaaaacaattacgatttagctgatagctgaagaagtcaaacaattgagcaaaagcacaaacatattttgagaaaagcaaccaacaaaggaaaaagcaccttacttgcaccatttcactgacaaagctaaaacctcctggtccaattatagatcctgcaagtaaataacctgtaatcacctgcaatatattttagagttgtagccttaggtggcttaatataaaaccacaacactcaaatagccacaagaataaatgccttgtacaagtaatgagaggaagaatgtatagcactcacaggttgcccaaggcaagcaaaggcaattccaccaaatgtagcagacacaataacaacgacaagatccgatatcaatctacaatagttcacaatcaacaaataagttaatacttaaggatactttatgaatattcaacatcagaattggataacatacctaaggtccagttgcagcacagggtattttgacttcggatttgatataataaaaacattatcctggatttgcaattgtgtcaattcaggacagtaaatcagaagataagaactggcacgttgtgcacaagtggtagctttaaagtcaaataaatccttcaaccaattgcagtgcttgtaccttccgatcaatcaatgtgggaacatcctcttgctctggccgatccaagaaaacttccttaaatgggaatgacctagggggttaagatcatagatttggggggtttaataaagagtaagataaataatataggataaaatcacttaaacaaggaatatcacaaagtcaaattttgatcaataacatacttattgtctttggtctcattcttctttgttactcttctggccacagtttccaggactccctggtaggataaagaacaagatgagcacttctacagagacacatgtgcgatgtatacagtatagccaacaatatttcacaaaaagtaatgaagacattgaaattcagaagaggaatataactagtttaatacaaggaacttcagaagaagaatataactagtttaagtttagtaagatttttcaagcaagtaaatacattaacctaggtacaccataaactaatattagttgtgtttgaaagtttcttagttccaccataaataaatattcattattatctagtctagtacaatgacaagctacaaacatcatccaaggtattgtcgtcagcactaggaaaatgtcaacttaactacaccaggtcaaaatatactgggtcaaaaggcacaaaaactacatagcaacatatgaaagcatcacggggctcatggagtttacagcggtagaaaacctagtggagcattatcaatttagcatgatcagagccagaattaacagttgcatcctcagtttaaacgccaactccatcgaatttaagcatgccaagtaagaaatttctttagaggcacacacccatatcgaaccaattctcactcaaattccaggcacaaataacgatttgaacttccaaaactaaagtcggcaggatccaaatatcccacccgtttccacacgcagcatatgatactaagaaatttaaccagattctaccctcaaatgggaacgaatggctgaaagtaagcaagcaaacacaagtgcgcaaatgaaatcacctgcttctcagccaccgtgttgttgaagctgccggggtccttctctgcaaaaaaccagagccgccgaaacaagtaagcacaaaatggcagtcccaaataatcccaaaatcccccaccgccgcggccacggaggccgagatctcgacgccgccgaccctgaggcgccgagtgggagtaaccagatccccaggcggatcacggggcacccaccc

SEQ ID NO: 12616 - DNA, 14066 bp, Oryza sativa
atcaaccgggactaaagatattttcccgctatttccaaattctttttaaacccggttagggttaagaaccgggactactgataagcgcactgaatattaatttccattacatatgtgtttctaaaatagaaaataatgcattaaaattatttccaaattctaagtcgaaaaattaatgacaattacttcaaaaaattattattgtctgtagtaaattaagtggataaaacgtaataagcaaatatatgatttaaattaataaaaattctaataatcatatatacttagcatatgaatgatattaaattggtaagaaattgtaattaacatatgtatatacatccgacatgcatgatttaaaattaataaaaattctaataatcatatataattagcatatgaatgatattaaattaattgttaaaaactctaattaacatatgtaaatgccacatgcatgatttaaaattaataaaaattcgaataatcatatataattagcatatgaatgatattaaactaattgttaaaaactctaattaacatatgtaaatgccacatgcatgatttaaacttttaaaaattctaattatcgcatataactagcaattacatgatttaaaattgttaaaacctctaataatcgtacgtaattaacatatgccatacatcaattgatttatatggataatcaatacatctaaaatagtttacatcgtgtacacaataattacggcaatacatcggaggtgacggttgaccgcacgtactttctcctcactattgttccctccttgtgatcgctacttgagtaaggggtgtcttcatttgataggaggatgctagggtcaatcgtcaccgtgaaagggggttgcccatccaactgatcgtaatcctcgtcagtcttgtcctcaactccgacgatttttcttttgcctgggagaaccacgtgacgcttcggctcgtcaggccctctgcccttctttcctttgctagacatgtccttcacgtaaaagacttgcgttacatcattggcaaggacaaaaggttcgtccgagtatccaaccttgttaaggtcaaccgttgtcatcccactgtcatcaatcattacgcctccaccagtaaacctaacccattggcactggaacagagggaccttgagaggaccatagtcaagttcccatatgtcctcgatggtatcgtaattcgtgccagttgttccatcatgtcccatggcatcgatacgaacaacgctgttttggttcatgctcttcatgtcttgggctctcgtgtagaatgtgtacccattgatctcatatccctggaatgtcgcgatcaacccagatggtcccctcgccaggaaggccagttgttggttgatcgtctcgttacccatgagatgttgacgtagccacgcggcgaaagtatcaatgtgatgtcgtgtaatccatgcatcggacttaccgatgtttctggcgcgaactagagccaagtgctcctcgatgtaaggagctaccaatgaagattgttgcagaaccgtgaaatgggctttacggaataaattgttatctaccgtcattattgctttccttccgagagttccctttccccgtagtctcccttcatggcgtgattcaggtaccccgattgggcgaaggtcttcaataaattctacgcaaaattcgatgacctcctctgttccataccccttggcgatgcttgcctctggacgagcacagttacgaacatacttcttcagaacgcccatgtacctctcgaaaggaaacatgttgtgtaggtacacagtcctgagaatactgatctctttgacaaggtgacaaagcagatgcatcattatattgaaaaatgaaggtggaaatatcaactcaaaactgacaagacattgcactacatcattctgaagggcttctaatctatccggattgatgaccttctgcgaaattgcgttcatgaatgcatatagctttgttattgttgcccggacattgtctggaaggataccccttattacaactggtagcagttgtgtcatcaacacgtgacagtcatgagactttaggtttgtgaacttcttctccttcgtgcttattattcgcttgatattcgtggagtatctagatggtacctttatgctctccaagcattcaaacatactttccttctctgccttgctaagagtgtagctggctggactcaagtaatggcttcctttctcctttagttctgggtgaaggtcgccgcgttgttccatatgctttagatcattacgtgcttccagtgtatctttcgactttccatatacacctaggaagccaagaaggtttacgcaaaggttcttagtgaggtgcatcacatcgattgcgtggcagacgtccaagaattcccaatagggtaactccacaaatatagagttctttttccacatcaccgcgtgaccatcttcgctctctgtaggctggcttccaggcccctttccgaacactactttaaaatctttaaccatagcaaacactgttttcccactacgatatttaggcttcgtacagtggtccgccttatgttcaaagtgcttgcctttcttccgtaccgggtggtttgcagcaaggaatcgacaatgacccatgtacacaaccttcctacaatgcttaagatacgtactttctgtttcatccatacagtgagtgcaagccttataccccttgttggactgaccggaaaggttgctaagtgcaggccaatcgttgatggttacgaacagtagcgctcgtaggttaaactcctcctgtttgtcctcatcccacacggggacaccttcctttttccacaacgggccaagtgctatggccgctgctcatctctccaaaaggattcatgccatccgtacttaaaccaaaccgtatgtttcgtgcgtcctttccaaagtctttaaattttctgtcgatgtttcgccactgcgaaccatcggcgaggtgtctcagcatcccgtcctgttgacgctcttcagcgtgccatcgcatcattctagcattccccttgttcctgaacaaacgccttagccgtggtattatagggaaataccacatcaccttagcaggaattctcttctttgttagctgcccgtcaacttcttctggatcatctcgtctaatcttgtatcgtagtgctttgcaaacaaggcatgcttctaggttctcgtactcctcaccgcgatataggatacaatcattcggacatgcgtgaatcttctgaacttccagtcctagagggcagactatcttcttagcctcgtacgttgtctcaggcaatttgtttccctccggaaggatgttcttgacgagtttcaataaatcgccaaatgcgttgtcactaacaccattttttgccttccattgtaagaactccagagtggtatctaactttttgtgcccctgctcgcaacttgagtacaacgacgttctgtggtcctctaacatcttgtccaatttatgggcccccttttcactttcgcagtcctccttggcgtcctgcaacatctgaccaagatcatccgcaacgtcgttaccatcagcatccctttcctcctcgcccgtttgatttccttcaaatccagcgtactgagcaaagtccggaatattgtcgtcttccacttcatcttctttcatttcaacaccttgctctccgtgggatgtccaaaaattatagcttggcatggaccccgactcaaacaagtggaaatgaatagtcctggatgcagaatactccttctaattcttacacttattgcatggacaacaaataaaacccttatgcctgttagcttcggccactctcaaaaaataataaacgtcgtcaataaactctttggaccgccggtcagcgtacatccattgccgatccatctacatgacatgaaaaaaaatcgtacacaaataattattcttacaataatgatagtcatacaataattataaataattacaaactctttcaacagtcatacaataatgacatatcattattcatacaaaaattataaaatattacaccaaataattcttatttactatttctaaagttttaaactaatattaatgtgttgtacttattttaattttcattttagtttgttttctattatttaagattaactttcactgtattttccttctcaactattttataaaaccttctttagcaaataaactaaatttctatatattctttcttccccacacaaattttctctctcatcaacttacaactaaattttggagacataaaagtgtgcaaaacatagctccaaatgtaatatgacaaaaaaaacattggaggatgaagttgctaaccttttaagcacctccgatttgtatataatcaccaaaataaattcactagaaattttggcatgaccctcttttttgaagaaattttgaagcttgctcgggcagctggaggaggaagaagacatatatataggggtgggacttaagtcccgatgggtgtaatgacttggggtaagtatccaagggggcctaccaagcctacagatttgatttggataagcggttaaaaagggtaacggacatatttgatctttagtcgggcatatttgatctttagtcccggttggtaacaccaaccgggactaaagatcatctttagccccggtttttattgcaaccaggactattgtggatatcggccgaccgacgaaagatggtttctccaccagtggttatgagtcttctgtttggaaagaaaatataaaaaagattatacgacggttcaaaaaaaactcgttattaatacgatgctagataaaccttaggtcagtgtcacgtatacgaagagggtgaaatgcgatgagcctcatcaattttatgcctacaagaataatgcatgtgtatgtgcacacaccacacatcgctataaaataatttattattatctatgatcgattttaggaggtgaattttttctgaaagataattatagggtgttgcgatttcgtataagattatccataatactgacatacttatagtaaatatgggtttttaactgtaaatttatctaacaacataaacttacactaccacagaaacctggataggtgctggttgggaaatccggcacctatgccgagttcccaagcgatacctaggaagcggcacagatgatgaaaatcaaatgtgctagttccaaaaccttgacctttgaggcttcaggaattccaaaaaaaaggatcgagtagcttcccttcaccctgcccagaacacatcgaagaacatccaagaacacttgaacatgaacatcaagaatattcttcccagccactgggaaccatcaaagctactcatccccatcaagaacacaatcacaaaatacacatcaagaacatatagataacacaaaaggctgccgctcaacaccaactccgctgctgccgctcgacaccaccgcccctgccgctgcctcccctccgccggatctagcggagaggagaccgctgggaaaaaaattgtatggcaccccatgccacaaagcatgcgtggcacccctatcaagatcttgccacctggcgtgcacaaatcttggagcactgatctaccttcaaaaccatactagggcaaaaactaattaacaggctatcgctaatctcgcgcgcgcggaaggatggcggcggcgatgcgcgtgacggcgacgcacgggcaggaaagacgacgtgcgtgcaagaaagggcggccgctgccggcaacggcgacgcggacgcacgcagcaacacggcggaaatcgacggagctagcgctgcccagattgatcgcgcggcagaggtgcacgggttgatcgatcatgactcgaggacaaacttcgctgacgatgccatgaaagaccaagccactgcacatcatcagttcggttcagatgatgaggatcttgaagattgcatgaatgaagaaaatgattagtgtgtgagtgtggagattatgggtacgccatacccacatggcatggttatccgactagtcataggggatagcttatatctatggaatatgtaacaaatcatgacttaggtattacgtttccttttatattatggagcggcctaacgtcctgatttgataatattgtaaaatagatttaggaaaccgataccgtattggttacggtttctatcttgtaattctgccaaccatcctatataaggtgggcagtgtcacgtcctgataaattcatcccgaaattaaaaatcattcgctaaaaggaataatagaattaattaaaattcggaaagaaattggcaaacactaaaatacgtacaagaaaaattcgaatgtggcccggagaatttttgttaaattctccttggtctaaaaaggagccctcaaattttacttgaattttcagagcaccggaaatatttattaagcaacaaaaacaattatcagagtttattaaaaagaaaaacctaaaaataatctctctccccccctttgggcagagtctggcccaaagtcctccctctctcccctcggcccgcggccgaagtctccctctcctccctctccttctctccctcctcctcttgggcccctcttcccctcccagcccacttcctcctcctccctctttctcccaggccgcctccccctcctctcctcctgggccggccgcccggcccaagccgcgcccaagccaggccgagccgagccggccgtgcacacgcgcgccgcgcgtgcgctgaccgcgcgtccggccgcgtggggcccgcgcgtcaggcgggtcatcgtcctcctcccgcccggccgtcctctctccctctcccgtgaaccctagcgccattcctccctcaaatccgcgcgattcaagcatgggattcccaaattgattagggggaattaaacccctttccctcctctctctttcccccttaattcccccttgaatggcgcccccaatcgccgggaacggacgcgccaagtccggccgccttcctttgccgccggccgccattcccgtcgccgttccgccctctcccgtgctcggctcgcttccctccgctataaaatgcaaccccctcgctccgttctatcattttagccccctcccgcgatctcccgtggtccctagccctctccccgccgtcctcctctctctcccgtgccgccggccgcctccagccgcctctccctcctcgccggagcgtcgtccggtcgcgccgtcgcctcctccagcatcgcagctgcctccccttccccggcttgccctccgtttcccgcggagacccccggagctgcgttcccgccgtcgcccttccctttcctccgcgtcggccgcctccagccgcctctatctccctgcctgagcgccggtcgacgtcgccaccacctccctcggctccgcgacgccaccctcatccccggcatcacctcctcctcgcccgaatttcgccggaacaccgtcgcccgcgccggcttctccttcctcctcggcggcatctcctccggctgcccctttcgccatgcccgtgcgtcagccggcgctgccgtcccctccctcggcacggtgacgtagccctccacctcgtccacccctcggtttcgcccggaagccgccgcacatcgccgcgaacctctccatccgcctcgccggagttgttcggccgcccgtccctcctcgcccgtgcaccggtcggccacacctccaccacctccggcatcgcagcggcaaggtcgtcctcggcatcgtttcccctccatccaaacccctccgcggtccatcagcgtcgtctccgatcgttctcgtcgtcgacgtcccatcggtcgcccggctcgtcgtctcgcggcgccgcctccgtcgtcggcatcgcagcggcgtggtccgcgccatcctcgcctccgtgcagccactgccggcagccctcatcgcctcctcgccggccccggtcgtcgtcgtcgtcgtcgtcctctcgtcgttcccggtcgtcgtggcgttcgtccctccgtcaggtcgttctcgtccgtctcgtccgcgtccgtcaagtgtgccgctgcagacccgtcatcgtcttcgtcctcggctccgcgtcgtcaagcctcgtgccggccgcgtctcgccttcgtccaaggatcgccgctgaagccgtcccctcgccgttcgtctccgttgtgcccgtctgtctccgccgcgcccgttcgtcgttgtcgttcccacgcctcgtcgcgtggtggtaaggttccctctccctcgctgccccgtcctcgtcctttcggtgtcccccgtacccgttgtgcggttgtcgaccccggtacccgtgtaccggtgtcggtagtcgttcgcttgtgcgtgtggtgaccgtgttagtgtgcccgctcggtagccgcgtggtttccacgtgtgcagcccgtgtggtgtctagtggagtccgtttgtcggccactcgcctcggttgacacacggggtccgcttccgtcgacccgtggaccgtctctgtgtacccggtctaccgcggtcctttaggttgacatgtggggtccgcatgtcaacggcgcagccttcctgtcttttccaggctagcgcttacacctgttttatagttgcaaaacctaattacaataatccgcaaatctccatataacagcattaaacttcggatgatcatatcttggtcatacgagctctgaatcgacccgttcaagtctcctaatgtttgtataacctaaagaaccctgtgctttcttcttatgtattgttattgcttctttttaggcttgtagctttgcttgtgtgcttcgcgtagtcttcgtcgttccggaggttcccgaagcgtggttcgcggccgtcgccgaaggttcggaaggccgttctctctgagcaaggcaagtcacatcatcctttagcatattgaatcccagtttataaaattattttgatttaaattaatgcattatcgtttaattcccgcgttatcactgttttatctagccatgcctatttacctttgttatgaccttatcattgttgttattgttactattaccttgttcaccctagaataaacaaaaccccaactagtgggtactctattcctggttccactagtatgaatttaggtagatgcttcgctgattaataggacaacattaggtggtttttataactttagactttgggaattctcatatcatttggacactatggaatggttggcttatggtggaattggacatacccctctcttcctctttcaaagcccctaaaacctgtttttcggtggggtttgggtgcatgccagttgtgggaagtagcaccccggccactataaggattaagctcgggcctctgttgcaaagcactaccgtacttccacatgtctagtgggtaaggcttagtttgtggctcagtctggttataaacaaaagtacacggatggagatggacgaagtcgggggtcgatggacatctctaggacaaatgaaggctacacgagctgcggcccggtagtcgagatgtcatggcacagggctggtgtcctgctgctaggggctcaatcctgcctacctgtcccggaggtttcggccgtaggtggggttgggtcggtactcttgtttatggctaggatgggttgggaactatgtcacgtcttccgtccgtataccgtggtggtatgtggcatgtggttacacgtgaggaagatgtgtcttgtgggtaaagatgtacacctctgatcagagtataatctattcgaatagccgcgccctcggttatgggcaagccgagcaatgtacccaagttagtgttttaattcttaaaatttgcttaacaactaaaatgtggaatggttggcctgggttggcttgggacgagctgggacctagggtcgggttgccagttcggtctgaatcatcgtaggccttgggttaaggcaggttcgtgagggttcacgaccttgattaataatactgtgtagctctaggatcgtctttttaaaatggctttgggcaactaagtgacttttaaatgctgtttactgcaaaacttaacccttattattaaccccttgtacccccttgcattaatcatgcatctgccggtgtgacttgctgagtactgtggttgtactcattcttgctcaatctttccccccttcagtaagagaagcttgggagaagaagtcttaggtggagtcctggcttataccccagttgagcgcctgtgaagatggagccgtaggcccgcaagtccgctgctgtttatttttgtttgtcaggcctgaggtgcctttgtaataatgtaaatattatcgatataataaagatgtgtcttttatatcatgtttgtgtggtgtaccccggcttttcctgggacggggattaatacactagcgttcgggaaaaggcaattttctcggtcgcgacaagctggtatcagagccatcttgactgtaggataagccaagtggataaaacctatggacatattttataaatgaaactatttgcgaaagttcctttttcctcctttcccctatgctatttgcaaaatgtttactctttctttcttcttcaaatttcaactagtactagatggtcaggtcagtgaagaagaagacatcgtcagttgtttgccgaagctccggaaggctgcaggatccgctagcgaagtggaggaagcagtgaagccagctgtgaagcaggagtgaagatcttggagaacccgtcgcagaacctaagccaccctatagggtagtgttgttagtcgtgtgttccttgcttgtgtgtgtagcgcgtggtttgcatcggtgggtggtgatgtaaccatgctaggttgtttgcttaatcaacctgcagaataagcaaaacaaacaacacatcaacaaaaagagttagttcctttaaggtcttgtccctagttctggtcgattctttccttgtatgcttcccctctcaacctctaccttgtgacagatggataacactggtaacaaaggctatgggaatgatggatccgatgactcaagaacccaagccaatgggaatgagaaaagcatcaacgaaacctcaccagagctaatccaaattgtggttaaccaaaccaacatgttggcaacagcctttcaactattacagaattggaacaacccagcaggggcaaccaacgttcaagtacctacagtccagcaacagtgcaagttatcagaatttctcaaaactgagcctccaacctttgccattgccgtcgatcctatggaagccagtgattggttgcgcacagtcgagaagaagctagggttgattcagtgcaccgaccaggagcgggttggcttcgcaactcatcagttggttggacaggcttcagagtggtgggatagctacgaagcatcacggccagaaggacataccatcacctggaacgagttttcatctgtattcaagagatcacatgttcccgcaggaatgatcacactaggaaaacgagagtttcgctacctgaagcaaggagatttgaccgtcacagagtacctgcacgagttctatcgtttggctcactatgcaccagaagatgtggaaacggatgaagacaaacaagagaagtttctccaggggttaaaagatgagcttgcagtgcaactactcctagaggattatgaagattttgagaaacttgtggacaaagccatgcaacttgaaaatgagcataatcggatgacgaactgcaagagaaggattgtcaacatcccagtatttctaggtggtaaccaaagacagcgcactgagccacttcagatcaccggatcttctgttgtgcatcaagagttcctgccccaagaagatggacgcaatgcagacaccaacactagcaatactaatgatgatgataccaccaacaaccatggttcttgccccattagtgaccactcgaataaagcgtgcaatgtcagtagcattcaccaagatgtcaacgatagtatcaatgttggaacccagaatgacaaccttagcaatgttgacactgagaaagactccaatggtgatagcaactatggtaccactgatgccaatgttagcaaggatttccaatcaccaattccaactccaagccaaaatgatcgtccccagatggacagctcagtaaagaagacgttgatttgttacaactgcaaagaaccaggtcatttctccagagattgtccacagccgaagcgtaacctgcgccatcactccggccattatgcaagaagaagacaagtcactcgccttgtggtcactggagcaaacgccgtacctgtgaggcctcatgttaatcctaacccatagtagaaacaatgtaccgatgttaagcatcttccctttttgtttaaggtagtgccttgtattcatgtaataagggagacatgtgtgataaaaacaagttctatgaggattattttgcaagatgctgatatgggatcatgcgtataattgtttactgtcaaaggagacctagggtctcattccagaggaactatgttctaacctcgagttaataaccaacctgttgatggaaaagaaaaccaattaaactgtgttggattaaaaagccaaagagacttttgtttggactgagagtttcagatgtgtcctctttggatcaaaggcaacaaccgccagtctagcttttgacgaaccacttgaaggtttctttgaaaggcagcacgctcaagtaccacatcgtcaccagaagcatccacaactctcggagtgaagagtacttagttgacaaaggtcaaaagatgattgatagaagatatcgaaaaagttgcttattaccaggcaaagaagtaggtcgaaaggtgattgataagagaaatcgggaaagaacacatcaaggtcaaaggtgtaaaggaatacgttgaatgctaactgaggacaacatgaagagaatagtgggaagtgaaccaaatgtgaagaaagtgaatccgagttgcttgttcgtgagagctattcccagttatgaaccaagtgatatgttcgaagataatctacagaggtcagattaaaatcgcatctaacaacgaagcctcagatttggcaggataatgattagacaataacaaatccagcagtaaagccatttgggaagacgtcaaagtatatcaagtgggataagttggttctcttgggaagcataattcaaaggcaaagttatcgacccttgcatcaaatagcagaagtagctatcacccagggaccaggaaagctaatatgaggcagttggtggcaagttagaagtaaatgacaagcatgatattctcatgatgacaagcatggtatcctagtaatgacgagctgatctcgacgcataacgtgaaatgggtaacttctatgaggttgacgccaaaaatatgaactatgcgaagttctggaactgaagcaccatcttcaagtgccgcaacccagtcgaagtcagctaaaggttcaaccagggacaagtcaggtgaagagaagattccatctgcaacaagggatcgagccaagcagcctagagtggagaagttttgctaggcaagtttgttataaaagacgcgacggaagaagtcagacaagaagagaagaccgcccaacctatcttcatgctagcctcctcgaatctcggggacgagattcttgtaaggggggtggatttgtcacgtcctgataaattcatcccgaaattaaaaatcattcgctaaaaggaataatagaattaattaaaattcggaaagaaattggcaaacactaaaatacgtacaagaaaaattcgaatgtggcccggagaatttttgttaaattctccttggtctaaaaaggagccctcaaattttacttgaattttcagagcaccggaaatatttattaagcaacaaaaacaattatcagagtttattaaaaagaaaaacctaaataatctccctcccccccctttgggccaagtctggcccaaagtcctccctctctcccctcgggccgcggccgaagtttccctttcctccctttccttttttccctcctcctcttgggccc

SEQ ID NO: 12617 - DNA, 25551 bp, Oryza sativa
  unsure (1)..(25551): unsure at all n locations
ctaggatcccccccattcggttttaggttgctatattctgggatggagggagtaagaaataaaagtgtgtcagttaatgggtggggtcatcagcatggaaacaagggatccccatatctcagctcgttgacaaactcttctttcttctctctttggatgttgtttgtgtcccccatttgggtccagagcatgcttgatgagtttcctttggagaactctaatgctttgtgtatacggttagtttttcttctgtatgttgagttgcatgaagtaaccactttacctgatagttcaaggtgagagaagtgctgctggtcattctttatgttgtagcgagcttaagcgctgacgaagaatgattgcaatttcaacacttttccctgatcacatgaaaattcacacaaagcttcaaaagcagaatgccaaaaagatttttacaaatgcaagtttatgtggacacacatgctgagccgttggatgctttgttaagatctgtgctttactgaaaagaggaataatacaatattatgccttgttaaattttgcgttgtacgcacaaatctcaaaacaacgatgacgatagaaggtgcaggttgtactttcagtcgcatttgtaactagacttttttttagcaagtcaaattggttttgtttatggatggctaacattatgtatccagttacctttatattcttctagttcaaggataagtgccggggatgcccttttataaaaagaagaacaaatactttctccatctcaaggatttttggagttttacattggtacttaaaaaagtaagtgaaacaatgttgtgacttagtttagatgagaaagtaggtgggaaaattaaaagattttattgatttatgataaattttatgtcaaaatattttatgataaattttgaatgcatgaagttgctatattgtacaggttctgacatggtttatcattaaatatacattttaagtataacttacatttttcataaatttgcacaaaagttttagtaagttaaatggtcaaccgtatgtcaaaatagttactgctacagaaacattttttttcatacggccagaatgcgtgcctgtgagcaagtgtctgcacaaattgggactcttccaatcgaacagcgcaaccacatacaaagacgtaattttacacgtaggcacattatgtacgtcgcccatcggaaaaaaatcggcaaaaaaaattcccaaaaaaaccaataatacataaacccaggctcccatttctagaaaaaaaaaaaaaggcattgccaccaccattcctgaagccgttgcctctccaaaagccattgtcatcggggccgcatggatcttccattccagaggacgccactgccggatccaactgttgcgaggctgccggcgctcgatcaggccgtcgctctggccggcgaaatgcccctgggtatgtcgttgctgaggccgccgccgtcgtcatagtcgccctagccgccactgtcattgtggtcgtcctagctgcagtcatggtaaccaccattcgtctctcctttgtcagcagtgccggatttgcccatccagctgctcccgtcatggcgccggcattgttggctgctctcgacgtaataccgcatcacaggcccagctcacttcccgtcaaccccgccagctgtttctgtcgtgggtcatcgaggaatggagggaaaagaggacataggagagggacatgcgcctgcatcggtggcagctagttgggccctcctctcagctcattactggtccaaccagcccgatttaatctccggtttataaaaaaccgcccaggttaactagtttcatccggtccgactgcacgcccgatctgttaaggggaccggactggcgggggccctggttccggttttttttggtcgaaccgtctgaccggtccgatcttaataactctgcttctttcagctcgtctaaaaaagaaaagaggctgtccgagaaaattatattttaagtgtcattagaagggggaagtagatagggggctgtttgaatgctataataagttactaacattataatcatttgttacacttgtttaccatatttaactaagttgtgaccaacaaaaagtaaaccacactttaggtagcaaaagaagagtgtgccacatgtttttgagttgatgacatgtgagactatagtaaataagagggcttttttttttagaaacacatgctcacgcattctcatctctatgaacgcacacacgtataacctacacctatgagttatatcttaagattgacgaagtcatcatggatacctcggtatcgatgggtacgtcgcctaccattgaaataataattagccgtaaatacgagtacatgttcaagtctagcggatggactggtttctccacaagaaacgtaaccagttgactaagctcgcttcacgaataaaaggaaatattgtaacaaatatgaccatgaacaaatcagtgagtaatatgagatatattaggcaatgtttggcaatgaaccaaacagccccatcctactggttcagctcatcagctggcacatgcgagaggaaccaaaatctagaaagctcgcgcggatccatggttggcgtggtcggatcggatcgatgatcatatatcgacgcacgcgagcgcggcatggacgtatacacacatgctcgtcgtcgcgcgccggccgggcagcgcccgagacttccgaagaattgcgatggatcatgcacgcaacggacgggttcttaaatttgtttttccttttgtctcgcccgcccgagctgcgcactactacaagaactattttttcgtgcggttaaattgatttttccgtgcgaagattttcccgtcggagcaaagtgtctgtaaaagtaaatattttcacgtgcggacggtctaaccgcacgggataatcatttttccgtgcggtcaggttaagtggaccgcataggataatcgattattccgtgcatactgcggttaaataatatcacctgcacggaaacaaaaaaaccaaaaaaatcgaaaaaataaagaaaccctagccctaaccctagaaacgcccgcctccggacttggccaccgccgccgcgagcaacatgccgccgccacccgagcttgccactcccagattcacacatcgtcgttgtcccgcctgctgtgcatgcacgcggagccacctcgtcatcgtcgtcgctcccgccgccgcgagcaacacgccgccgccgcccgagcttgccgttcccggatccgcggctgcgccgcctcgtcgtcatcgttgtcgcgcccgccgccgcgagcaacacgccgccgccgccagagctcgccgcttccggatctccgtcggtgccgcctcgtcgtcgcgcccgccgccgctgcccaagctcgccgctcccggattcgcgtcggtgccgcctcgtcgtcgtcacgcccatcgccgctcgttcgctcacggagccgcaccgcagcgcctccgccagcagccgcctcccgcgccgtcggcggcagcggcgctcgatcggtggggagggaaggagaggaaagaggcagagagagagagaggagagagaggggtgggaggagagaaaagaggcagatagatgggagggaggagatcgaggggacgaggagagtaaaggggagagacggcccgtttggttggggggagtttttaagaagggattgggagtttagagggatgatgctattaaatgttttgtttggttggaagacatggaaattttggtgggatggggatgtggaattgaggaaggaactccctccttttcaccgcttgtttggtaactcgagggaaggagattgggagtttacacgagggaattgatgatgagattaagatgggaatttgatttttaatcttaatatcttgttttgtagaggtgatggaatttgataaggagtttagttgaagatttggtcattaataaaaatggatggctgagatttgcttagacaaattaaaggaggaattctctcccaattacctgcccctacccagatattgaaaaggatggagttccttcctcaattccccatccccatcccaccaaaattcccatgtctcccaaccaaacaaaacacttaatagcctcatccctctaaactcccaatccctcctaaaaactccctccaaccaaacggaccgtcattacctgggtaggaggtggtaattgggaggaaattcctcctttacttttcctaaacaaataactgccatctgttttcattaatgacttaatctccaactaaactcgctatcaattcccaccacctctaccaaacaagatattggaattaaaaataaaattttcatcttaatctcaccattaatttcctcatgtaaactctcagtccctttcctttgagttaccaaataagccgagaaaataaaaagggaaaagaaagagagagagtgtgtgtgtgtgtaaaatttgaaatgagtaagagggaaaagaggaagagtatttttctgtgcggtccacttaaaaaggcggcacgcgaaaatcgattttttcgtgcggtcctcttaagtcgaccgcacgggataatgaggaatatcatgtgcggcgacagcccggcgctggtcccttattttcccgtgcgatttcagttactgtccaccagaaaacaaaagggcccgtcaccccggaaaatcttttactgcgtgcgtgcgggcatcaggtcattggatcttagcgtagctagctatcatcatcatatcaactatgctcatctgtcgcccacagctctatctggatgcctccatgcatacatgtgtgtgaccgagcagcggaagaggggaggtccaatgggggagggacaaggggtgcggcgctgatctggttgccgctgggaacagatagatatcgatcatcgcccgccgccgccgccgccgccgccgccgtcttccaggcgatcggtcgatctaggtgtgcgtgccgcatgcgcacgcgccgtccctttgtcgaccggtagatcggcggtggtccgtcttgatcaatttcttcttctcctttcccggcgcgccgtgttgcatgctgcaggggttttggctctattcgactcctcgtcgtcgtcactttgtcacaacccttgcaacttgcattgtcacattgtctcgtctctcatgtcatcgtatacaaacagcggcatgcagcgccagccatgggtgcctagctagatagcacggctagctggcatgcatcaagatcattcctcccaactaaactgacgaaacgggagaccaacttgtcatcgacttacaaaattgtcctctaaccacgaaaccggatacaacgctcatcccctaacttataaaaccagttcaaactaggcctctcagcggttttaaccccggttttatccaacgtggtggctgaaccagcatgggacccacgtggaccccacatcggcaggccagcctctcccttcctctcctttcctcctctctctctctcactcttttctctagactaggcaggccggccagcggtggggaggaggtcgccggggcgaggaggtccgacggccggccgacgatgcggcggcggagacacaggagaaggggagggcgacagcagggtgaggtggcgttggcgggcgagcgcgatggcggagaggcggcggctgcaacacgggaggggaggccgacgccgacccaaaagtggaagccgaaggcgacggcatgggtgagcatggaggcagaggggctcttcgccgttgggggcgtaaaggcgtggaggggcggggcggctgccggcgggagaagagaggcgcgcgggtggcggaggagcagctgggtgcgagtgggaggggggagctgcttgcggcggtagccggcgggggagcagctggccaccccacctccatctccggcacgagccgcttgaagtccacctccgcgcggtgctcgtcgttgtcatcagcgaagcgacgcatgttgacggcgtcgactaagccgtcgtcgtacttggccgcgacggagcagtcgatgtcgacgttgtcgtgggaggggtgtgtgagcttctcccccaacccccaccgttagccgaaggagagcatggcggaggcggtgaagaagagcacgaccggtcgccgctagccgccactcgcacccagctccttccctgccgttgttgcccagttctccccattcggccaccgcccgtgcgcagctccttccgtgccgtcgctccagctcttccccctttggccactgcccgcgcccagctcctcacctgctgtcgccgccgctcatctctttcccccaccggcagccgcccgcgcctagctcctcccgccatcggcccagctcttcccccttcggccaccgcctgtgcctagctcctcacctgctgtcgtcgccgcccatctcttccccgccagtagccgcccgcgcctagctccttggtcgttgtcgccgcctagctcctcccccgtcgcccgcacctgctgaaccagcccacgcctagctcctctccaacgctactgcccgtggagaggagagagaagaagagaagtggagagaggagtagtggccgatgcaagaaagacctcgcacaggctcgccgcatccatgtgcagggcggggagagaagcagaggtggagatggacgtggcggcggtgctcaatcgaccaagcctttctctcccatcggccgccggcgtgcccgccacgtcggccctcctcccttgccggccttgatccttgagaggagaaagtgagaggagagagagagagaggaggatgaagggggaggaggggaaagagagagagggggtgctgacgtggcatcctaacatgtggggcccacgtgggtcccacgctgacttagccgccacttcggacaaaactggggtcaaaaccaccgaaggacgtaaagtgaaaggttttgtaagatgagggatatcatatatcgggttttgcggttggatgacgattttgtaattcgatgacaaattgagggaccttggtgtactttttccgtgtgtaaatgggctgagatttaaggcccatatatgggccggatcgtggcttccacgaagcccatacttgtaaatgggctgacatttaaggcccattataacaaggcctttgggtcaagttcggcccagatcagtgcacaagccgtcgacttccgccgccggcggcttcgtcgacggcggcgacatcgatcgccgtcgccggcggacagatgatcccccctcacgacaccggtacgtcaccctgctacaccatctcaaatctttctcctgctttgattcatctcatccgtgtgggtttttctagtagatctcgaatgacggcattccccgttagtttttttttttttttttactttgctcggatgaaatttgctcgttttgtttcctgttcttgcgattgcaagtcattagttgatgggatagtgaaatccctgacgcgcattggtcgtgtagggagctggatctgttccatgcgttgctgattggatagaggggattagagtttacgatttagggctttcctctgcaaaaactccttgccgcagcacaggaagcaggtctcctccaaccgctccacaggcggactgctcgtttcaatatggccttatatgcagatgacgctgtagtgttccttagaccagataaacaggaactccaaaaggtccaaatgataattcaaaatttcggcctcgcgataggcatggtgaccaatttatcgaaaagcgaagtctatgccattagatgtgacaccctcgacttacaggatattctctaccccttcccggcacagatgaaacacttcccttgtacctatctaggacttccactccacatcaggaaactcagaaaatcagatgttcaacctctcatcgataggttctcagctaggctcccaacatggaaaggaaagttactaaacaagactggccggacggttctgataaagtctaccctctccgccctcccgacctatcacctcactgttttcccccttagaaaatgggctgaaaaaaagatcgacaaaatttgtaggggcttcctctggacagggtcagaacagacacaggggggacactgcctagttaactggaagagagtctgtagaccataaaaacatgagaggccttggtataacaaacctcgaactttttggtcgctctttaagactccgctggctttggcaggaatggaccgccgtcaacaagccttggcagggatcgagtcttccttgtgatgaaacagacaagcagctgttcagagcttcgaccacgataacccttggaaatggcaacaaatcaaaattctggcatgacagatggttgaacggatcacccctgaaagaactttacccttccctctatcagttggccacgagaaagaacagatcagtggcataggagatacaagggaaccactggttgaaacagatgagacgaatgaataccacaacacaggttagggaattcatccttctatgacaccaaatccaacaggtggagttccaggaaggcatagacgatgcgatagcttggagatggactccaaatggatcatattcagcaaactccgcctacaggatccagttcgttggaggcatacaagacaataggtctgatttcttctggaaggcgaagatagaaaacaaatgcaaattctttggttggctcatgatccacagaaagatcctcacagccgacaaactccagcttcgtggatgggacaacagccacatttgtcctttgtgtggagtagaaccggaaacagcaatgcacctcctcatggaatgcgcctttgctaaacaggtatggagacacatctggcaaaaggcagggctccacatgcatgtggcttccaccttcgttggagatatgctacgatggtggtcaacctgcagaagagagatggccaaagaacaaagaagaaattttgatggcctcttcatctacacagcttggggcatttggctacagcgcaacgcaagaatcttcaatggtacttatagtacagtgatgcaagtggttgattcaattatcgctatgtgcaaagcctacgttggagcgcatgttctagatgagtagtgcccatactccctttctagttgcttctcattttcttaaaattttagccccttatctccccgggttgccttgatagaagaatgcttgggatcctttgtaatctgggtttgtaaaaaacctttgttgctttttctctactccttaatgaaattggcagagctcctgccgtttactcctcaaaaaaaaaataatctacattgaattgaggagcttgtccgatcattttaccagtgtccctaaactttattttagcctagcatttccctgcaagtctgttattgtggttcctaattaaacttttttagctgttctactttagcctgcaaactagcctaattatttgatagtcttacctaagtgatacagagtttagggacctctcaagctataactaagtaaaacagcagaatatgtgctttaacgacatctaagttaagattacatcaaacacaacatgattattttgcacaatgtaattaccatgagcaattttatggttnttgagaangtnttatanngtannantttttttattgtaaatttggtactttttngtanttaantattataangtnnnnnnttnnnnnnnananntntnanncntnanngnncctcctcaaggaccgtagaattgcttaattaccatagtaccatatttggtcctaattgaattctccgtctcccccgcatctgctgaaataactaacgtgcaaagaatttgcatattgttgtactgtgcaaggcatcaagcaccgatcttgggatcaaaattctgtctcactgacaagaaaatgtttttgttgatgtctttctaattccacaaaccactaaaggagtgtgataaggcccttctaccagtcttctacttcctctgtttcacaatgtaaggctttctagcattgcccatattcatatagatgttaatgaatctgaatataggcaatgctagaaggtcttatattgtgaaacggagggagtatttcatgattgaattactcatcttctttatcgtgctctgacaatgaacggtagaatcatgttgcattccgcttggaattagcccaatattcagccacaagtttagcaaaggctgtttgtttatcttccaacaacttggcgggcgtgtcatattctataagcttccctgcacaaacagaagggccatcagcttgaatcatccaaatatgtgcagtttatatatgtgcagtttggatgacagggccatcagaggaaggttcggatgagcgatgactggaccagaaccttcctcagatattcagattgatatgcgtgtgtgtagtaacttaccatatgaaagtaccatgaccttgtcactgtctgttacagttggaaccctgtgagcgatagttaccacagtgcaacttgagaattgctgcctgatgaccctctgaatgattgcatcagttgcggagtcgatggatgccgttgcttcatctaacacaagaatcttgttcctacggaggagaactctgccaagacagaagagctgccgctgcccaacactccagttactgccatcatcactcactacaattggccaaatgaacaaattgtttgagatttctaaaaatattttgcatggtaacttttttcctctgaaattgatgtcacttacctactgtatcaagaagagcaggtgtgctgcgaatggctgtctgtagttgacacttctccaaggcctgaaacgttcagtgttagtttaatcaattcatgaaaccattttggtctaaacaaaggtaccagtctggttaagttcaggatcatgattgagctcaagttcttctattgcttatgttttgagaagatttttgtaaagtgattctattagaaaccgcactattgtgtaagatttttatcacgtcttatatctgagttttgcacaaatgtaatttttcttacctcccatatctcttcatcggaatgcagaccaagaggatccaagttgttgcgcacagttcctctgaaaagtgtaggttcttgggggataatgctcagttttgttcttagatccttgagaccaatagagctgatatccaagttgtcaatgagtatcctcccacccgcaggatcaacgaggcggaacaatgagctgatgagtgtcgatttcccacttcccgttctccctacaaccccaattttgtttccagcaggaaatgtgcaagtgattcctttgaggacaagaggcatgtttgggcggtatctgacctgctcataagtataagtgtgtaagttactgcaaacattttttaaaaatgttctgtggccttctctattgaaagcaacttactgtagttttaccttgagatcttgcaggtcaatttgtccctcctgtggccatgaacttggagccctattctctggtataatggctggaggctctggtggaaggtgcatatactgctttattctctcaactgaaataatatagttttccatgtaggagtagaactttgtcaggaaaacctgaactgctgtcagcgacaaagcaaaggagaggctgagacccgcaaagcctggaaaagttaacattggaagtgttatacatccttgttggatgtagaggccgggttttaattaatccattatctaaaaaaaaaaactggaagcgttcattgttcagcatactgaaaataccattgtaagatgaacatgttaaggtgtaatggcttatgtacatacatacctggtgagactgctcctggaggagccaaaacaaggagcagtgctgctgttagtagtgtcaggctctgcagtgcttctactcttatgagaacccactcttgcgccgcaactgtgtggaagaacaatgtcgcgtcggtatcgataagaagtaggttattgcggatgaacctgtctgtttccccaaaagacctgatggtcaccacagcaagaattgattccgccgcatagttcatgactggtgcctttgttgttccattgattcttgctagatctcttgctgaggccacgtagtgcctcgtcaaaggttttaaaacaaacgtgagatcttgagttcagaaggtaacatttgatctatttattcatctactggtttaattaacgatggtagttgtttgcagcaattaggggactgacctgaacatatgccacagtaattgtaactgggattgctacaattagaacttgccaagttacagcccctgtaaccagtattgttgtgatgagctcactagcgccaacgacgacataagccacggagtaaggtatgtcaaagtccaggatgcttaaatctgaagatgcctgcagagaataaaagggctacagtcaggtactagcaaccacttgacctataataattgttcatggagaatctaaaggttagctcttatgatcttattttgaagtccatacccttgtcaagattcttccaaccggtgttgaatcaaagaaagacatgggggccttgaacacagaatccattaggccggtaaagaatgctttggaggccttgagccccaacttagctgcataaagggttctgatataggcaaagcagcagctcaagatggacagccctgaatatgcccctaccaggagagcactactgacgttcatctggacagccactgccagccagaatgtggccatcatctggaaggatgtgaagagcacctgagtaacacccatcacacagagatgtgtgattcccttggacacattgatgtagtccttatatggcttccatccaaggtctccaatctccttttcttcctcttctgtgagctgggttgcagaaggttggccttttgcagagattgaatcaatatcactgatgtattttgcagaaggttgtcctgatgtattttcatcagtcacattttgctcctggacttggctttgctggctggaatcatccaatgctgtgattgaggacttgtgagctgagacaagcttctcaaatgctgtcccggattccattagctctgcgtaaacaccttgttgtttgacataaccatcttccattacctgttgaaacaatggcagatcattcatctgaaggatctttgataccctttgatatggctaaatgatagtctgaagatcaacttaccagaatccgatcagtctcggtgagaaattcaacctggtgagtcacaagaactacagtcttctctgaaagtgctgtcattacacaatccagcaagaacattgccactgattagaacttttttttcatcagggagtgcatccatggatgcaggtcaaggagcacctcttacatagaacagaaccgcagcggtgtgcgcatcgaccgcgctgaaaggatcatctaggaggtacacatctgcatcactgtacacggctctggccagctgaatcctctgcttctgaccaccgctcatgttgattcctctctggccgatctctgtcaggtctccatggtcgaagttctcgaagggcttcccgaagaggatgttgtcgcgaacagtgccactctatccatgagttctgggaaacatacgccactgtgccatacaactccacctgaaaattgattgtagttttgtcatgttcatattttagaaaacatagatttgtcattgtcatttttttttttgtatatgaacatgacaagacaatcttgtgttttctcctttcatggtaaaatgaaaagaaaggagataaatatagagtcgaagattatcttgagtcttttttcaggggaaagtagaaagtttttagtgataatgccctattgtttttgcatgaaatctaaataattatgagaaattatgaacagattttaaatactagattataatgtcatcagtcaaactaaattcaaacttggattacaaaaggaaaatattttctttttgaagtcaaaattggatgtaaagttttacttaattttgaagaaaaaaaaatctatatatgaagatgggatttgattttgtatgtttgtgaaaggaaagaggacacatcattttttttttctgaatttgctatgaactacttggattacaaaactaaagaacatgatgattcaatctgtatgcgaaaagctgttcttttttcttcaaaattcatctcattttttctatcacttaccattcctgatgttctaggtatctccccaagcaatgcacagaggagtgaagatttccctgagccaaccgggccacaaactgccaccttctcccctctgcgaatgctgaggtgagcattcttcagtgtcagctcagcttcactcccactccagctgaagcttccatcctggacatggatgattcccgcatccgaattcttcgtcgtcgtcgtcgtcgtcgccgctctcgtcacgtcgtcctgtttgatctcctcctcggcgaggaacctcccgatgcgttccagcgacaccttgtactggatcatcatcgtcatggcctccggcagcatcctcaccggctccgacatggccctgagcgcggcgagcgcggtgaacaccgtgccggcgtcgagcggcgcgctgccggcggcggccgtggcggcgaacatgacggcggacaccacggtgggcgccgcccagtagagcacggcgccgtaggccttcttcagctgcgcctccctcagccacgcgaactcgccgccgaggcgcgactcgacggctcgccggaacgcgccctcccatgactggagcttgatggccctcatgccggcgagggcctccgacgtcgaccggagccggccgtcctgcgccgccatgaacctggactggtagccctggagggccctggcgaacggcacgttgaggaagccgaaggcgacgaggggcacgaggcccgggagcgcgccgaggcggagcgcccagaggagggtggcgacggcgagggcgagctgcagcggcgagctccacgacgtgtggagccagctgacggcgtcgccgaggcggtacgcgtcgacggcgacgtagccgacgacctcgccggcggagtggcgccgccgcgcgcgcgccgacagccggagctgcttccggaacacggccgccatcagcgccgaccggacgcgcatccccgtccgccgcgagctgaagaaccagtgccgtgcggccagcgattgggcgagcttgatcgccagcagcgagccgaccagcgccaccgccgccgatgcgccggcggcggcgaggtcccggcgctcctcctcctctgccttgtggctgctgtaccggacgacacggcgatggccagcgtcttgacgagcgcgtagaagccggtgagcatgatctccccgaggaagcacctgagcagcacgccgacgaggcggccgccaccgccgccgtccttgccatggccgtggaggctccatgcctcggcgaacctctccgacgcgcgcgccgcgccgtcctcggaggcgatgagcgggacgtcggcgaggtcgagcgccttggagcggccgaggcggagcagcgggttcagccacgagaaggacagccggctgagcacgccggcgccgtacagctccgagtaccggcgaggcgcctccttgccgagcagaggctccgacaggtcgccgccgccggcgccgccgttctcgccgctccggccggccattgccgagcccagttgttgccaatgacgcgcgcgacgtggcgccgcgcggttttttatggcggaatttgcttgatgaagctcagagaacgtactcctctccatcgctttcacctcagattttgggtcggatcatgcgtaaaagagataatctgtaaaatggcaaatcacatgcataatcaaagtggtaatctctataacatcaaataatcatttttttcctctaggagactgatagctggtaattagtccctccattcaaaagtattaagaatatttcatgttttgttttttccaaaatatatgtgtaaaaccaaagcgtgtttgattgttattttgtgatgaactattggtatatgagattattggttttgatatttggagattattaccgaagtgattttggatataattagaatttttaggtgatgaatagggattactgctgacacagtgtattcggtcagaccgggttgtggtagttggtcaaaccggcggtatatgtgcggtcaaaccagccagcacgtagtctgactggctgatgttgtgtcggttttggtttatggtcaattgtttggatatacgtggataattcatgtttatgacttctagatggatactatgtgtatgtaatactattgcttcttaacaatgagtcaagttggtgagaacttgtgctcggatatggtttcttggttgatgcatgtgtaggtgattcttaatgcttcggaagagtgttgtcggtgatggatcgggagtcgacttgggagaagatgacgtccagatgatcaagatatcatgcgggatgcttaggctaaagatcaatgcacgtggttggtgaaaattctatatggcatacaagggagatattgtgtgcgtatggaatgcggagtcgaatttggagggagtccaaatttagtacaattggagtttgtaaagttttctaagggattaggacttcttgtactaggttggctcgtggctttagactgtttacctcagataaatagagagggagggtatagcctcttggtgttgatttttgagagagttgagtttagagaaaagttagggtttcgagtttagttgagattttcatgagtgatgttgttgcattttgtaaatacaaagagaagtaataaagtttcaatttacttcgagagatgttcgatttgtgtttgttcgggttcaatggtctaatcggtggttagaccaatagatacccggcggtcaaaccggtggcggcaacaggagacagtggcgcattgggcggttagaccggaccaactccatcggtcagaccggaggatattgagcggttagaccggcgcatctactccggttggaccgatcaccgtcgaatttgagggtaacctttaattccgctaaaagtttcagtttttggtaccacaaccattcaatcacttctggttggtttagtttcttgctatttcgatcctacaatatgatcatatttttagtctgcatgttctaaaataattgattggaagcaagcagccgtcttaatatttatgtatgtaagtatatagttctttttttacatgggagatgagagatgagttaatttttctttagtcttgataataaaagaaactagatgatgccccgcaatttactgcgggatatatattagataatagagaaatgatgaaatgatttggattgaaatattatgaaaatgattcaagaataatgatctagcatatgtatgtttagttttagaatgaagtaaattgtagatataattaatatatggttgcatattgagctttgtgtgcttaatgggttgatgtggcatgtttgcatgtaggtttttggagtgataataaatactatgtttacatgttgagctttatgggccttttgaatcgtaggaataggaaaaaaaaggaggaatggaaaaatgcaggactaggaaaaacaaaagattctgacaagaatgcacatataaaacaaatgattgaaaaatacgagaaaaacacaggaatgaccgtttgattggatcataggaaaaaacacaggaatcggatgaaaaagatagactaaaggaatttttttcaagaggttggacctcttgctaatttttctccaaaatctctataggattactcattccatattccataggaatttaaaggatagaataggattcaattctttgtttcaaaggcttccataggattgaaatcctccaaattttccacacttttcctacaaataaaaaggcccttaggtgtttagtgggcattactttatagaaagaaagaagagataagtcttacatgtttggatggagggagtagtagtgatcgccagttcttttttagccttatgtagaattactgtggttgtttgattttatttggaggttgggtttttattttaagttttttgggtgcatggatttggtttggtgttgattttattttgtatttttccttagagcataatggaggactaacatttaatttcacgtctatgaacctatgattttgctaatagaaaatagcaacgacgctggcaagttggagagaagttggagagttgaatcgcaaaaatataaagttccaatatttagttgtgcatgtactggcaatatttaggccaacagctggccctttcatattttatactttttttaaggatacgtcggagaaatacaagataattttctatcataattattatagttattattaatccataatgttgattgtggatatatgaaaatgatatagccaagtttgtcgtcgcaaaagctttacaatataatgtttatataatttttccgagaaagactacacaacggtataccacttatctcccatgccgcggctccacgtgctggcttctcccgagcatgtcgcgtgctgctaggattatcatcacgcacgtttgttttgtgtatcagtgtatagtcttgttcctgacagatagctagtacctagcatggctaagtcctgcctttgatactagcctagctaggaaataaaaccggaggtactactagcttgctgtgcatgccaaatccctataatagctactagtagtcccgtaccctagctatgtaaggtacttattaagcctagtagcctagctatgtgtctaagattggttgcatctatttgcatgtgtcctataccatgcacggattagaccagataaataattacctatattatatatggatacaatggattctaattagatatgtcatgttaggctcttggttataccacatcttagaaactctagtatgtgatacatagatgctagattatcatatctgatatccaggtactgggtcaaatacctaggtaccaagtatgaaacctataaatacaagatctgatgccgagttatcgggtctgatacctataagtaccggatccgataactaggtatcgtgtctgatacctatgagtaccaatcggatacccgggtattgggtatctgatcttatacctatgagtatttgttccaatacctatgcgtaacgggtcggatacccaggtaccgagtatgatacttatgaataccaagtctgatacctaagtatcggggcttatacctatgagtatcagatttgatacctaggccaggtttgatacctatgagcaccgaatccggtatcgcgtatgatacctatgagtatcagattggatacccaggtatcgggtatctaatctaatacctatgagtatcagttccgatacctgtaagtactgggtccgatacccaggtaccgagtatgatacctatcaataccaagtctaatacctagatattgggtctgatacctataagtaccggattcgatacctaggttgggtttgatacctatgagtaccggatccaatacctagatactgggttgatacatcttagtagcggatctgataccaaatatagggtgtgatggcatgagacttcagatatgacaccactaattctaatatttatgggtattcaacaatcaaataaaaagatggaccatgcatagctaggccagaaagtacagcgaaacttcctcacgtgctgctgacatgctttgtttaggctcatgctactagctctagtgcttaattctaactttgctaattgaagcaggtgtcagacccatatggacctaaagaggtgtacaagtagtgatgtactagagtatttcatagctattttgtactgtaggagaaaagagacctctcgtcagtcgtcactagtcagcagtcttcatgtgaaaggataacacacgacacgcttttagagagaaaaagaatcggtgagtgattggtaagtataaattataaactataccgttaaaacggtacaccgtcccattgtttttctcaatttttccatgtaaaacaattaatagtctaggggattttcaacaaacaataattatgttgtgttgcatgactgaatagataaataatttgtggcaattatttgaaagcacaaatgaattaattaattattataaagtagaaaaaatatctaaaatattatcatgagaaattaatatacggtgtcttggtgtcatgatagtttagtggttgcagtgacctgagtagtatcttaaagttctgagttcaaatctcaatatgaacaaattttggattgggctatttgaggagtcaagttcataatgtaaaaaagctgcatatatctggttagatgtaaaggccagataaaaattacccttgtctaaaaaaataataaaaaaaaacctaaaacctatgtcgttccggagcgaacagcacacgctagaacatgcccatctcgagcagtcacatattttttgtttgttcaccagatgtgtcaatcgcgagctatcatttcctcgggagacaacaccgtttgaaccaccaagacaccatttgtttcaattatttgccttattaactttgaaaagaccaaaatggcgtcgtttgtgacatactgacatcctcgatcgactgatcaattcgatccaccattaggcactaacttagatgattttgaatctgatgttagaaatcatacacgatgcaatcattcgagcaatggtagattggtagaaattgagagaatagcactgcgttagcagttccagtcaagggcttcgttgtcttgcactcttgcaatatcagtatgtcagcattacaactgttattgtcgtgaaagcgtcatggctactgcaatctttgcttttcttctgctgtcatcatggctttttaacttaagctcagtacacagtgacaaccaaaatatcttcaaatctacttcctccatatcagaaaacattaagcattgttttctcattctgaaacggaggatatatctatattcatacctaaaagttaatatttttttctgggatagaactattnaatactctctggcttttgttctggctggcttgtgtggtctgcacacatagattgatcatatgtgatcatgtcagcgcctctatgcttgctgtttcttcttgtcacgttttctttctatccgacaagtcggctttctccttgcaggaacgccaaagaattttttgttttttgcttcagagacactatacaacatacatatgatttgatagatgctggtacgacgaagcagatcacttgccgtccatctggcatctgcccagcaagttctggccccacacaacagataagcgttaactctaatccgatcattgcaggttatattatcaaaacataattagcatatataacctcgtataggttctgcgcatcttaattaaaacttcctttatttaaaagaactatataatctcatgagagaggccaatatcttcaattaatataatcaagttaactgatccatagttcatttgaagtgctggtgtgtgtaagtgtgtttcttccatatattcggggaaaaatgtttgaagtgcatgatgttttgagatgtcaccctccactattcttaccattcaaacaaattttataggagcacttgcaattattttaggctcaatttagagagcttactgtagccacggcttattcgaaaattttagctttcaaacactggttctgagaataggtaataaaatctagaaaataaatcagaaggtggaagctggaaacaccatctttgaattctccaaacagggctacccggacctggctggagaactgcaagggacagcttttaccttgaattattggacaatttatatataacaagcatacccatcaaatcaaaacttgcagacacattgacaaggcaaatgagtcaaagttccagcacactgcatcatatttactctgttctaaaataaacaaaccaaatactcccttcgtctcaaaatataagcatttttagcaaagtgacaagtcaaacaattttaccaaacaagtggaaatgaatagtcctggatgcagaatacttcttctaattcttacacttattgtatggacaacaaataaaacccttatgtctgttagcttcggccactctcaattatatatgtttggtaccaaccgggactaaagatcgagctgacctttttttttttgcatggccctgttgctgcatatatatatgtttcaatacatatatatgcataatatatatgtatttatacatatatatgttacgcaaatgcatatatatatatatatatatatatatatatatatatatatatatatatatatatgaaagcacttaacattttatgtgcatatatatatatatgaccaaaatatatatttacattaaagaaaatgtgtacatgcatatagaaaaatagacatgtattaattacaatctattatgatgtcctagctagctacgatttcgacgtagtaatagtcgttatctcagaagctaaggacctatgaattgtattttcatcgtagtagaattcacccttgggatcaaggatttgttcgttgatgaatcccatgagttgttcttgaaccgccgcgataaattccttgtgtgtgatcaggttatccctcatgcgaataaactatatgaatgtatgaaattaattagtaattaaacaacaaatcgatacgtacgcaatgaaattttgaatttatttgtacgtacaacgagctctcttgtggtgatgatttggtctgcaaggcagtggcaatactcgcacacgtagtagctgcacaagttagttccctgcttttgctttgcgcactataaataaatgacaaacggcgagagatctaattaatatacacttgtatgtatttgaattggagattcaatataaatgtagagcatgtgtactcacaggaaaattgaacttccgcctaagtctttctctccatttgccgcggaccaaatgacggaaccgataccaagccctacatggagtttaaagctatgaatcgtagtagcaattaattataacaagattcttaattaacataggaacttatgacaatacctatctataagttcgaaaaccttgtcaaacgtagactcttttttatccattgagtcatatacgttgacgatgcaggcctccaggtcgaagagtaaaaggacctagtggaatctgcaatgtgcgtgggatgcattacatatgaaacacttagcatgttcgtacgggaatgaaatttggtataggaagacagtaaaattaaactaactctgtgttgttcggcaatagtataaacgtcttgtaatgttgcgccttcaggagatggacgagattgtcctctgtggcttgcggatactggtcgagcattgcgacgttaactttccgagggtcgatgaatccagtatcgaaaacaccccgccgtcgggccctttgaatctccattctacaacgataaaaggaagtatatattatatatagtctacttatatacaaggacctaattaattaaaggaaacgtaataagaaatctaactgaacgatgcttacaaaatccagcaactcataatagagacgtcgagggcgtccagctggtatagttcgtagatacccttgaaattnnnnnnnnnnnnnnnnnnnnnnnnnnngaagtctgtgtccctaatcctcgctccgatcatctctctaccggtggcgctcatctccatgtacagttgatggaacttgtacatttgtatgggtagggactgcagctgctcaggcttgacaagcggtttaccgagttctcatgatttcacttccccctttcaaaggtgtgcctcgtaccaattgatccgtagttagcccgatgcaataataaattcttctatccaaaatcttcaccggtcaccaacggctcgatctcctggtttggttgctctccaagctgagggactggtttggactttccagaagatgctttcttgagtgttcgctcatagtccgatagctttatggcctccttggcaggtgcagacatacccctgaagaagttcctaacacttgggtctataggaatcttcttttctggacttcgaggcttcaattgtctcctgacttctgatgccacataagcgtcaagctcctcttgcatgcaatcataccccaggtccttgttcttggcggcgtcaactttcgccttcttcgttgcccttgtgggggcaggcggtgaagcttgggggggccttgacttggaaggtgccggacgaggagcttgcggaggagtcggtgtaggagcctgaggagtctaattataaatctaataatcttatattaaaactcaaataatcttgtattagaactctaataatcttatattaaaactcaaatagtcatatatgctaagtctaactgtcgtatattagaaccctacacaatcttatatgctaagtctaattacaaatctaataatcttatattaaaactataataatcttatactaaaactcaaataatcttgtattaaaactctaattatgttgctaagtctaagtgtcgtatattaaatctaatagtcttaattgcattaaaaatctaacaatcatatatttacatcacttgcctacgcgaattccttcgagggctagcgaccactccggcttgagggacgacgacgacgtcgttttttctacaacatacaaaaagatgtattaggataaacgcaaagtaacatatattgtatttcacgttcacgttgtcgttaagttcacatttcgttcacgatcgttcacgttcgcgttgtcgttaagttcacgtttcattcacctacgttcgttcgttcacgtacgtttcgttcgttcacgttcgttcatgttctcgttcacgttcgttcgttcgttcacgttcacgttcacgttctcgttcacgttcgttcgttcacgttcgttcgttcgttcacgttctcgttcatgtttgttcgttcgttctcgttcacgatcgttcgttcgttcacgtggcggcagcggagcggcggcgcggctgcagcttggcgaggcggcggcgtggcatcggcgtggcgcgcggtggtgtggcggcccggttgtgacatgccgcggcggcgtcgtggcgtccgggcgtcgtgccgccgcggcggcgtggcgcggcccggcgtcgtggcgcggcttcgtccgcactgctggcgcgacatcgttgccggtggcggccgcatcgaggtcggggtcggcatcgtcggcgcggcggagtcgtgtttggccgcgacgacgtcagaggcggcggcaacgagacggctggcggcggtttggggagaaagagagagatcgaggtcggagagagagagagggaggcggcggcggctctcaccccagagatgcggccgcggcggaggtggcgacaacgacgcacgtgagacgacggcgagatacgacggcggcgtcggcgcggggatgccccaggcagtggcggcgaaggagaagccgagagagagatcgatcggggaaaaaacttctaagt

SEQ ID NO: 12618 - DNA, 10980 bp, Oryza sativa
gagatgcaggtggacgagaagtgcaaccaatgcgtcgaggagatgcagagcacggcggcgaggttcaacagcatggtgcgctccaccggcggcggcggcggcgggctgacggcggcgttcgcggggcgggcggtggcggcggcgtacaggagggtgaggaggcgggtgatgggacagctggtggcggcggcgacggcgaggtcgtcgtcgtcggcggcggcggcggcgctggaggagaaggagcggagctgggagtcgtcgttcatccagaagcactgggcgatgcagcagctccggcgaggtgaccagcagtcgtggcggccgcagcgcggcttgccggagaagtccgtcgccgtgctcaaggcctggatgttcgagaacttcctccgcccgtaagctcaacccgcattcttataatctcttcttcttcttgctctcaactctcacatgtcacaaatgatcactctgtgctcatgatcatcactcttactagagttctttttttttttgaaaaaaaaagtttcaaatcagaaacatgatacaatcacacagaaaaaaaggtattaatgtgataatgtccattctttgaagtatagaacaaatataacttgattactggagtaatttctatcctttagacttcagagtggacattaatacctttctttctatcctttagaatggacattaataacatgatacaatcgcacaaacatattgtaagtaggagtagtatgttaacttgagtgctgaagatcttatagagaagtttgcttcgaacggtattgattggatagatgtcatggaaccagttcaaactcttggagtcaagttgtaatcattttttttttttgaagtttgacatctcaaatatattttcctataggtatgaaaatatgactgttttaacagtagtttctactgatggtagaagtggtctagacatttcatcttttctcatccaatggaccatatctactactattaatcatccaatggaccatatcatgattcaaagcaacacaagttcaatgaaaatatgtcaaatgctgattcaggtatccaaaggacagcgagaaggacatgctggcggcgagaagcggcctgagcaggagccaggtgaagcctcattcaatctttcatcatcaaacatccaagctactactacttcacaagatcagagaattgttttcctacttatggaaaaataggggaaaaaatagtattaatgttttgcattttcaggtctcaaactggttcataaacgcccgcgtccgactgtggaagccgatgatcgaggacatgtacgaggagctcaagaagacctccggaggaagcgatggcgcagcagagattgagcatcttagcagcaaagatgtgctcagtttagaaagttagcaagtttcagatgtacaaaatctgagctctgctttgtgagcttctgcatttgcagctaagggccaactagtcacgagtgtccactactgatcaggcccttatctatgaaaccttgaggtttttccttgcatatataaatttatataagttaatttctggtgcctcaaaattgcaatggatagacagtgtgttgccctcttctgtctcctcattttttgacagattgcagattttgctacagttcttgtttaccacgggaccaagactgaatagtttcatgcagatagttccagtccaaaggcagggatctgcctcatttattttaagaaaaaagaaaacagtccattttgagcttatgattgatcgacgaatattccattgatctgagcatttttttcaacgtgactcttctacccaacccaattatccatgcatataaaagtgtactactctcttgttctatattaaagtcatattgagtttgtcctaaatcgaacaaagtttgatcatgtttttagaaaaatgtagtagtgtttcgaacacataaaaaacatgctgtaaaaacatatttagtggtggatttaatgaaaacaatttgatgctatagatatcactatattttttctataaacttggttaaggttaaagaagtttgacttgtaacaaacctaaaatatggagtgaacagagttcaccctaggcatctttgggttgaactcatgaagttggcaaaatccaggtagggagaatcttgcagttacaatgtctgcaaaatgtagatagatatccagtgcacatttctgaagattgaacctgaaccaagcagggtcaaaaaagccatcacatttggctgttcagtgtgatggaaaacaccatgacagattcgcagtcactcagatggaggtaaaaaaaccgaaaagaaaaagggaaagggttttgaaagattttgaagtggccacaagtacaagcatgcttctgttgctgattggatccctttttgcattgcactgttccttgcctgtttgcaatcatgccccatctccctgtatatggttcacggattttgaaaaagaggaaaaaaacatcatcagcacatgaattgtttggcacctgatttggcgtgtgcatccaagttggagtctttggaaaaattattttttttgtttatgatataactggattttccgttcagttttgcgtgatgagactagttgtactggattcgatatacaactcttagggagtgtttgaagagaaggggattgaggagattgggaagatacgcaaaacgaggtaagccattagctcatgattaattgagtattaactattttaaatttcaaaaatggattaatatgattttttaaagcaactttcctattgaaattttttgcaaaaaacgcaccgtttagtagtttgaaaagcgtgcgcgcggaaaacgagagacaatctctcctatctccacctaacgaacactcccttagtttcttttttttttggtatgcagggttgtaatattgtagatatacaatagatttcgatagtaagatttcatttgatataaaattcttagctcttgttaccatttataaaattgtacgttgcacacaactattattggacaatctacgctattataaaatgaacccaccgtaataaattgggattttattcgttttctttgattaatgtgagaattttgactcatttttttagctattttgataatataatagaaactctatcgagcattggtacacatatgaaactgctaggaattaaaacacaagtatgctttgagctgaccgatcatatctgaaatggcaggagtcatgcttgtatgtgcatggatgtggactcatctgggtatacaaggaacaaaggatggattgggacacctttcatctcctaggatattgccacgttagctaacaatcctaccagcacaaggaaaaggtagtattctctcgatcgacgaaactgatgtggtagattcatgggagaaaaaaaccacttcttgatatgttattgttgtacgaggttatggatgcacattcaaatctagatgtgcacaaatacatatatgtgagtgtgtttatttaagatttttttttttgcaaggcatatgatcttatccctggtctttgtctatttctgtgtgtatcaatctaagagggtgcacctaggatggatattgcagggcatgaacttacatgcatgatgtagtgtatgtccatggttctgtttgaaaagcttctggttagaagtcgatattgagttagcttggctcggatcattattctaacgagctaaaagaccttgagctggtaaatgagccgagcaaaagaagactcctaaatccctagctgctagttggtgaaagcgtaattgagtcagcgtgataattcgattaatcacgggccatgagtacatatagagacaatacttccttatctctacatccgacttgtagaatcagaatcgggaaataattagagaaaccgactaagataagatacaaaatatatctctaaatgttggattcctaggttgccagttttcccatggcttgtttggctcatgaggcttgttatgtgtaacactaaaccccccttgctcagtttgttggcaattctaaaagagtcgagtagcgagctaacgagccattatttatctagctctacttctggtaactatagcttatcctagaaccttcaacaccctaagcaatattattgattctcacttagatcttggtagtatatagtcatatttttaaaaaaaaaatgaaaagaagctgagaaatttaattttttagattctcattagctgcctattcacgagctatttcttaaaatccagagttcttaaaccaagctgcatttcttttgtagctcggtaagagaattgaaattgcatgtagctcggtaacatcagcaaagaggaggaaaaaaaatatatattttaaaaaatccgcctcctacaaaagttgggcatgaaaaaaagaccagtacatcgatttgggctaccggtacataagtataaggttcattttatacaatgggcttgggacagcctttgaatccaagtgtggaaaagaacccaacaactcgatgggcctcattcttcttgtttgccttttatgctccttaggatctatagaggtttataaagtataaaccctgaaaaccaagtgggataacaagcagagcattttttttaacgtggaacgttagagcaaagcacattatttttgtagcgataaaagatcagtctgaaataagaatgatcttctaaaattattttgtacaagtaattgtagccactaggtgacaatcaacaacctcacataatgtaggatatgcctattaatctattttgacctaatgtgttgcatactaaactttagcaccgagtgatgatagacagttcatgaattaaagaaaaacttacaaaaattcgttattttccatctgtttatcgattaacttaattctgcataacaaaacattttaatccaggtaaaaacatagtaacgacgatatcctaaatgttatgatcttcttagatgcgttgtgttggaagtctcctattagtgtggtgtccttagtggtggtccccaccggatccgttcgatggtttaggcggtagcaagatttgagtaaatgactaatttacaactcagttactctctgatattatcttttgttgtggttttcgtcaacaaggaggttaacgaaattcaatcggtaaatgaacgactgttgttttcggattttctgttttctagtttgagaaagataaggactacatatacaaacgcagatgaagtagtttgcttgttttcaattaaggcatgattttgtagttcgtagttatttgacctataatttctaataatttgttgtagctttttaaaattaaaaccggaatgaatttcattataaacaatcgacttcacagcctgaaaatttggtgcacatgtgctaaaaagaaacaggggttaaaattaaagtgtcatccactaaccctgctttcagtttagataaggaagatgaacgagccatgcactgactgactaacatatgtagatcttttatctatttttaggtttcatggcattgacttgtcttgttagtgtactgcgttgacttctgccgtggcacagagatatttttctatagttgggagttgactttggtgtgtgaggacataaggctggaattatccattgcatggggcaggtgccatgggccatgcattgatgctgcttatgcagctttgcatcttcaacaaactttctttgacagcgtttcagcagaaatgtctgtgtgctatgcgcaatctgttggaaaccactgaatcaaaaacttatggcaaatgctttcagtgctttatgctctcctgtttcatattataagtcgtttgacttttttcttaatcaaacttttttaagtttgatcaactttatagaaaaatatattaacatttttaatatgaaacaaacatattatcaatatatattcaatattaaatttaatgaaactaatttaatgttatatatgttgctatttttttctataaacttagtcaaacttgaaaaaagttaaatgatttataatataaaatgaaaggagtagtttatatattgattaacggaagagggtttttatattgaaaagataacatgaagtaatatactcgctctagtcaaatggagtatactaacttggttctcccaacatcaagtaaatttgattggaggaattgatgacctttttaatattgatttgtgatacttttggtatcttgcgctagtttatattagaggtatcacaaatttataggggagaaatatctttgtcctacgaaatacgatcaagagaaaattgagagttactccctccagttctataataattgacgttttggacaaggttggagtcaaacttttataaatttgaccattaataactttaaaaatatttagtttaaagaaactagaacaacatatatagatttgtctttcaaagcactataataaaagtaaacatgcatttatttattatttatttattgtatatattataatagaaaaataaggtcaaagatatattttgtagttcgtgtcattgtccaaaacatcaattaaaatgaaaccggagagagtagctccgtttggaacaatgtcttaagacattttgttaggagaaaaaacaattttgatctgcttagatattttgaggcaagtttgacttattttcttccatagtcacgaatacacaatttattggtacctgaattcacctattatcaataatcatacttctggtcaaactttgcataaagtgtgataagcattaacacatataattgatggatacagtcatctcctttggagggaaaatgcctttttccttttcttttctggaaaaaaagtgtgagactcatgaggccatacagtgaccccacaaagcagcttagccacccaataagctaactataactattcagctaatttaattattcagctacctatatatttgcatgtacatgatcagttttgctttagggagtgacttgtcctaatctatgccgcttgttcttgctgtttttctgtgtgtgcttagctgctttgctttggctacccaagcaatggtggccactgctttttgcaacaactctttttcatcaggtcagaatttgctcacctaaaatttttatttagagtcagctcatcagagtatttggaatcttttcgaattaaaaaggcatcattatatatatgatgtttatattttagtagcatttatctgataactgtaaaaaaaaaagggtctcacgagatactcgaagttattgacatattgttgggcaggaaattccagaggtttcaggccggccgtaccttcaatatttgtttggatttaagatgaaattaagaaatgattttatccgaaataaaaaaaaagaatttgagaaatgaaatgggaattgaaagcaacaccgtcttgagttcatcctgcttgctgttatcaaccacctgaaactctgaattgaacaaaaaaaaaagggcagatgacagcaaagaacaaatgaccatgcgtgcatcagaatttcgtttgcctttgcctatcttatcattttaaccctgagtactatcagggttcaatatttttaaaatttcaggtctatcggttagcactggtaggatgtgcctcctaccaaaaactttaaacaaaaataatgtttagattcccaaacatcaattttttttttcaaaataccacttcttttcttttcagtttcttcttcaccctaaaatcacttcgcgttttgtaattggtttgtttggcacagctacagctccagccaaatagttttagctccatctgaaatgggagcgaagctgagtggagtgctctcacaaaattaactagagaggtggaactgggtttagacagcggcacagctttactccagactcaactcctaatctaaatttaggagttggagctctaccaaacatacacgtaatcctaaaatgttattactttgtgccaaggtttaatctaccgccgaaaacaattgttttcacgatattcttttacctatcgacgtggctcgaaatcaattttcgggagtgatttcgaatggtttttgacaaactaaaatttaaaaatagtaattttgatcgcaatttggtcaaaacttatcaaaatgctgttgaaatttgtcgaaaacagtgataccaccatggtgaatcggaaatgtaaatcccttgctcgtacaaaccaaaacaggcttccttatgccacaacagttgtttttacaagaaaaccaaaaggaaagcaaaagaaaaaaaaacatgggaaaagcaaaactaaaaaaaaaagtaaaaagaagaagaagaagaagtgacaaataacacgacaccgccgccgccatggacgacgacgacgatttattgacgaggcctctcctagtcgcgccgccgcgaagcagaggaggagtcctcggcgacggcggcgagcatctggaggttgagcttgacgacggtgtcggtgaacatcctggtgtcctccgccgtgttcccgtcggggacgtcgacgacgtaggactcgacgacgacgcagtacggcggggcggggccggggccggcggcgggcggctggaactcggtgacggaggtgacggagcggtagttgcggaggcggtgctggccgccgacgacgcggaagctgatgatgtggcggtcgtcgtcgagcatctcgaggcgctcggtgctggtggaagccgggaggccggacacgacggtgacctcgcggacgctgccgacgctggcgccgtcgccggcggcgagggcgcaggtgcggacgaagtgcttgtaccgctgcgggttgccgaagctgcgcacgatgggccacaccgcgcgcaccggcgccgccacgcgctgcgtcaccagcgatgtgcacgttgccgccgccgtggtggcggtggtggtggagggcgggaacgtgtggtgcgccatcaccgccggctccagcgccgccctctcctcctccgtcaggccctcccggagcgccctctccacgtgcgcctccattgatttctgatcgacctctctctctttagtttctctagcgcgtgcgtgcgtgcgatgttgggggtgagctaagctagctatgcctatatagggagggaggtgatgtgtggggcgcggtttactaggaagccgacaagcagcaacttttcactccctccgtccagtaacacgttttaactttgatcaaagttaaattattttaagtttggctaagtttataaactaatatagtaatatttataatactaaattagtttcaaatcaataattgaatatattttcataataactttgtcttgggttgaaaattttactacttttttttacaaaattgatcaaacttaaaccagtttgactttggtcaatatcaaaacgtcttataaggttaaatttagcacggtgtatgaaactaatttttaaacttataattatatactataaggtttatagcatcaaaattataatatatgaaaataaattcaaataccaattcgatgatattatttttagcaaataaattcaaattatattatactaattgttcgtcaaatgtttaatagttgaatattaaaatacgtgcgtgttttatagtatgggatggagggaataactttgattgttttttataagggcaaattatgctaagtacaaatacacgcaacaatttataaattatttgctctactgcaactcatcagtagtttgcaaaaatcaaaccacaattgaatggtctgacatggtgcattggcgctaaaatggatgcaatgttcacttccactctagcacagttttatcatggtttttcatttttctttttccagataatcccatatgtgtggttatattcggcgtcgaggtttctgctgtgcttattccattccacttccctctgtttgagacgaaagaaacaagaggtcggcgagaggcaacttgctgctgaaatcatcgccattgtcgggacgtaaatttcatatataggtaacatatatataaatatttctgaaaaaaaatgcatccgaaataggatttataaactattgagatcacaccattagaaccaaattgcatttcaaaagaaaatttggaacaccctaatgcagtaaatgcaacatcattttctcatagaaataccctattgcaatttgaactgcaagtttctcgatcaatctctcactagaaatctccatgcaccaatctattcaattgtactatcatgaatcgatcgtgtaaattagagcctacacgcctagaggtctcaaacatgttttggcatctgattgatcagcaagattgccacaggacagctacacagcaatacgccagggcccgatctaacagcacgaggtcacaaattagtttgactccacttattgattgctggactgttttggccttggtttatacttaagcaagttgtatggaatgtgcaatttacaagtttgttgcacctatttaaggatcctttaggacgcataaatttgtccgattgattcctataaattacttcagcttttgtaatttttttttaaaaaaaacttctctatttcaaaggagactttggggaacatatcagatgaatactaaggtcctgtttagttcccacgcaaaaattttcacccagtcacatcgaatgtttgtacacatgcatggatattaaatatagattaaaaaactaattacacagattgcgtgtaaatcgcgagccgaatcttttaagcctaattgtgccatgatttgataatgtggtgctacagtaaacatttgctaatgatggattaattaagcttaataaatttgtctcgcggtttacaggcggaatctataatttgttttattattagactatgtttaatactttaaatgtttgtccgtatatccgatgtgacacgccaagtatccatgtactccctccgttccagaatatagcaacctagaaccggataggacgtatcctagtacttagaatatagcaacct

SEQ ID NO: 12619 - DNA, 4656 bp, Oryza sativa
gccacacagccataagcgaggtattattggttgtaaaactggtggggaaatatccaacccgccctgtaaattgtgtctctcccagatgccagcggaggggtaccttcccccaatgttggataaagcccccataaaacttgtacccacaataacccgtatagaaggtgtttaagttaactccccaacagcaccaacaaaaccggatgatggtttaatgggggtgaactcttctaaaacctccgaaccaaccaaaacgttgggttggtgaagaaactggatgggtagccttatccccaaaagaagtaaaaaatttaccttggggtgaagatggttcaagccgtacggaatgggaagcacaagcagagcaaaagagccaaaattctccatgcattttgttttctgtcataatttgatgattaaggaggctttgcagattatctaaacttgttgatttatataccctttttgtctatgaataggtcaattgtatgaattgttgtttatatacatgatttatatacccttgctgctgctgccacaatgattgtgggctgttttattatctagacttgcttgaattgaatggatgaattgctgtttacatgaagttagtagtactgtctccttttttatctacacccctgctactgcccctacacttgttcacttgttccttattaaatggccagtgtagagtagttatatacctctacacttgttctttttttatgcataagaacagattttgtgcacttgctctttttttatgcataagaacagattttctgcacttgctcttttcttctggattgataaatggccagtgatgaattgctcaataagaacagattatctacacttgttcatttttttatctattcttctttttgcccctgttgtggctcaataagtaatgaattgctcaataagaatagtttatctgtacccttattgtgggctgttttttaaatttgcatgattgactcagtggttatatacctctacacttgttctttatggataagaacagagtatctacacttgttctttttttatgcataagaacagatttgctcttttgatgttatgatttcctctttttatcccttcatgcaaatgaatataattgatgcatatttctgagcaaaactgaggccatatctttcatagtataccccgtattacatgattttggtgcagtgaatcttgaatgtggatttaagtgcaactgctgctgtctatgtttgcccttgctgtctatgtttgcccatgctgctgcctatggttgcaactgttagttaagtgcaacttgaatgtggttttaagtgccatttggacatataaccattcatggagtgtgtactgctatatatgttgctagacctattgaattttgtggacttgcatttatactcctcctgctgctgttttatgtcaatcatgcaaattctgtacccttgctgctgctgttttttaaattttcatgattgatttagtggttatatacctctacacttgttctttttttatgcataagaacagattttgtgcactctctctttttttatgcataagaacagattttctgcacttgttcatttttttatctacaataatatatgcatgatttatataccactgctgttgttgcccctgtacttcttgttaaatggccaaggatgaattgcttaataacattctatctatacctgttcttttctttatggataagaacagattatctacacttgttgatttatatacccttgctgtctatgtgaatttccctctgctgttgctgtttatgtgaatttccaccctgctgttgcttgttatgtgaatttccaccctgctgttgctgtttatgtgaatctccccttgctgttgctgcccctgtggcatatatacccctactgctgttatatgaccctgctactgctcttttccttatggataagaacagatgaactacacttgttctattttattgataagaacagatgaactacacttgttctattttattttctatttcctcttttttctgcacttgctcttttcttctggattgataagaggagtatatctagacatgttgttttagttaatttgcccctgctgttgctacccctgtggcatatatactcctcctgctgctgttttatgtcaatcatgcaaattatgtacccttgctgctgctgttttttaaatttgcatgattgattcagtggttatatacctctacacttgttctttttttatgcataagaacagatttcctgcacttgctctgttccttatgattttctctttttatccctttatgcaaatgattgtaattgatgcatatttctcagcaaaactgaggccatatctttcatagtataccccgtattacattggatctaatgctatttagtctaatggtaggaaatttataatctttttcgcgaaagttaaaccatgtcaacgcccggcgcaaacccgccctccccaacacctgcgaggatccaggaagaagcaaacccagccacagaggcagttgccgaaggtcatcccgcgacaacggcggtccaacaacccgaaattcatggtaatttataggataaattttcaccacatgaccacataaattttagctagcaccccttagcaaatattgccttctgtttgtgctgcagaattgccgcaggaacaacatacgtcgatgtcgggcgagacaagtgcaagtaggtctagtagaaatccgcggtcacaaaatatatggccgaccacagtgcaagttataagagaggttgacgctagtggtaggcccacggcgcccaggactgtcattggaagatggtctaactgctgcgggatagcggcacgtgagaacttcgggatcctccataaagatatcgggaaggtcacagaagccgagaaagagcgagcttggacggcaatggagaaatggttcacatttccagccgaagcaaaggataggctcaagcggaaggcattacaaaagatgggcaaagcttggaagaattggaagtcgaagctcttcaccgagtatgtcaacccgcccggcaatcatacgccgttcgatgaataccctcaaataaccgaagcggtgtgggaggaattctgctctctcaagaccacccaagagtttagggaatccagcgaggcacatcgcgtactgcaacagcggaatgagcacccgcatcggctgggcaccgcagggtacatcggcaaggaggcaatatgggcccaagaagatgcagccgctgcagcagcgaatgtacctgccccgttttcagacatccctgaacaaagagctcgcaactgggcgcgggcaaggggtaaggtcaacccggacggctctgtcacatttgagaacaaaagtgatgccgtcgtctatcaggaactggtgagttcactacttaacctaactaatttccgttcgtataaagtacaagttcgtataaacaactatcttcttttctagttgggcttggttgctgaacaagcttcacaaagcgaggttgagtccgcgccgaagaggcgcgaagatgacatcctcacaaaggcgctcggaaccaaagaacatcctggccgaactcggggaattggtagcgatgtgccctggaagcatggactccctcagtacagctcccaatacaggaaacggaaagtctccaaggaagagagggacgctcgtttgaaggccgaacttaaggttgaggtcattcaagaactagaagctagcatgaatgcaagggtggaagaaagggttaacaaggtgctcgccgacatgaatataccccgagtcacaacacctgctgtgcaaccaactcctcgtatacaacacgacgcgagtccgtcacagcataggagtagttgtgcatccacagaggtgccggcccctggtctcccgatcgcaccactagctgcagtggaccacatcgaggtaattattgttatccgatccatatctaataaaagacatttacacattccaatattaaattcaaactttcaccttatgcagggcgcagcacagtgtgtcctactagcgagagtccacccaactttcgctcctgaagtcgctgagggcatggctttcaagccctcggttacagacaaggtccacggcgcagacctgctagctgggtatgccaaggtgtccatcgatagagtaaaggacacctggtcaggctatccgctgcccgtgcccccaaatgatgaaatcatgactttgggcgatgcgcgcaagacattcatacaatggcccaaagaagacatagttgtgaagatgactcctcgtccaagtcgaccgacggagcttacacctcccaagtctaagctatcaattgaggctccccgtggaccggcattgtcagtacctcattctcccggtggagctgatatggacttggcagatatagctcaaagcttggctccaataaagaccacaagaaaggccgatagctccccaccacttgtcaagggccagaagcgtgaacgaggcaaggggaaggtcggggagttggcgccggagccaaaaaggggcaaggctgcgacgtcgatgccggtgagcaaatcggggaaggtcgtgagggcgccagcccaatttgagctaggcatgcctgcaggtcgactctagaggat

SEQ ID NO: 12620 - DNA, 750 bp, Oryza sativa
  unsure (1)..(750): unsure at all n locations
cgggtantttagttgttcactggtacagnnacncatcagaaagaggttagcagcgcagtcagcccgaacacccccgacattagctcggacatgaccgaggcagaacgcgccgttgccgacatcgaaaccatagacgactggcgcatcccactaatcaaattcatcagcagcgaggagttgcccgaggacgacacagaggccgagaaaataacccgtaaagcaaagatctactggatggtcggcaacgatctatacaagaaagcgccaaacggggtacttctcaaatgcgtctcgaccgacgacggtagacaccttctcctcgacatacatgaaggcatatgtgggtcacacgccgccggtcggacattggtcggcaaagcttttcgacaaggctttttctggccaaccgcccttaaagatgcatgcgacatggtccagcgatgtgaatcctgtcaattccacagtaaacacacaaagctacccacgcaagcgctccaaactatccctctgacttggccattctcgtgctgggggctagatatacttgggccattcccacgaggacagggcgactacagattcctattcgtggcgatcgataaattcaccaaatggatcgaagcagtacccacgggggaaatcaaggccgacaacgccatcaaatttatcaaagggatatttgcggataccgactaccataccgcatcataacttgatacggctcccagttatcaacgccgatttcaagat

SEQ ID NO: 12621 - DNA, 758 bp, Oryza sativa
  unsure (1)..(758): unsure at all n locations
cgtgttgagagcttgnttcacgngttcttagaagttatgctatgattgccccatatgacgtagatggtaaccgtattacgtacccttctcttgggggacgaaactacaactctactacccctgttaaatttacaaaactagcaaaaccacttaaagtcggggatacagaggtttttgtagaagatgttagtctatggaacggacaggcaccgcaagactaccaacgtagtattatcatgtggggttataaaaactcgttcggctatacttatcccgatggaacgtatagtcagctaatgcagatgaggacatatgatattggtgcagttgacaccacagctaacaagattacgttaaacaagccatgggcagttgcaaacccaaatagttcagatgggattttcccagtagggcatacacttagcccaacttctgacggctccacatatttgtatttgaatggtcacgtaaatatacaagtacctactacgtacaccaagtacagccatttgattagtggctcttctgagtttgctaatacaacgattatcccagtagaaacaggttttattcaacttggattcttgttgaaccgtgatacaacaggtgaaaaatcttggctaaatggtttacgtctacgtgactatacagatacgtataaactaaacgatgacgttagagaaacacaagaaaacgtagacaaagctcaacaagatgctaataaagctaaccagtcaattgctgacctatctaatgat

SEQ ID NO: 12622 - DNA, 7446 bp, Oryza sativa
  unsure (1)..(7446): unsure at all n locations
cgccgttaatgatgacagtcgntcgnacagnagcncattaaactatacaagattaaaatctccaagactggtaaaatacaattttattattttttagggcatatttggaatgttaccgtacaaatattttgtaaatgccaaaatataagcaagttttggcactaccaaatatttggtaaggtaaaattgcatttgatcatatttggtttgctgccaaaatgtaaaattgtagtgaagaatgttgtacataatctcaattctagattacgtattaccaattaataggcttccattttcgtgtgtggtgtggtagtgggaaagaagatatgaagaggttgccttcagattgtcaattatatagcgtcgttttcactgcaatatatgtgaactcaatgagatacattattcattagatgtgacaagacgatcacgcgtgggcgtgattcactttatgtcaacaggcagcgccgaaagttgatagtgataactcgagctgccgcttttcatgtgtgctgttgtggactgtgcgcgctactggatatggcactaccgtgaagcgccgaaagtgtgttgttgtgagcataagttgttcaagcaccatacgaatgaaaagaactacgtagacgagacaaacacaagtagtactgcagtagtaatagcaaaagtagtactgctttacaagtttgtaagccaaaagaaacggtcacataaggactgaagaggtagaacactactgacgaggcctcttacccctgtccctcctaccctgcgccctaatgtgcccctgggagtacgtgagtcggtccgggggtacggcacggccaacccgtcctgcctgtacaggtgtgacctctggctgctcctgagtgtgcgcctctggagctcctccaagctgagaggagcctagtacgtcctggtggtctgcaccgtgcaagtcgtcgtcgtagaactggctagtaggaccagtcctaccggcgtgagacgaagaggccccagtaccgaagatcccggctgcaaatcctgctggacaaggaccatcagtttcgtacaggtatttaacagtattaataaaaagtaaagtaccgtgtgggcgagggaacgacgctccgtgagaggaagagctggcgaacgcgcccgaagaggtggcgaacgcccctgcggagctcgcggaagcgccggtcgtgcctgcgaacgcgctcgaaggcatacgaggtcctgcgatgaggaaacgtgcagttaaaacatggtgacacattcgtgcaaaagctgaaacaaaaatgaactaatatctgggctgaactgtaccgtgcgaaaccggtgctgtaggtcgcactgctccgaagctaggggcgctcgaagacaaacgaggtcctgctccgacggtaggaccgcgaggccgtgggtgtaccggaccagctggaggtacgacgtccacggcgctgcgacaggagaagacgcgcatgaccgcacgcatcttctcttgcatccggtcgaaggtcgacctctgctcaacgtcagtcaagtgcaaacctctgctcaacctcacctggactgcggtgatatcggcactgatatcccgtgccgcatcagcctatgcaagatggaaataaaaaattcagtagttgtcctatattatgcaagataaatgacataattgttggaagtaatacaaattggacgtaccgccacgaagtagtctcggtcacggtgcgtgggatacgcgtccgtgacagcggcaacgtgcggctctggggcgtctggagtgaaggtcacacgcgcacgagtgcgaggaaggtaccagcgaaggtagtcacggtagttctcctccgtgtgtgggaagagctcgttgatcacctcctctgtagctaacacccagtcgtcaacgtactgctgtacacgtggagcccaaagtgcgcctgctagctgtccccgtcgagtcaacctgtgaagagaggtaaattgtatggctcgatgatgtaattatcataaaaatttagaaatgaacaatccgaactcacgagtggtcggcaggggggacggtcggctgcacgttgcccggaaacacctgcctaagtccgaactgtcgcatcacacgctgcgggcagtgaggctcaacgaaaatgtcgaacaccatcggcaggatggtgagccagtaagcctggtcgcgtgtgcacaaggacgaaagtcctagcggtgctctcgcagcgacggcctcttctgtgtacggctcccagatgacgtcgctcggctggagacggtcaaactcgaacacgaagtccgggtaaccacgtctcacctggacgtgagcgtaacgacgctgcaataaacatgatcggtcttagacatgttatgtgaaggaaaaaaaaagaagaggactgataaacttataacgcagcgaagttgcactaaccccacgtcgacaccagtaagtccccatcgtgggaccgtcctctggccactgcgcgctgcgaccaaccccgtagggtgcgctgtccaccactggtcgccctatggcaaacctctcggctgcccaaagctgaagcaacataggacagccagcgatgatcgctcccgcgtcagtcttcgtgcacgcctcacagagggcacggtacgtggctgctagcacggcagaaccccagctccactgcggcacgtcctgtggctgagcatccgcgatggaccgtgcgtagtggaccagccggaagtccacagcgtgcccgtgggtgctagtgaacatcacccacccgaacaaccacaacaggtacgcctcaagggagcgtcggaccgagtaatcatcagcgtcagggtgcagaaggtccgcctacagttaagaatgaaatgttagtaaaaaacactcatccggtcgcaaataagcatgtatgataataacaacttatttacttacagtgaactggagcaaccaagccttgctaggcccgactgtagagtacggaggaagggtggtggtcggtcctaggtgtggaaggcgcatcacctgctcgaagcgcgcagtgatatcctccttccacccaaaaacaccgtcgacgggaccaactggtgctcccgccagcggtagcccgagcaggtacgacacgtcctgcagtgtcggagccatctccccacagggaaggtggaacgtgtgcgtctcaggtctccagcggtctacaagagcggcaaggagtgaccggtctgcatcccaccgcttcgctgggtcacggtcgtccgccgccgcctcaacaagcctacaaagtggtagaaggcctgccgcacgcaacctgtatagagcaaacttcaaacataagtgcaaaacaaagcaaagttgagttcaaatgtgaacatacgcgtaccaaggaacgtgacgggggtcgacacgcaaccactcgcgcgacgtgcgtggacggaaggtgccgagctgtgcaccctcgactgctgacaggaacgagcggtggttcctgtcaatcccacggttcaacagcgccggtgtgtcgtacgccatacctgcatcaaataggttgatcagaaacatataaataattagttcaacataagtaataaatgttcataagcgaattactaacacatattaaacaagagtacaaacaaacaaaagtgtttagtccgaacactcatcacgataacattacgatacaacaccgaatagttcgcaatactactagtacaacaatagtcggaggtactcattacaacaagattgaattgaaattacacgatagaagtatttagtccgaacactcattacatcattttatttcctaaatcgaaagcattgttacaccatggaatcgcctgctgcgcgacgacgccttggccttgcgcgcctgcttgttgttccttcaccaggtggtcgcctaccatcacttgcctgtccagatggactagcatcagcgccgcttggaacttctgcattcttcgggcatttcttgtaagtatggccgcgcagatcacacttgctgcagcgtaaagtcctcccacctgcttctgactcatccatatcatttctgatgcgtctagtttggcgtcgaccctttttcacccttaacttagatggatctggaatataaaaaacttgggcactcagcgttgtgtaagatcctgagatcccgaacccatatatctcctcactccatgtatgaaagattgcttctttcctgaaataatttgagacgtacacattgggagatatgccacaatcaccggcagcagcaagaacgtgtgagcaaggaaggtgatgaagcttcggcttcatacaactgcaggtacatccaccatccgccttcaagacacattcctgcacggcttgcttgcgatagataccacgcctgctcctatcaacacacattatttcataccgatgaacttgtgtgccttgagcaacaactctatgtctccgtgcctttttgattttatcttccatgtactttgtcactacgttgccaaacactatgttgttatcggccatggatggaccaattttcttgtatcgatccctaaagtaggcttgcgtgccgtgaaggatgaattcaacaatagcaaccaatggaagtacccgaactcctcgcattacccagttgtacacctctgccaaattggttgtcattatgccataccgagatccatcggtgtcgaacaatagagcccacttctccttaggctcattctcaatccactgagagaaatttctgatggccgaccctgacctccttctcattgttggtgggtcatcatgtaatgcaccaagaggtatgggaggctcgtcaccttcaacttgtggtctgcgagattgctcatctgtttgcttcgttgtcaactcatccaacttgtcccacaactcattaaatttcttctcttggttctgtgcacagagcctcttaaagagatccataagatgcttgttcttgaattgcttgtagaaatttgcacccatgtgacgcatgcaccaccgactccgaacatcaggccacttagctggaagtcccttctcatcccaaccgttctgcaagtagtcaatagcccgcaacatacccgcatgacgatcatgtataaggcaaacgttgggcctcatacgcaccactgcaatgtgcactctctctaggaaccagtaccagctttcagtgttctcactctctacaaatgcgaaagccataggtagaacctggttgttcccatcacacccaattgctgtcaatatctgacctcggtatttacctgtcataaaagttccatctatgcatagaacaggtcgacaatgcacaaaagcattgatgcaagcacccaatgagaaaaaggctctttgcagcacactctttgttcgatcttcaaccgatgtaaatgtatgtaggtcatagtaagtattattattcctctgggcaatggtggctaacaaacgaggcaaattatcataagaagcttcaaatgtgccatacctcatctcaatgatcttttgtttggctctccaggcctttgcatagcttatggtgtacttgaatttgttctcgatgtgcctaataattgattttggttcaaagccaatgttaccaacaacactgctgtacatctcacttgccacaaaagctgaagtgatgtttcggtgatacttctccaccccttgtaagtagcacttgtgctcggtcacaatgctaactttccaataatcattccatttacccttatatgcatggacacgccacggacattcttccttcatgcacctcacttcatacacataatttgttgacttgaccaccctaaactctctctgcaatgaaactgcccaatgcttcaccgcctccttcatctcatccttatgagcataccttgcaccctcaattacctcgttctccttatactcccagggtacatgatcaccctctgatataacaagaccagagaagtcctcatttgcccaatcagtggccattacatcaccttcctcatcggatgatgcgtcgtcctccgcttgctcattatccgaatcttccctctccatttcatcaacaattataccgactctctccccctcatccgccatgcccatggcctgctcctcccttggttgattttcctcattttgcatcgatggtccaacaacatcccctgcattgctaggaccctccacatcttcggtttgcattgaaacatttgtatctttctcttgtaccgacacaaatataacgaggggccatgaccgttcaaaagccatttccacataccgtctccaagcagcagtgctgtccatcggcattagttcccaaaaataaccttctattgcacgactcactacaacagatactgacattgtgtagacttcttggtctattctaaatcctctcaacaaccaactataaattgactcaaatgttctctccgcaggcctatcgatgcccttagatgtcattacaaaatctgacagatcaacaccatctggaccaaatctaatatttccttcaccgtgaactatctgaaatgtgaccttacttgacattgtgcctgatgaaaacaataactgcgttaacctcgcatttctgtactacgccctaagttacattctctacaatattgttctctaaatttctaaaagtaggttacattctccagatcaaactaaactacatcttacaattaacactactgtctatgtctcaattcatactattatattctatgctctggatctacacatatgtgctgtgtgctacagatctgctaaaatatatggaactaaaactaaaacgcaacatatgtactcaaacgtaatatattagtacaaatgcaaaagatgtatgggagcatacctgtgatgaagtgagcgaaccagcagggcttcgccgctccccttctgctgccctcccctctctctctctttcgttttttggatttttagtgaatataatgaaatttcacaggggaggggctgggctttataggggggaggcaaaaatcgccctcccccagggcggcaagggggccgcctgcaaaattccatgccccctcgccgcccatttgcaggcggccccccgcacagtgcaaaatcgccctagcggagggcggcaagggggcctccctgcataattccatgccccccacttccgcccatttgcaattggccccctttgctgcataccgcttgacattctttttaccgattgggggcctctatcgaattcagcggtgatggttatctagcgtattatcctctaataatttgtgcctactataaagtgtcttactggtctgtacagagcctacgcgcgcatatatctctatacttcggttacattaccgctcatctcgtctttagtcgctttaagattcataaccaccgttcaattgctccttaaatcgctttttaaactcttttatggggacggataaagtggcctaacacgctcactataactccctactaaatcttgattataaaactcg

SEQ ID NO: 12623 - DNA, 23139 bp, Oryza sativa
  unsure (1)..(23139): unsure at all n locations
gttgtgcncgggtgattctgctcgtctgcaagcagctcatcatcctacctcatgcccgcgacccaaaaaaaaaaaaaacccatttcttcccgaacccgaacccgcacccgcctcgctcgcacgctgcctcctcctcgtcgtcctcctcctcctcgctgctccgcaagtccgcatcgcctcccccctcgatcccatctcggatcgccgccgccgcagcagcagccgggtggggctgcgcttggcgggagggaggggagggtataggataggggagatgggcggnnccnnnntnggnngcggcgcgggggcggcgggggccgtggcggcggcggcgggtgacggggctgtcccggtggtgctgaatgtgtacgacctcacgccgctcaacaactacctccactggtgcggcctcgggatcttccactccgccgtcgagggtgagcctctgcctgatcctgacccagaccaagctccaaccgtaaatctccccccagtttatttttattattttaccatttcgcatgatttctgatgggattccagctttagtttatgatgtaaaggtgagttccttttagcgttaagggtatctactactagatcttggtttgttttctaggcagtttgctacgcgaatctgatagtggcgggatgatttggccgagctgacagatttatcgcgctagtaggttagatgccgtgctggaaacatggtggaacgggattcataaaaaaatgtttgggggtgaaaggcaacaaacagtttgaattgcggaacgcataccggtaattttgttcatcatttctgatttgtgtaccagttatgtgagcccagctgcaaagtaaagccattggtttaacattgggaccaagcattgctatggttgcttgtgaagatggcatcaaatatctttccggttttctttctgacgaggcttttcttaattcatttgggaaagattagattccttatcagtgcgttttcactttcctttagaactggttttgtttctggtactgatcaaattatacggttatatgacacatttgaaaagtatctgtgggggttgtatagtggaacaaaacatttgcttaaacttttgttttaacgggctctactgagttttcaaaacataggtttgtaatttgtgaattattatgataaatcaaatcgaaatgagtacttttagagaaatgaaattgagttggatgtgttgcacattgatatacttgataaacaatgttacagtattaccttctcttgatacaatgacatgtgcgttctgattctaaatgtaaggttctcccagaaagagctttagcaatttagtttttggattgtttcgtgctattgaatttctctcgcaactatgggacactaaagaactagtagaagaaaagtatcacattgggtgtgtatgtatttattgttggtacagccgcacacattacctttgccattgtgaagccgttgcactagaatcctgtcctgtgatgtatatctcatattcgtctcatagtgtattagtgtttatgttttggttggttcaagtattagaaggctctataggatatacatgttgttttagcaaggttagatgttctcatattcgtctcatagtgtattcgtgtttatgttttggttgcaagtattagaaggctctataggatatacatgctgttttagcaaggttagatgttcaacttcctgtcaattttctttctgtaggaagcttttacacaaaatgagtactatgtgtctgtgacttggcttctcttccttattcatcgtgttcaaaactagaagtgtagatttagtagtattattactgtgatgtgtgatcacctttccaccccaatgtatgttctgtacactttagctaattgttttcatgcttctatgatgatgatgtaaacttctctaagtgttttaatgtattgtgtggacttaaaaacaatttaattctctatgtgaatgatggttttccatgtcctgcattttttaatgatttatctccttgactaattctatgttgaacagtccatggatcggagtacagttttggagctcatgatcacccaacgagtggggtttttgaggtggaaccaaagtgctgcccagggttcatgtacagatgttcaattttcataggccgtacgagtttgaatcccttagaatttcgagatttcattcagagaatggcttcagaataccatggagatacttatcacctcatttccaaaaactgtaaccactttacggatgatctcagtaccagattgacaggaaaaccgattcctggctgggttaaccgacctgcgaagctaggtaataaaacttgtgctccttttacatcattatattttgatttttctaatactttattactaagcagtacatcacactggcactttggcatattaccttgtcaaaaaagataagattgcaacaaactatgtccattatgtgggacagtttttcaaagcaagatgaaacaaatattcgacttgtagtatctggagttttgaacttccagcctattttcctgactagtcaggattctggacaagttataataaaaggtagcgaacattaaggcttgggggaaaggtcatagagtggtggattatgcagtattgttttacacaattcagaaatctggatccaaatccttaggatttttttaattaaatatgtcccgaaaagttataaagcaatcccctctcccacacacctttgttcagacatgggcgaaaacaatatcaattgagaatgagatgttgatttatgtccagggagtatcatctgctgacatgaacaagaagggaaatgtctgaacagactacagagtattgagtattcacagaaatgatgatgagatcatagatgataaaatcatagagatagtaatatgtggcaatataaatgaggattactgaatgatccaaattaggagtatgttggatctcctcataggtgtcaactaaaatgttaatgacataatttaatattaataattttatatcaaacttgatatacatgagtacatggaagtttaataaagttaattatttctctgttagttgtttaatatattgggcccatcattttgaaatccgtcatagaattagaaaatgccatctaccgttctccaccagatggagaaaatagcttagcttctgctggcaataagctctgtatcagcaggtcaggttccaacaaacaacataggtctttcaaaaataggaaagtctgtttggatgaggaggattagattgcagtttagcttctcattgtctgcttgttagcttatcagccacagccaaagtttgaaattttgaaacataaatttagtagctttttaatcgtagtctattttccagtattatcctttaaatcgcaaacaactcaaatatacaagtgttacccataaattagtttcggttgttttgttcatttttctacggcttgttagacatagctcaaacaatcggagcatcatgacatatgtttctatattggaattatgtgagagtaatatggtgtttcagtttaaatatatcaatcaataaattttaagtagtccggtaagttggcagggcagaatttgttccaactgtttcttgcccctgtattgcatgtgagcctgagagagaaattgatccaagatgcacgttactgtgtttgccttgagctgtccactcttgacccaacttcaagccatttactcagaaagaaactcatatatcaacatccaattattcaaagctgctaaaatgccaaaatatgtacatttcctgctcccaattctgttctgaattgttctgttgcaaagatgacaattcatagtcaccctttctttagcatgtatgataatccaaattatttcaggtgccttttgcaactgccttctgccagaaagcatgcggttggagtcaactgggacaaagcacctcgcggactgtcatttctcaggtagatactgttgtttgtcctgtcataagctcactagctgctacgttagctgatcatgctatttcaatctcatgtttgtgtgtggtttgtggtaatgttgcatttttttcctttagatgattcccgcacatccagcaatgagcattttgaagatgaagatcttgaagacaagcacctgctttcacaatcttctgtttctgaagatgcaattgtaaaggaagttcacaggtgacaaactgctgaggctatacagaataatttggtgtgtagtttgtcattcattttgtacattgtaattctgtattccaaaatttagtgcgctctttgtattctaagttgatattcatattattgtggccggtttattgtcatgattaattttgttcattccatttgtacaaacactgtaataccctacctactgaggctccttataggtagtctggaagtcactctgcatgtgtactcttaagtcttaaattcgtttcttgtaaaaatgtgagttcaaagagcgagttgatcccgatgactgcgacgtattgtcagtgaactgtgcatagaatttgttcatgtccattgatttttatggttgctgttttgaattaattaattaagtcgactattgacccattgtaatagaaattttccagttgccacctgaaaatgatacaaaggagcagtaacaggggtagttggcctaccatatccatggctgtttgttttggatatactctcataatttatccattgtgaatgatgacagtaatagcagattagcaagtcatcctttaaactcttagttgcaaagttgggtaactttggtcagatgtatgtgttgaaagacgccagtgattcagtgtctaccagtttctggtcggtttcgtttatcgttaagaatgttaacccttcatttcaagttaatgttctgatcgttctgaatctaggaaggctccaacatcaaccctgaagattgtactaccaaacttttaccttttacctggtcaattcagtttaacctctcagctgaacagagtataagatctagaagtagttgagagttgctccatgtggtggccaaattgctaactgaatggtctcaggagggttgcatctgctcacctataacaagcagattgctctgcacttaatatatgtcaactctgtcagacccatataactaaatactatatcgttttaggttataagactttctagcattgctcatattcatatagactagaaagtcttataacctgaaacggagatagtacatggtatgcatgtcagactgtcaaatactcaaatgcattatctggacatttcggatgtaataacgacgtttgcccatttacttaattttatgtatgcttttcatgtgtgaaacaatttggagaaatcctcaccagggcatccaaatcgtttcagtttagctgaaacatcagataaggcaagttgttgcccagtactaggaacttatgggcagacaggttttagtggatccacgttttgcatggatatgttatgttccaacaatgttcaggttcgattgccttttttcattgctagggttcaaaagcaaaatcatcatgctttcaaaaggaagacttcaactattttcatacttactggaaagaaatagataaaatgcctgcaaatcaaattgcggtagatgaactcagcacacagtaagatgttttttttttctgttcgtcctgtttgttcgatttttcttttgtgatgtatttattctttagaactttggcagggagccttgctttggtgctcgtctatgtgtcgtgttttattatttctatgagatgaaacatttttttttttgctttctagttctagaaaaaaggttatatatcattgcaaacatgctgtaaaacttacccacttacaatttaaatatatactttatatatggtcaatgcaaacgattaattaattgtcaaatttcacattaatttacacaaataatgggagatgcaccggtcagcaaaccattcaatgtatgaaaaaaaaatggtggcagaatagtttgaagtacctgttctcccaaaatataagagattgatatgtgatataattctttgttgggggcatttcatcgcccttcaattaggttcacattgctgttcatccgtaactaattctcatgctcaagtggtgccttactgccgtttgaaaatgagcttgtcgaagatggggtactacaacaaaaacctcatgttcattgtagaggtgattttcattaggagctttatagtctacactctacaaagacgcttgaagaataatctaaatctagatggtttttgggcactctaattcacctaaggcatccacaatgtatgaaaaaggtgatcaacagagcatacggtctacctcaacactgtgaaagtggttcatatgtcagtccttataacgagctacctatgtacccctccgttccaaaaaaaaaaagaccaatcctacctacgaacaagacacatgtgtccaggaattcgttttttttttgaacggagtagtatataagaactagctttaaggaaaaaataacaataatttctctctcttctcccctctcctcacttgcaaagctactaattgagtgggaccagtgggactcaggctatatatattggggtaactacatcatctaatggtaaggcccaccttatgacctaagggtatacattaaagatgaccttaatgtgtatatgtatttttcttaggatagtcttaccaatttggaagcatctgcaggagggaggttaatttgtttttaagtagctaaacaactagtacaaataatgttagatttatacaaataattagtggaacgaagttgaggttattagcacatttaagataagttaaacttccatgattgctctagaattcaatgattgactatagcaaaggcatacatttttcagtacgatttgtggtagtagcacaatttatgctgctataataatgtctctagctactatgtaggaagtaaaaacaatacctctaaaaatgctgtaaaaatgtatatacatatatatataatcgggtcactttgatttggtgcatacttactattgtgttatacactttcttttcttatgagaggtgatgtttgtaaagcttttgtgcatttttcaaaaaggttaatataccccatgatggacatgcatgcttataaaactattttaaatgcccctgccctccaatgagtcaaagatatgtttttaaatgcattggcaccactaataggtgtcccaatgagaaagagagatataacacacatttatacaataaatggagagatgcactagttgtgaaaacattcaatgaatgtcacaattaattaatgtttgagaaataatttagtgagaaggtacctacagcataccctccattccaaaaagagtctaaaaagaatcaactggattcatctccggaagttgatcttttctatgatggagagagtatatattatcacgaaatattgcgtattgatcttggatttaaaagtcgtattccaaccatattgtaaacctggtcctcccaattccaaaactctggtgctgattccccctattaatcatttctggtgtgtgggacatttcccacacctttttcattgctacatctcaatcgctgttcgtccttctccttcttcagtggtgccttacctccactttcaaatgagctcaccgttaattgaggatatctctactctaccatctctatttctcgatcgatggaataacatcttaggtatatatggtctaaccgccttcacatgacccaaccaggatgattaattagtttttgagttctaaatttcaatgtcttttgtagatgatctatcaaagtaatttgtttggtgatacagagcatcgatttgaggtggccatatagcataacaatccaaatcattattttgtcaagaaacaaaatcaaaacataattcttgtaggtatattttgatttttgagggcctagtttcaattctttggtaacttatatgcactaaattcccaatgcacagctttatttgccttttgtacattttgctttcttctttcctagcttatccctagaacacgccacgagaagtcgaataattgttcgacatggctatttctttgcctgctgctatatgtgaattaatgcatgaccatcccacatattcctttaaatatagaaaaaaattattactccatattggtattattagatataaatcatttttttactaaagttaggaccatcataatttttagtaattaatatttatactgttctatacaatgctacttgtaaatataacaaagaaaatttacatccacatgccaaatatggtttagaaaaccatttggtgaccctatttttggttttctctatggccctaataagaaatatccaaaattgagttatctcgttttgattattttaccatgcttttaagaataattatgtatgatttaaaataaaaatagctcatgcaccaccccatggtccatgacgcttagaggtgagtcgggacatggttcgttgtgtgaagaggcagccgcctcttgcactctctattgtgcttgtgcttgagcctgcgcaatgcttgtgactaatgttgctccccatgtgtgtcacagagtccactggttggagcacgtgtttagtatttataacttaatagaaaggaaaccttggtatttcatatagacatatttcctttcaaaaattttaatttttttaagagaatgtgacacaacaataaaatataaaatattatggattcatattgtactgaagtgtactggtgaaacttttataatttgtagaaaagtaaactaaaactggtatatcttttaatgatataaaattgatctccatatttcttgtagttatgtgctgatagtagatagaagaaataaaaagttctttttagaggcttgtcgtttactatgtaaactttatttcaatccctagaataacactaaactttgtttcacgttcattgatgaaactaggaggccgcctggagtcaacagtggtggatctgccattgtgcgctactagtggaatcgttgcatatctttgaattaaattaatacatcaaaattgatgctaatttttgtcgttgcttgtagtatacaagtaaaagagaatgaggaaccagaacatatgacgatcttttttgcttcttctattcatcagagtaatactagtatgaagtgcccaaataatgcacgagtttttaaattatgttttctacgcttttcaatacacatcatcaaactttaccatgattgggcaaatgtaattttatttcttggttttaaaactactaaaatttaacggaactactatatagcacggagtgtttagcgcaagtagcgcttctcacagcggcccacccatcctgctcgctttccctcctaatgtaaaatatttactcttccccttacccacccgagcattggttctattgctagtctctccatccatccctgtccttacccactctatctcaaaataatacatagaaaatatcttgcaaatccggaactggggaaggggacatgatgggtccctctcctcccgatgtaagaaaattaccctcattccttatttcgtaaaaagaattatctggtaactttggaaagggcatttacctttcatctttctagtgtaaaaagttcatcttgtaacttttggaaggggtgagagtaatttctttacattgagacggagtagagggaaggtgagtccaaggatatatggaggggtgtttccaaccaactagtgggggagagaacaggaacagagaggatgaaggggaggatagggaagcaatcaatgttagcataaaggtgagaatatttttttttttacataaggggaagagttggacaggacaaagaacggggaggggagaaggacagttgggcgtctgtgaggcacgctagttgttaagtagtgcgtgttacgctgtttagcgctaccgagttcaataccttttttctatttttctttttggacaatatactagtaagaatgcgtgaatagtgcatgggtttttaaattatgtttccaacgcttttcaatacttatattattctattttactaaaattttgataaatgtaatttttttcttgttttcaaaactccagtacgaaattgggttgttttttaggagttaagctttgcatatgtcaattgataataaataaccagaactaagtaaggagttacagtagtagttactacgttgtgtggcggttttataatatgtgacgcgtaaataatagatacaacggctaaatttttcaatgcaatttttgtgtgttttttttaaattctagagtcgagtaaataaaaacctgagtatgtggaaaattaaagcagaaaatttcggttgaaacactacgctagttctacgatatgtgttgaacacacatcctaaaatagcaaacatttttttaggagttaagctttgcatatgccaattgataatgaataaccaaaactaaataagaagttaatagttactacgttgtgtggcggttttataatatgtggtgcgtaaataatagatacaacggctgattttttcgatgcaatttttgtgttttttttttggaaacactacgctagttctacaatatgtgttgaacacacatcctaaaaatagcaaacaaaatacaacacatatttcaacagtactagagtatcaactggattaattttgcctttactagagagtcaacaagcgagagagagagagaccgagcagtatgcagcagcatggtttgcaattccggttcaaaatatccgatcatccctgggcacacaactattttttttccaaacaaatgtccttttcttttcaatttttgttagtttagtataacatctattcaaactaaatttgctcaaattatccattttacccaaaatagtaaaaaattcaaacccaggagcagcagctagcataggtgtagacatgtctgtgtgtccctttctctctcaagggataggtggagctaagctagctagatagatagatagagagagagagaggggggaaggctagattggatttggtgaaccttttctcgtagcaacgcacgggtactttgctagttatagatataaatacttttttttactaaatttaggaccattatatttttttattaattataatatttatagtgttctatacaatattacttgtaaatataaccaagcaaatttacatccacatgccaattagctagggtttagaaaaccatttggtcaactatttttggtgatctctatggtcctaataagaaaaaaaatatcaaaaagtgagttatctcgttttgattattttaccatgcttttaaaaacaattatgtatgatttcaaataaaaatggctcatgcaccaccccatggtccatcgcgcttagaggtgagtcgggacagggttcgttatgtgtaagcactgccttgcctcttgcatttgcttgtgcttgagcctgcgcaatgcttgtgactaatgttgctccccatgtgtgtcacggagtatacaggttgggcacgtgtttagtacttacgacttaatagaagggaaaccttggtatttcatatagacatatttcctttgaaaaataaaaaaaattgttaagagaatgtgacacaacagtaaaatacaaaatattgtggattcaattgtattgaagtgtactggtgaaacttttataatttgtataaaagtaaactaaagttggtatatattttaatgatattaaattgattttcatatttcttctagttatgtgttgatagtagatagtagaaataaaaagtttttttagagattttcgtttactatgtaaactttatttttaatccctaaaataacactaaactttgttgcacgttcattgatgagcctaggaggccgcctggagttgacagtggtggatccgccactgtgcgctactagtggaatcattgcatatatttgatttaaattagtacatcaaaattgatgctattttttttgtcattgcttatagtgtacaagtaaaagagaatgaggaaccggaacattgcttcttctattcattagagtaatactaatatgaagtgcccaaatagtgcacgactttttaaattatattttctacgcttttcaatacacatcttcaaattttaccatgattgggcaaatataatttttttcgtggttttaaaactattaaaatttaacagaactactatatagcaccgagtgtttagcgcaagtagtgctcctcacagcacccacccatcctgctcaccttccctcctaatgtaaaatatttactctttcctttacccacccgaacattggttctattgctaggctctccatccgtcccctctccttacccactctatctcctaatgtaaaataatacagaaaatatcttgcattctagaactggggaaggggacatgccggatccctctcctcccgatgtaagaaaattaccctcattccttattgtgtaaaaaatatttagtaactttggaaggggttttacctttcatctttctggtgtaaaaaatttatctggtaactttggaagggctgagagtaatttgtttacattgagacgaaatagggaagggacggggaggccaaggatatatatggaggggagtttccaaccaacgagtgggggagagaacaggagcaaagaggatggaggggaggatagggacgaaatgaacgtttgcgtaaaggtgactgagagtaattcttttatataaggggagagtcggagaggacgaagaacagggagagaaggactgttgggcgactgtgaggcacgctagttgttaagtagtgcgtgtcatgctgtttagcggtactgagtttaatacttttttttgtttttctttttggacaatatactagtaagaacgcgtgaattgtgcaggggtttttaaattatgtttccaacgcttttcaatacttatattattctgttttactgtgatttacaaatgtaatttttttcttggtttcaaaactcgtccaaaattgggttgttttttggagttatgcattgcatatgccaattaataatgaataaccagaaagtaaggagttagaagttactacactatgtggcggttttttaatatgtgacgcaaaaataatagatacaatggctgaatttttcgattcaatttttgtgtttttttctgtaaattctaagtctagcaaataaaaacctgaatttgtggtaaattaaagcaggaaattttgattgaaacactatgctagttctacaatatgtgttgaatacacatcctaaaaatagcaaacaaaatgcaacacatatttcaacattactatagtatcaactggattaattttgcatttactagagagtcagcaagagatagagagagatagagagagagagaccgagcaatatgtagcagtagggtttgcaattcctgttcaaaatttccgatctaccccctaggcacacaactatttcttccaaaaaaatgtcttttttcttttcaattttggttagtttagtaaaataaattcaaactcggtcaaaatttgttcaaatttatcccttcttttcccaaaatagtaaaaaattaaaacccaggagcagcagcagctagcataggtgtagacatgtctgtgtgtccctttctctctcaagggataggtggagctaagctagagagagagagagaggggaaggctagatagagggacagctcggtctggcgtatgtccaaaggtgtttcgtgtgtgcctggagaaccttttcctttctatctcttcccttccttcagttaaagccatatcaaacacatggaattccggtctccaaatctttattaattgcttcctcaaaaccccctcttgccccctctctctcttccctttcctctctcctcttcctcttcttcttctacctccctctccctccccatgtgagtgatcctgctacatgttacatgtgatcatgcacaggtaggtgagctctagcccctgatcaaggaggtgcaagcttctactgccatcttttcggcgagaaggagatcgaggaagaagatcagaagctcaggtagccgccatggatggtgtggtagcagaagatcaagcaggcggcagcggcagcggtcaccgccgcctcatcggatcgaggatcgaggagcaccgcaagtacatgtcggaggagagctgctgcccgaggtgcggccacaagatcgaccggaagctggtacgcgtgtgtgtatcacactttgttaattaaccatgtttaattaatagtttgctatatatgtgtgttgtttgtgtgtctgaattctgaattttgttggagttgttgatgcctgaatttttcgtgtgtctgtgaaggactgggtggggctaccggccggtgtgaagttcgatccgacggatcaggagctgattgagcatctcgaggcgaaagtccggcccggcggcgaggcggcggcacacccgctcatcgacgagttcatacccaccattgaaggggaggatggaatctgctacacccaccctgagaaattgccaggttaatatgtgcaattgattaatcaagttcagttcttcaaaaggatgtttaattgttgttgttgttttttttttgtgttttggaggtttgcactttctgtttcttttacttgcttcagttttttccaccatttctttcttcggtttctttttccctttctgtttcggttcatatcttctcctctccttgtatctcgcatttctagaattgttttaaatgatacttgatagctaagcatgcatactccccacacacaccaaaaaaaagagagagaataaatggcatcaatggtagatttaatttgcaagtgtgtaatgcactgtaggaatctagcttgtgcaagaagggaaacagtggtacaccaaatcttccagtacatgtactgcatgtatagctagtcaatcaatgtgttgttgttgtggcagcacatctcacacaccctctaaaaatttgaaaaacaccatctctctctctctctctatctatctctagaagagagaatgaaatgtgacatgagatctttcccagcccctgcacatcttccaaagttaggttttgtcctcctcccaaggttgttatatcctccaaacagccaatggcttaattgaccattgcatcatcactcaaatccttttttcccttttcttttcttttctttttctttttttttcaaaagagaaacagacagtagctagctagctagctaaccagacatggaaaaaaatggcgggcacttgctgacgtgtgcttccatccatgcaggtgtcagcaaggacggcctgagcaggcacttcttccaccgcccatccaaggcctacaccaccggcacccgcaagcgccgcaagatccagccgccggcggccgccgcctcgtcgggcggcggcggtggcaacgcgtcgtcgtcgtcgtcggcgtcggcggctgcggcggtggcgcgccatggccatcagcagcagcagcagcagcagaggagcgagacgcggtggcacaagaccgggaagacgcgggcggtggtgggcggcgggcgtcagcgcgggtgcaagaagatcctggtgctctacaccaacttcgggaagcaccgcaagccggagaagaccaactgggtgatgcaccagtaccacctcggcgaggccgaggaggagcgcgacggcgagctcgtcgtctccaagatcttctaccagacgcagcccaggcagtgcgccgccgctgacgccgccgccaccgcctccgcctcggctgtagataggaggacaacgtcgttgagggaccgtgcggcggcggctgccgccgcagctgcagcggcggcgccaatggcttccgctaacgtcagcgtggccgcgttccacggcggcgccgccggcattgatgaattcagcttcgcgcagttcaggagtagcttcgaggaggtgagtgatcgatcattcccttgttaattagagatttagagtttagcagttgctaatttggggattttgatgattccttacacagtaaaagtaatactccctctgtcctctcggaataaaatttatttcttaggatgaatctagacaaatgcagtgctggttcagattcatctccaaaagttatttctttttaggactgcctacttaccttttgacgcttgcatactatagggtttaaaatatcgatcgaacagcttaaaagacgaaggggggatttcggtaaatatcttgaaggagtaattaagatagaacttatgaaaatgaaatgaaatttgtaagagataaactaaagtgaaattaaattaattcatcaaaacacatgaaattataatgaaacatgtagaaaatactgaattcgcttatgattgcatttaaattcagcattttataccaaatcagttcaagccattagtgaatgggacaagatttatagtaaccgccgagatctttcccctttatttctagaccattggatgttcaacctctaactacagtcgagattaagttgatgaagaaacataaatatgaaagtatctaagaggaaaataacatacatgaacacacgaacctctgtatatatatctcgcaataaatttttcgatatatgtaccatgaaatataataatttcacatatatttgtcctagactgtgaatattggtcagatggtgggactattttgtcgttttgtatatattgactttttacatatggggacaattgagaaatcgaattcgcatatatttctattagttattggaccactataaataatgcaattaatgttttctttcattgtatgtaggttgcttgtagaagaaggtttcctttttcttggtcagtgaaatgtaggtaggaataggatgagatgtttttgtttgggagggtacagtcattgggatgacaaggctaattttctgtgcgcgtccggatcaatctgaccttacaatatggtaggatgagaaaagatttcttcaggtgaacagtacttgcttagctctgagatcttacctaaattgatagatgtatctgacctatatgcagaattgaagtaagacatggtcttgtcatacaattaaatatcagttgaaattaggaacaaaatcactaacataaacaggactagggacacatatagactttcaggaacgatcttgaatctggtagttatatgtacctggtagacaatctgaatagcatcaatgctgtacttaattgggacatatatatatacatagtagtataatacaataaattttgtgcacacagcaagcaaccctaattaattgcatgatctgcatatactactcacccatgtaagcgtgctatgatgaatctaacagcaaaaactaatgaacaaagagaaaacctctaggttatcaattaatttacttcgctttccaaattggctcaccttcccctatctaccaaaaaaaaaactgacagatataataaattaattaatccatcagaatttcaggtgtgatgatggtcgtgcagcacaaacctaattaatttatatatccaagtatatataactgattaattcctacatgtatttacttactatatatttgcaagtaattaatttacatgttgaattaataaattattaatctaaactacacaggcgggaatgggagcgtcgtcgtcggatcaccaaagtgctatggttgatcagcggcggcggcagcagcagcacgacgacgacgagcacgaccaccggcgcggcggcggcggccaccactacgtcgggcagcagcagagcgtcgcggcgacgttccacgtcgtcagctcgccggcggaccccatagccaggctgatgtcgccggcggcggctcaccagggcaccgtcatgctccggcagncggagccgccgtatatttaccatcaccaggtacacgatcgtagtagctcgctaaaaataacgacgttttggacttttcaaatacaaatttgactaataatttaattctctttggttatacatttgaaaaggttatacaagtgtgatatatattgcgaaagaatttgttatgataaacttagctagctatataatttttatatgcttaagacgagtgactttagcgtggtgtctactggtaatattctaaatcttacaacataattcttgtgatcattgggacgtagtaatagattcgaaattagcacgtactacacttcttttggcattgtagcccttgtattaagccacgtacgtcatgatatatatccgtatacttctattaattattaattagtattgtgtatatatagtaattgactgtcaattagtcctattaattaattgtttggtctgatttgcgagaaaatgatcagcaggaggatgaacggccacaccaaccgcgaaagtttgatgggaggtcgacctctggttctggactggaggaggtgatcatgggctgcacctcacggaggtccaaaggaggggtacgtaaccatatatttcacgtatatatacatatctctctctcacacacagactgcagatacatactctgattttatatgctttacatccatctcatgtacggttgcacatccaacaacttgtttgatcgtagctagtggcattcacgtttaacacggtgcttagatttatctgatatagttagctactccctccatcccaaaacacaataactatatatgtatctggatagagatttatctagatagatacatatatagctaaaatatgttttattttggaatggtggtagtattactacagctatttaagaatgtatatatagttgtgttctaattttaggaataagcacaagaaaagtataaaatgtattttttctaataataataataataataataataataatatcatttctagctatgtgtacgtgttgtacatgagtggagttttctttttattaatatacaaagggtgattttacggtccttgagttagtatggagtatccacattatttgttactccccccgggctgataatacttgtcgttttagacaagggtaaggtcaaactttataatctttgattataaatcatttttaaaatatttgtcttttaaatatggtgactacatgtatagattagtcttaaaaagtactttaataaaatcatatattgttaacacttttatacatattacaacggaaaataatggtcaaagttgttttttggagaccgtgcatgctcttgtccaaaacgacaagtattatcaactggaagggagtattaatttgtgttagctcctgatgcactacaaaagtacggagagacaccacaatttacaccataatgtggtacttttctgtacctctaaagaaagtagtaaaaaaactattgtgtgcaaataatatacacctttaattagcatgtaaacatgtaactgcacatgaattttttttgcttaatttgtagtgaatttatagctagctagttactatttctataactcttgaagatgaatttataatggtgggagagggtagggttggaaaagccatcaacccgggttttattcaacgtgcatactttttttttaaaaaaaaaacaacattgttttattcaacctgacatttcacatatagcatcagggaacgtgcatacttttttaaaaaaaaaccaacattgttttattcaacccgacacttctatttagctgttccttgtgctatttttcatatggtagaagctagtttttcgtcataaaatattccattcagttatacaaaacaatgtggatttggaaacttatgcatttggctagcggtttgtattataatatacttgtaaagttgtaacgcctagcgtgattatgttatttggatgaaatttatgtgagaaaatataatggggaaatgtagctttgtcatttatgatggcatttttttccatgcctgcatagaaatatttgacaaccataatgcattcatattttttcccggaaagttgagtgtcctaattttgttcatggtgaaaaatgcattattttattatttgatatctaaggcacattatattttgttgggcgaccaagtacaagattatgtgtgtttctctttttgtcttttaaataatataacatatagcctcttgcatctgggtaaacactctttaattaatctttttttaactgtttttttctctccaggaaacatcaggtggtaaggatggcacagaatggcagtacccatccttctggccatctgacagccaggatcatcatgggtaaaagagcaacgtatctagctgcaccttgagtatgagtagtagccaatctcggtgaggcaaccaaaagcaaaacaagaaccctgacaacatcattactaccatgataggagcagcatacatgcactatatacactcctacaagactaaaagctcaccagcttagcacatagcataggaggcaggagtggcttccaagaaacacacaaaaggcaaagtttgcaacaaaatccaaccccctaacttttatcccccccttctccctctatctctctcttcctcctcctcctcctacttcatctttctcttcacccaatgtgtctggataacgggatggaagtttcatttgagtgctcaaatttacatgtctaaagagacaaagatgatattgaagcaaagcaaaagggagagacagaaaaagaaaaaggagaggaaaaacaaaggtgacatcacaaggaaggttagttaaccgtcggttgctcaggcggattgatgcgaaatcatcaccgcgatcattgtttaccgacacctttccgacaaagtgattgaatgttagtctaataatcaggagtattgataaatattttattacttttgttgtattgatttgattggttaatattaattgtacaccattacccttttccttttgtcttatactgagaaaagaagctaacatgttggaaaaagaatgaaagggtcaatttgtaaagatggcacaagttctcatttgattggtccatttgtttctacagatttgaattttttatagtttctcaagatacacatttgccaagaaatattccatgaacaaggaaactctaaagatttctaggtatgcatggctagctttagttccaaaatcttcctttttcctaaggaatatctttaattggttccaaaaactcctcagtggcatgcatgaggagggaataaatgtttccatattcttctgtgattctgtcacatgcaaaagaagagagctagctaggcgcaaagaaaagcttgtcatatctcttgctataaacgaaaagcttgatcttaccctcttactccttctgtacctctttcctctcttgcttttgatttcttttttttttctttcaaaaagattttaattggaccatgggcaacgttaaaattgctctctctgcatgtgtttagtattttgcattctggcatcttgtcagaatcgaagttgccggagaatttcccagtgtgtgtagtggagggagaatatgatgagcatggcaatgcatggatgaacctgatactgcccttttcagattcctccaaactgagattaatgtgaatgtgtgaatgaaatgtaatcaccttttaatatcagtaccacttcttcatggcgagagatatgacaggttgtacacgcatttggcgtacgtaaatattgcataaatgacactgattaatttcttttagttttagttcgaacaaatactcagtgcaaacagttaaatgtgtggcattaggggtgcggagtacgtcggtataactgaacaaaaggtccaggtagttcggttttagaaaaatcgttcgatctatgaaaataggaaaccgaactttgtcaatagaaaatcatgaactgtgatagttcggtcaatcgaactgtcgatcggttcggcggcgaaactagcatgtagcaatagcgggcatcatgagggaatctgttggagagagaggcaacaatgagggagggtcgtcacagatctactacaagggagaccgctagggggcggacctaggctctgagggccaatttggattgctaccctaccaaaatttgccctaccaaaattttggtagggtagcaaaccaaacacctctactaaaactctaccaatgctataaatttggctttgcctataaacttatctcttatgggtaaattttggcttcaatccaaataaacattttcaactctacactaccaaaattttggtagtaccaaaacttgcccaagatttggcactaccaaaatttgacatcaatccaaacatgccctgagtaacctgggtgtgtttggccgcttgagacaaaaggcccatagagcactctgatatttcaccatgtaaatttttattgggccgaaattctaatggagcggcttgggccttggcccatttatgtgtccacccctagagaccacaatggcttatcgggctatgatccaatgtttttttttttcatcctctttgtctcgatttggtttgtgctactccgaaatatgcaaatcatttgatgcttaaaagttaaggtacctgtggtagcagcctgaagagctgagtgaaagtcagtccatgcaaatgatagaccgatctaagaaacaccaactaatggttcggttatttcgagttcggtattggtttttggtcttcatattttctgtacctatccctatctgacactctaccggtcaatttgtttatttttcctagcatgattaattaaatgatatatatcatatctagagattaattcacattaattgtgcgctcggtgtggtgcaatattaggaagaaaatgacaatggttatcagtacaaatggaaaatggacagtgacggagcgcggggctcctcaccgggagaccgcgcaggcccccctttgccggttcggccgggggctcagggtgatgatcccaagctctctctgtttgtggaaagatcgcgacctctcaaaagagcatgaagcacaagcgatgtatacaggttcgggccgctgagaagcgtaacaccctactcctgtgttttggtggatctgtgtatcaaggagctacaaagtgtgagccaacctcccccttttcttctagctactgaatatgg

SEQ ID NO: 12624 - DNA, 744 bp, Oryza sativa
  unsure (1)..(744): unsure at all n locations
atgttcaagtacgacnagctgtacagnannncatcaacgatgattggggagtaattccatggaagagttgatcagttggtatcaactcgttttgcggaattcccatcgcgtccaaagtgttggcgaaaagaagattgattgagctaccaccgtcaatgagaactcgcgctaccttgatgttccgaatagtgggttcgaccacgatcagatatcgtcctgggataacgacggtcttggggtggtcttctttccgagaactctatcttctgctcagaccacttcatcttgggtgtagccccctgccatgtcgagcagacttcatgttccactttcttgtattctcgcttggaggagtacgttgtggaaccgccgaagatgtgtgagacgtggaggtcgaagtctggatacgctgagtccggttcgtgaggagctgtctcttcgttcgtctcgacaacgtgtactcacttgcctttttcaaatgccatgtgcttctcgagcgactttttgaaaacaaggcaatcttccagagaatgtctgtccgtcttgtgtatagggcaccatgatttctttgggtcgctgctttgggggtctatgcgtttgggagggttcgcgtattctgctgcgaggacttccgcttgagcttttcttttcccggttttgcgatttttcttcttgcttgactcagatgtgtccggggctggtttcttctctcccccggtcttcggcctatcgttctttgcgctc

SEQ ID NO: 12625 - DNA, 2324 bp, Oryza sativa
  unsure (1)..(2324): unsure at all n locations
ccgtcgttcgcgattgttgtgattgtggtggttgttgtggtcccggtcctcgtttgagcggtctcctcgatttccgttatcatggcgccatgaagagacatgacgccgagagcgattcacgttgtctcgtgtgcgtcgtgcttcccagcggccgttgatttgatctcgaagatcgccagtgccgcgaggagaaggggtagcttgttgaggtgattccctccgttccggatcttcaccattggcctcgctagttggtggctgctcctggtgtgctgcggtagcggcttcttcaaacgcgttgctgaggttagtcaccgattcccgtagtcgttctgtccaacgctcgaggtcaacgttcagaacaggatcgtaaggagtttccctcagtatcgcttgaacggccctgatgtgctgggctggagtagtcgattgattccccgcttctgtgttggcgtgcgctgacgtgccgatgtcatcgatagccaatacctcccgcggcgcactcgttgtcgatgacccatagtcctcgagaagatgtaagaccgatggttcgtaaggatcgatatcgattaccccaacgaatcgatctgaagttggagtcgctccttgttccttgccgtaatccatgatgggaacgtatgacttaggacactgagctttcatggcactgagaaagactttgcagctcgagaggtcgtgattctttgtcttgtgaataggacaatagacatcccgagttggagaagtacgctgaattccacgttctttgcaggcgcaaatttcagcacggacgttgaggaaaacccatcaatcttgcagagtgtgtttcttggttttgtggataggacaccaagaccttgtggcttcggaagtcatctttgttggctcatggttcatgtcggaaggacaaggtttggccatatcagaatccttcttgagcttggatgccatcgatattccgttctccgtctcgatgggaggatttttcgacatgaaatcgccttggtttgtagccactgcgttctcgtctccggtcattggaggaccggttgagatcggcgtcgtggtgtaaaccgggaagacgatttcgccgacttgagtccataccagcattgttgaagcagggagtacttggctgaggctggtgctaacgttgttgtcgacgaagctagatgacatagtagtagaaccttgagtaccaaagccccctacctggcgcgccactgtcgacggatgatacccgtagaccggatatagagggtattggggtacgttggtacaaggatctacgtagtacgacatcaagcaaacaaaagacaagaattatactggttcaggccccttgataggtaatagccctaatccagttgatgtgggattatatggtagaaaacacaggttacaaagagaataagggaacttgtcggatccggcgagattgtagtcgagttgattcgactagctctcgatgacttggctcctcataagctccggcttcgtaggctgtggaggttgtgttggctctgagattcgatgtctaaaccccccggggggcccttttatatcgcagatgaggaggtctcctcatagaactcggaggtatcagaccttatacgatacgccaacgacccagttctgcccgagtaggattcttcccatctatagattccatgaaaggtttccttagaatatacatgaaatatccgcctgcgcgtgggtatgccatatcgatatgtaatgtatatcgaagggcaaatgatatgcctaagccgtaaccctgacagtaagtgacataacatggcttcaaatttcaagtctcggagtatttgacagctctgcttctaaattctgcagataaaaaaaccactctgtattgaagcatacaaccagtggtattattattaaaatttatataaaaaagtagaaatgttgactattattttagaaagaaaaataacacgctacatctttttgttgatttgagaagttcagttcgagaggtttttatatcccgataaatatccattaccttattcgctacgatttgtattcgctctgtttttatattctataatatttgattccgtttttatatccggggcttccgattcgattatgatttcgagaaaaatatggaaacgaaaacgatagtgttggtttccgtctgaaacgacagtgaatcaagaataaaaatatagggtgagctcatagtatatgtcaatagaacaaaaataaaatacatatcgttgtgcaagttaaatttagtgcatacatgatcaaataggaatgatgnctnctgtacgactagttatccattnggctcg

SEQ ID NO: 12626 - DNA, 698 bp, Oryza sativa
ttcctgcacccccgaatcgccatggcccagcccggcaagccttctggatggcttgcgggctaggaactcagcgccaaccattatggcgctgaactaagggacctcagcgccagcccacctggtgctgaggtgggacttggccgaatcggccatggcccagcccggcaagccttctggatggcttgcgggctaggaactcagcgccaaccataatggcgctggaccccttgcgggcttggaactcagcgccaggcataatggcgctggacctagggacctcagcgccagcccacccggcgctgaggtgggacttggccgaatcggccatggcccagcccggcaagccttctggatggcttgcgggctgggaactcaacgctagccataatggcgctggacctagggatgggacttggccgaatcggccatggcccggcccagcaagccttctggatggctgggctgggacctcagcgccagtgcacctggcactgagggtgaaaatctcagcgccattttccctggcgctgagtttgcagtcctgctaaaacttagcaagactgctctctgtccagtcagactttgcacacaacacacatcacaggcaataatatattcacaggcagtaatatatccagagaaccatacatccatccatcaattccaacatcattccatacatccatagaatccatcaa

SEQ ID NO: 12627 - DNA, 1144 bp, Oryza sativa
gaaactacacgctggcacgcaaaacgagaaaaaaactctaataaaaaccaaggaaacaggacataaaaactaaacaaacatgtagagctcaattttagatgaattttgcaagttgaatggctcaattcggagttcgaatgaattagatatggattttagaaattttgagccatttaaatgaatttctagaattaaaccgaattattgcgcaattaataattaatttctcaaaggaaatgacaagtgctgacgtcagcaaagggccggcgccgacaggcgggccccacacgtcagcgagccaagggggcggcccacggtggactcggtccaccgcggcacaggcgcgggcgcaccacgtggacggccacgtggcggccacggcggacatgcggcagaggtggcgccgacgtggcgccacgagggcaccgacgcgggcggcgccgaacggccacgtggacggcccagattcactcgaggtgcatcgggcggcctcaggcgggcgcgagccggctcgccgaccggccgaccggggagcggcggagtgcggcgggaaaagggagggggagctcaccgagtagcatacgacggaaggaggtggccggcggcgagatggcaacgcgaggcggtgacggcagagctcgggacggacggaaacaacgacgctccgacgacgggcggcgctcgggaagaggcggatgagcggcagctgcaccctaggatgggaggggaggtgttagggaggacggagcggcgacatggccggctggagaggaagggaagggaggaagggctcaccggcgcacgggaatctggacgtccagtgagtttccggcgatgggaagagatggccgaggttctcctcgtccttgtggagccgagggaggcaacggcgtgggtctgcaatgactgtagcagcggggcgacgcggctggagtcggccagtggtggtggtggctcgggttgacgggggaggtgtggatacggtggcgatttgggaaaacggagcgaaggccggggtagagcttggcacggcgttgccgacggcgcaagcggcgaggtgcagcgacgactaacgcggcggcaatggccggctgaaggcggtgtgtggcggtagtggctcggcctcgcgatgggagggtggttc
